United States Patent Application Publication US 2020/0157537 A1 - sequence listing, part 8

SEQ ID NO: 15503 - DNA, 1811 bp, Homo sapiens
tcggccccctcatcccgcagttcctcagaggtaacgcagccccttgcaggggtgaacggagctggagtcgcaggggtggaggcagcaggggctgggtggaatggctcagctggctctgagggcagggtgagcctggccccaaggtcaccctgacctgtcccttcccaccctagagctgttccctgtgctgcagaaacgcctgtgccacccctgctgggaggtgagggactccgccctcgagttcctgacccagctgagcaggcactggggaggtgagtgctggcaggtggaggggctgccttccccgcctgtggggggctcactgagccagggtgcaccagcagcctcttgctggctctagaaacttgggccatgtcggctgcccacaaggggatggaggcagaggccgaggcgacaaggctcggccctcagtcacagctgcatgtggccgtttcgacccccaggacaggctgacttcagatgcgcactcttggcttcagaggtgcctcagctggccctgcagctcctccaggaccctgagagttatgtccgagcgagtgcagtgaccgccatggggcagctgtccagccagggcctgcacgcccccaccagccctgagcatgcagaggcccggcaggtaggaggtggcaggttcctcagccagcaactcccgcctggccatcgtgtgtgctcgtttgcttgcgggtggtcgagcggccagcatgcagcgtgggagcagctgctgctgtgggcagcgcctgcagcagtgactgccgaggccctggggctgtgctgggtgtgggacctgtgcgcttcgccttctgtctccccagcacccctccacttagacatggttacctccatttgacagatgggtaaactgaggattggagggccgtgtgctcactgcgcagcatgggaaggtgtcagagcgggctgtggccctagactgcatgtccggggccagcccccatcatgtaccggagtcctgttgcgggagcctcgctcctgccaccccaccaaccatccgcacttgctccctgtcccccagagcctgttcctggagctcctgcacatcctctccgtagactcggagggcttcccacggcgggcggtcatgcaagtcttcactgagtggctgcgggacggccacgccgacgcggcccaggacacggagcagttcgtggccactgtgctgcaggcggcgagccgagacctggactgggaggtccgcgcccagggcctggagctggccctcgtgttcctgggccagactttggggccgccgcgtacccactgcccctatgccgtggccctacccgaggtggccccagcccagccactcaccgaggcactgagggctctctgccacgtggggctctttgacttcgccttttgtgccttgtttgactgcgaccgccctgtggcgcagaagtcttgtgacctccttctcttcctgagggacaagattgcttcctacagcagcctgcgggaggccaggggcagccccaacactgcctccgcagaggccaccctgccgaggtggcgggcgggtgagcaggcccagcccccaggggaccaggagcctgaggctgtgctggccatgctcaggtccctagacctggagggcctgcggagcacgctggccgagagcagcgaccacgtggaaaagagtccccagtccctcctgcaggacatgctggccacgggaggcttcctgcagggggacgaggccgactgctactgagcagaaccagagtctgccactggggctcaggaccaagggaggcagcaccatgtccttctgtggg

SEQ ID NO: 15504 - DNA, 1129 bp, Homo sapiens
gcagctgtgtctggttcgttctttgcactaaccacatttgtcatctctagggcaggctggggctgcgggctgagggggaccgctggcaccccccttccctcccttcttggttccatttccatccatgacaggtacagcatcccaggagcccggcctgaggggctggacccgagccggctgtgaacatccctcagcccctgctgtccccccttgggactaaccactaacctcacccccaaactccacgggtgcccctagctggcccagagccggcagtgtgagcccaagtccgggctggagccgaggccggagcagctgtctgggagtcaaggctgcagtagcgtttcttcatggggtgctccagggggtgccacagaccgacaggcagcccaagggcctggacacccctccccaggcaggtgctgccccaggaggactgtcctcgggaatgaacctcccgcgggctttggactgaggtccctgtggcctcggtctcctccccatgaagtgggagcgaggctccccaatggtgcttttggctttagtgtacgatgtttgctgtgcttcccgccgtggagggcagagccaccccacatcaggatcggacgtgctacccctcccggtcccggccctggcccagccagcccagccctcgaggctcgatgcctgtgccaaggccaggggcagccagagggcagctggatggccacgtgcaggggtcaaggctgggccctgcagtggggcgggccgccagccccagcagtttacagacgcatggctcttcctcccagagcagccggcagctacctggaccggaaatgtcctcatcccctccctggggccaggctctgccctggccttcctctgtgaacccctcctttctttgtgctggtgtctgggaccaaaaagggggaatatgggagggcagagtggggaggggagtccatgggcctggggccccaagccggggcgtctgagctccccaggcatgaccaaacctcagtggaggggcctctgcttcaggccccgcctggctgacattctgagcccccctcggaggccccgccacagccaacctgcccagtctttcctctgggcttgacccgccaggggagttctccaggcctag

SEQ ID NO: 15505 - DNA, 1080 bp, Homo sapiens
tggccagcccccactctcaccctgcacagggggtcttgcagcccccaggcccacagcctcgttgggaggacagggtggccctggggacaagagggaggagcccaggggcttacctcactgagagtgctccccagcaggcatccactaccccagggccccccacatgtcatggcaaggttggtagtgaatgggcctggttgggagcagcccctggcccattgcccacccacccatctcactatgcaattcgagttccaagcaacatttgctcctgccctggggccagctctgccccagccctgagaggggtggtgaggcagccccctggaccccagaaccccagacaagggggcaggcgggggaccagggcctctcctgtgggatctttgttttgtgtttaaccataatggttgtgtactgaaccacttcatatttgttatatataatatatatatatataatctccttaagactcagcctcctggtttacccccccggcctgggcatctgacctcccccaccccagtgtgatttaacatccaggaactgaggcctgaaccattttgcatttccccctcctccagcctctgtagggccatggctgtatgtactgtcgctgtgtttttttgtttttttagaactgggtttgggggctgatttttatttctttgggggctttttttcttggcaaatactaaaaatctcgtcaatgtaatttctgtggtttctattcagcttgggtttcatgttttaaaataaattttaaaaagcaagcctctcttcctgagctgctttggctcctggctgggcgctggtagggagtccacggctccaggcaggggcattgggggaacagggggacactgagggtggggccgaccaggtcagctccgaggggtcggctgggcggggcctcttgtggttgcgggcggggcctctcggggttgtgggcgggtcttcaggggtgggcggggcctcggagtgactgggcggggcgccggggacaggctctccagggatggggtgggcggggcgccggggaaggctttccagggttggggtgggcagggcttctggaat

SEQ ID NO: 15506 - DNA, 3859 bp, Homo sapiens
ttaggagttagaaaaataaaaaggtatctctggtatggaaacaaaaaagatggtaaatttcctctggagaagaaaatggatgtggttttgcgctgggcctgcccacgagtgttctgagcattcgtcctcagactggtgagcctccgttcgttttgaaatgaagtatttgattctttctgtttcacggccagttgataatgttataaatgaaatttgcttttggtttctggttcaacctgttgcaaaagtcagtctctttccttcttatctttttgccatctttttgtttctattttctctgttctttcttcctccccctaaatttctgcctcatcctgtattttacagaattactttcctagtaagcaagatatcctgctggctaggaaagccaccaagggaattgtggagcatgacttcgttattaagaagatcccctttaagatggtggatgtgggcggccagcggtcccagcgccagaagtggttccagtgcttcgacgggatcacgtccatcctgttcatggtctcctccagcgagtacgaccaggtcctcatggaggacaggcgcaccaaccggctggtggagtccatgaacatcttcgagaccatcgtcaacaacaagctcttcttcaacgtctccatcattctcttcctcaacaagatggacctcctggtggagaaggtgaagaccgtgagcatcaagaagcacttcccggacttcaggggcgacccgcacaggctggaggacgtccagcgctacctggtccagtgcttcgacaggaagagacggaaccgcagcaagccactcttccaccacttcaccaccgccatcgacaccgagaacgtccgcttcgtgttccatgctgtgaaagacaccatcctgcaggagaacctgaaggacatcatgctgcagtgagcgaggaagccccggggtttgtcgtcgttgagcagcccccacggctgtcggtcagactcttgggtgtgtgttgtctgtgtggtccttgagtgggtttctcggatccgtgccctggaatacctggctcaggaatgctgtcagaccagccagccagcgagctctaggcaaaaggacatggaaactgtcacgttagctactgaatcctgggggcgagtgaaactactgaaaatccgagtgatgatgttgtgaatacggaacacctaatcacacagcttgctttgcttttacagaaacgttcctctttttctgacgcagtttaattgaggaccgtgttgtgtgtgtatgtgtgtacacacgctctgtctttaatgacagaaacacaaaaaccagctggccttgcagacggcttttctaactcacaagtcttccctgagacagactaacctgaaagctttgcctaacagtagcttgtagagatccagtgcacgccgatgctgctaaactcagtgcctgagcccggccctgcagccccagccgcagtgtctgaaggccacctcccaaagggagcacgttgccttttcaaactcccgtgccgatttcctaagagcccctagtccaagcctctcagatgaagctgaggagccgtgcctaggatcccttcccagctctgaggacgggctgcagagctctgcaggtgtggattcaccttacgcccctacagcaggctcagcccttcccaccctgccccatgcccagcagcacaacacggagtgagacaggatgcccacggtgactgccgctccgtccgtgcacacacagcggtgctcttctccccttagccacccactgcccaacccaacggcaaagacacagaaaccaggtccccttgcagacggctctcccatcttcctgcaagtcatctgctcacacacagttggcagcacatagcgtttccttctttcagaaacattcctcttctggggcttcagaaagctggcaaggccactagcagagcttttgttaatgccccagctgcttggcgagctaacagctgacctttcgggaagcccacagacgctggaggaatcttgagtttctccaaactgccgctccaccagtgcctttggacagccgtgcctgttcgccgctctccctaagtctgattctcatcgaggcccctcgcttctatgactgtgcttgcagaagagtaaacactctcggatgccgctgtcctgggggagcccgcgggagcctgtgaatgttgatacgagctggccagtcctgggcccagctcacttgtccagctacctgccaggtggctttcactgtgtttaaaatacattgcattccaagctggtcccctctgtgtatcactctactgagaaatcctgcctagtgtgttttgggatgtgtcctagcatttacaagaaaatgaaaagcgtcctcttaattggcacccgaatgttgctgtggctcagtcacatatcccagggccctcgtcccgaggccgtgctgccccgagccccgagcccctctgcagctcacccttggcttgttttccgcaaacccggtaaacgcaagcccttggggcagatgcagaagcagaagagggaggggaaacctgcctctgggtcaccctgttagcacagcgttctcatcgggagacagcatggaactctctctcgcagtgctcgaggctgtgtgtcagtgtttgctgggcttgtggctccttttttggctggataaagaagtcgctgtttttgtactgcttctgtggctcttcacagacctcacggatgtgaccggagatgagtgccgatgaccacgttttaaaggagaaagagagctcctggtggggccctcggggtggtctcaggtcccatttgcagtctgcaacagtgacgcgcagcccggtccggagcgtggtgagctttgtttgccttctgggtcagctttcgctgtgtctcctgtgtgtgttagaatccagagcccagaggaagtgcaagcgggtcctccgccaacggggagagcctcttcgcggcgctgttggcgacagcagcgctgtgattcgcgtagcaggggagttgtttgaaacaccttcctgagtagtccggccttgtcaatgagtgcttgttttcctttaaacagtctgacatatttactcgtcactttcaaaccagaagcatgagaggaaggagatattgtggggtccgtttaactcgatagaaagcgcagggggatggcccccggcgcgggctcttgacccgctcagcgctgaccccaccgccctggccgaggcacttggccttgctgagctggacttcctcctcctcctcctcatgaccggggtgaattagaacgtttttaaagacacccccttccaaattctgtaacacattgtaattggagaagaaggaaactctgcaaggctaaactgtcattcacaacttggctacacatagactctagtcagttttgtctccagaaccttaggcttttgtattttttaattttaatttcactgttaatccttattgtcttttttattaagatgttggaaaagcaggaggtagttgtgcctcaattattgcaaaaatgtaacaataaagttcctcaaaataagatctgttcctcatagctatactgtgtacacataagacgcatatagggttttactgaaatctatttttaactcttatgttcgtagagaaattgtttcaaggattttgagtcataggtctgtaatttatagagatctctagaattcttattgtaattttcctacttctttgataaaagaaaaataagtcagattgttaactccaagattgaaaaaaaaaactcttgaaagaagattattagttgtaactaatttaggggttctgggcacagacatctaacctggtattgtaaggcagaggctcccattggaatggtagtg

SEQ ID NO: 15507 - DNA, 1221 bp, Homo sapiens
gtaactctgagtggtataacaaagatatcaaattttagataacacccacatcttcctgagcatcgtgtgattttagtagctagaatttctttgtacagaagtcattgtggagggaaatgatgtgaagaaaagaaagaaaatcctgagaacagagcaacagttgctgtggagtggcgtgagggccgaattcaagtataaaaatctggattagaatcctccggtcacttagtagttgtgtgactttggtcattgttgaactgttgtgaggtttccttttcagatcaaaactttcccttttccttctctcattcccatcttttcaacagatgacatcaccttatatgttacagagaaacagaagccattagatggaaaaaacctcaatatccaacttacagaaatgactgacctgcatttatcttcagcatttcctccttttattaaatatctgaggtcagtatctccacttgggttttgagttccatctttttctgtcttcctagggaacatgtactatcaatttatcttttccctttcttgaatacccaacttgttgctcttaaccagatcagtttcatcggcatttaagcatgttcaagactcttctgtattaaaaaagaaccacgacctcccctaacccttccctaatctaactactgcaccctacctcttctctttgcatttacagcaaagctcccggaaagagttgtctgctcgctgcctcagcccacacctttttcatgtggtttccgcttctgtcattctatcagaattgctctgcagaggctgatcagtgacttcagtgaaaccaggcctaaaggatgctcttcagttcacatctcactcctcagcagcattcttcaccgcttgccgctctatcgttttgaaatacctgtaacaagcatgctgccttggtttccctcctaaatgacctctgctccctctcctctcaatatctttctctcttcccccctgccccgccgaggttgagtatcattataatatcattgtctacctattattgaatgttagcatttcccaaagctagacctagttctgttccattctcaacctacaatcttttcctaagctatttcattcatgtacatagtttgaattgtccttttatgtaatattatagatgattcaaaaatttatctgagctcccatcacgtctatctacctgttaacttgatatttctacttatatctttctaagcc

SEQ ID NO: 15508 - DNA, 1184 bp, Homo sapiens
aatgtgtgatgatgctaacatacatgctatctcgcatgcagtggctgtggatttagtaacatatctcgagtaattttcattttgttgaacataacatttggaaaacagtagtacatatatatgtatatatgtgtgtgagagacccattatttcattattcattctacagatagtacttgggtacacatggatttgatggcccctagcaggaaatatttgtcctcatagagaaaacagcccacagcttagggaccattgctgatgaggatccctttgaaacagagatgacttggagaacactcacatctgtagctgaaacaaacagtctaggaaatagggaagggcatctcagcctcacatacagtgcccacttattaaatttctgcaaatgatgggaggtgctctgttgtggttttcatgcctgttgttaaaggaatctgacagccgaggcatcaggctgctttcttcagccctggtgagagtaggagctctggagtgaagccagtgaatagaactttgccaagattctgaatcttctgggaccatctgtgtctactttttcaaaaagcagattgtgtgaaatgacaggtgggtaggacacagaaggtaatagagatgtgaatgagaagactctaggaagggagagagcaagtacgggtgccagcgggaagagcccagcagaagattgagtgtcctggcagcaggactgagaggatgaggtcacaaatggcttttttctctgggaaggaagccagtggtgtgtgagttgtggcttgggttccagatcttagatcagttttccttacacacaatattaacgttcatattccttccaggaaactatcaagagtaaatggatcaacaggcagccaattggaagagcctcagacatagcaagagggtggcatggagggagaggacatataaccctctctttggcagctgtgcctaccacactctggccttgaagattctgctttggctcccagactagagacccttttgcatctttgccatcagtctttttggaatacagcatcaggcctaaggtcccagatgaaccttaggacagctttcattttgaaaattttggttctcagttcacattttctagctttccattgagtggtgtatcagttagctgttgctgtgtaacaaaacccctctcaaatttagtgacttca

SEQ ID NO: 15509 - DNA, 1131 bp, Homo sapiens
tctttggccagcctcagtatgcgagcacgtaggctagcgctcagcacatgagtctatggaacccaggggaagcaattgcagtttcgtagtagtttgtgtcttaattaagggagcccctagaccttactctttcactttacctaggagtttggttcctaaactcaccattcaaatccagcaacagaactgactgaaaggaacctttgtctttcgtgtgaatgctcgtgaggggccatccttagagtggaaatgctcctgaggctccagcgaatcaagaccctcagacccccgggctgtccccaccccatgaccacatgttccgcaggcaccctcagcgctgtgccctgcgtgtcgcccaggcaggtgtttgtttttgagcgcagattctgcctgtggccatagccatgtggagatgttcacgcatgtacttccctttgtgatttcagccgatacggaagatgtgtgcattgtagagagattgttctccagcagcctagtggccatcgtcagccttaaagcaccaaggaagctaaaggtttgccactttaagaagggaactgagatctgcaactacagctactccaacacgattctggctgtgaagctcaacaggcaggtgagcgctgccccagctgggtgtgggcttgtctgttgctccctccagcactctgggacaagcccaccccaccggcatgcccctccgtcattcccttgctgcctggccccacgttgccgggcacagatccttgcctacagagaccagctctgtttcctcacccaccagctttgctcagcccattccattcacgacaaatgcccgggcctctgccacactgctcccatacaggcgtccccggccccacccagagggtggatggcagtctctttcacctattacctggttttgcttttataaatgttacttaaaaaaaatatatttggccgagcacagtggctcacgcctgtaatccccacactttgggaggccgaggcgggcagattgcctgaggtcaggaatttgagatcagcctggccaacatgatgaaaccccgtctctactaaaaatacaaaaattagccgggcatggtggcaggcacctgtaatcccggctactcgggaggctgaggcagg

SEQ ID NO: 15510 - DNA, 1272 bp, Homo sapiens
agagtgtgcgcgcccagtgactgcaccccggccctcatcacccaccggcactgatcggggcaccgcctggcccagcctccaccagggacccctcctcatgaactctggagccctgagaggagaggggcagccccccaccttgtcaccctcagggcttccccttctgtcctcattcttagagactgcttctcccaaacataacgcgttagccatgaaggagtcggagccctgggtccgaatggacccgcctgcggtctgcatcagcctctgggaaaccacagcagtgatgccagctgggcacgtcaggacctccccacacacccacacgatgccacaggtcagggggctgtgcctgactagggagccctcccattgccttcctggcccgggatagaagaggggaggtaagtctgggggctacgaagccgggcccccacaccctggctgaagtcagcttgacctaggtcttgaccctcatccagcaagggactcgacagacccaagggtccctggaacgtagggaggggctgggggtcagtccagcccgggcctcccagaacaccaggcccgtgtgggtggcaccctgaggtcaggggatcctaagggtgtccttccagagacggtgtttccagggggaggaccgcccccgcttccagatccccggccccggctgtgactgccctgtttcacccctgctgtgtcccatcccccgtctgtccactaactgtaccgcaccggccattaaaagatgaaggcagaccgctgcaccgccgcctgcaagcagagtttgtgcgtggacgggggctgggactgccatctcgggataccggtggaactcgggctgccccgcataagccggtcctcagtcttcccatctgtgaggtgggccgggtggatcagggagcaggagggtgtcctcacactgggtaggcttggtttgtgggcagcgctgggtagtggggtgagagctgggagcacttagggtttgtcgctcaccttgaccgcccgccccccccaccccttcgtgaggatcagggaggatggccacatgcagcccatttgaaggggaaacaaagtgggcggggcttggcccctgcccctcagggactgcactgcatcctaggagtcagagcctcctggcttcgagcctcatcccttttgctgatttgtgcaatttggacaaaatcctgcactgttctgtgcctcatttctttctttttttattttttttttgagactgagtcttgctcttgtcacccaggctggagtgca

SEQ ID NO: 15511 - DNA, 1188 bp, Homo sapiens
tgggtctgggatgggctcggtgctggctgggggctcacttccacctggccccctgcagggcacggccgagcagatgaggactgtgtggacgaccgggccagacaccgggaggaacggctgctcggggcacggctggaccgggatcaggagaagctgctcaggtgagggtgtcgggggatcctgagggtctagggggtatctaggagcccctgggggtgaggggcagctggatgaccccaggtgggcttggcccctcgaccatggatgctatggtactgagagcgggagtcactctggtcctcagcatcgggccagccctgcccaggccaggtggccccactgcccctacagtgagtgtggaaggccccgggaggcccttcagttccgagcagtggttgtcctgactcatggcctggtggcaaacagttccttggggcaaccccgcttctccctctcgtcccctgggctgtccgagctgtcgctgacacctatgatcctccttccagagagagtaaggagctggctgacctggcccgcctgcaccctaccagctgtgctcctaacggcctgaaccccaacctcatggtgacggggggcccggcgctggcgggctcaggtcgctggtctgccgaccccgcagcccatctggccacgcacccctggttgccccgctcgggcaacgcatccatgtggctcgctggacacccctacggtgagtgtggggcacagggtctctccccttctctgagggaggggtgggagggggcgggtgcaggacaagagctcagggctggctcctgcctgccgtttcctggggggcctgggcctgcctcccgcattcgtcggaagaaggaatgataatggcctctgcctcgtggggcccctctgccatgcctgtttggggcagatgcccaatgcgggtggctctggggtgctctttgcagccagccagcacccctgtcccttggcttccccactggaggccccaggaggttcaggacttgggaggtggtgctgggctggggctgcccgaggacaaaccgcttgggggctcccagcactgactcaggcctgggcttctcctcctaggcttgggtcccccatctctgcaccagggcatggcccctgcgttcccacctggcctggggggctccctcccgtcagcctaccagtttgtcagggaccccc

SEQ ID NO: 15512 - DNA, 1133 bp, Homo sapiens
agagctgtggggaggtacagccctcctgtgcaggctgcctcccagctctccacctggcagtcttgaccccaccctggcgcctctgctcactggcacaggtggatctggggtttgaggtctcctcccacttcaccctgactttcttgtatgtatggggtcatcgcctcctctctgaagcccacgggtcctctcccagccccaggctgcacccagtgcagaacctttgcctcctggccagagggacccttctgcaggctgattccagcagtgcccgatggtgggacccacaccagaccaagccttcgcctcccagaggcctcctggccctcctgtcatggcctgtgagagccacacccctaggccccgtctcctagtctgcaggccgcaggaccagctgcccacggccccagggggcaggggctgtagatgagggtctcagaggtggtgggagcaccccccccacccacagttcctgggcatttctttagagctttaaaatggcacctggagaccaccaggcgcggcgatcagatcgggtggtgtggtgcctcctgggactgaccacttcttgctctccgaccaggcaggggcgagtggcctgggaggttcccggaccctcagggggcctgtgtctctgggcaccgcagctccgccccactccttcctccagaacattccccactcgggctagagaattgcgtctgctccaggaatgcatcctagcgtgtgtacgatcgcgcctgggtgtcctgttctcatgagcaagcggttttaaccagcagcataatttatactcatagacaggactgggggaagggctgttcctgaggctggggtgcagtgccttggaaagcacccctgaaacagtggaccttgtatttttagtgtcccctgcaaccatcctctgacttagagcaagaatttccgctgctgctacccccgagatgggcttcaccagatgttaataacgtgcttattttctctaagtgctattttggcaccagcgttagttgcaatttatattctgcagcatttgatgctgggaaaagaacccaccctaatggtccccaattggcagagctcggctgttaagcagcagaccatatgctgcctgctggaggagcgtggtcagc

SEQ ID NO: 15513 - DNA, 1236 bp, Homo sapiens
cagcttccaggccgagcggcccgcgttaaacgtcgtcatcttccctctgctccacgagggcctgaccgacgtcatccgggacgtccccctggtgcacctggatgagatcaccttatttaagagcagagtggccgaggaaccgccgaacctgtggtggtgagaggcggagccgccgcccatcggtctcagtcacctcgagaagctgcaggagcctgggacgccagggacccttggtttgtcacaagaggaagggggcctctctcccggccagccacgccccacctggctcctggggctcccggcgtctccacggctctctcatggggactgttgctctgtgaagtttaggtcgaggggatgcgttctgggtgacatgagggggctcgggggacggtcgatgtggggggctggctgaaccaggctgacccttggggcctggctggggggtttgtatactgagccgcaatccctgggggccctgtccacgggcctggagggcccgaaccccctgccacttccgaccgggaagcgtgtcccttggctgttgtgtttgtggtcacctgccaccggggccccgtggatgggcggccacatgctgtccccctgaagtccagtcggccgggctggtcaccgtgtatctgagtgtccccttgcatggtcaagtgtgacatggggaagggcctgccagtttagtggctgcagacttgggactctccatcccattaggacacacttgagcccactcatgtctctggggcttttctagccagatgatgcctgtggccccagagaggtcccctgaggttgggactgctggttggagcctctcctgtgacttttcagcccaaccagcagggcccgtttctaacgagagaggcctcctccccctcccacccaccccacggccttcagcttccctgggaaggtccatgcgcgttcctggggaaatcgatacacattcggctttgttagaataacgcgaaacattaaaacccagaaaggattcttaaggctggagtagcaatcacatgaccccatttcaaatgacttcatttaagactttaaaaatactcagctgggcgcgatggctcacgcctgtaatcccggcactttgggaggctgaggtgggtggatcacgaggtcaggagttcaagaccagcctggccaacatggtgaaaccccatctctactaaaaatacaaaaattagctgggcgtggtggcgggcgcctgtaatc

SEQ ID NO: 15514 - DNA, 2247 bp, Homo sapiens
ggacgcctccgaccagtgtttgccttttatggtaataacgcggccggcccggcttcctttgtccccaatctgggcgcgcgccggcgccccctggcggcctaaggactcggcgcgccggaagtggccagggcgggggcgacctcggctcacagcgcgcccggctattctcgcagctcaccatggatgatgatatcgccgcgctcgtcgtcgacaacggctccggcatgtgcaaggccggcttcgcgggcgacgatgccccccgggccgtcttcccctccatcgtggggcgccccaggcaccaggtaggggagctggctgggtggggcagccccgggagcgggcgggaggcaagggcgctttctctgcacaggagcctcccggtttccggggtgggggctgcgcccgtgctcagggcttcttgtcctttccttcccagggcgtgatggtgggcatgggtcagaaggattcctatgtgggcgacgaggcccagagcaagagaggcatcctcaccctgaagtaccccatcgagcacggcatcgtcaccaactgggacgacatggagaaaatctggcaccacaccttctacaatgagctgcgtgtggctcccgaggagcaccccgtgctgctgaccgaggcccccctgaaccccaaggccaaccgcgagaagatgacccaggtgagtggcccgctacctcttctggtggccgcctccctccttcctggcctcccggagctgcgccctttctcactggttctctcttctgccgttttccgtaggactctcttctctgacctgagtctcctttggaactctgcaggttctatttgctttttcccagatgagctctttttctggtgtttgtctctctgactaggtgtctaagacagtgttgtgggtgtaggtactaacactggctcgtgtgacaaggccatgaggctggtgtaaagcggccttggagtgtgtattaagtaggtgcacagtaggtctgaacagactccccatcccaagaccccagcacacttagccgtgttctttgcactttctgcatgtcccccgtctggcctggctgtccccagtggcttccccagtgtgacatggtgtatctctgccttacagatcatgtttgagaccttcaacaccccagccatgtacgttgctatccaggctgtgctatccctgtacgcctctggccgtaccactggcatcgtgatggactccggtgacggggtcacccacactgtgcccatctacgaggggtatgccctcccccatgccatcctgcgtctggacctggctggccgggacctgactgactacctcatgaagatcctcaccgagcgcggctacagcttcaccaccacggccgagcgggaaatcgtgcgtgacattaaggagaagctgtgctacgtcgccctggacttcgagcaagagatggccacggctgcttccagctcctccctggagaagagctacgagctgcctgacggccaggtcatcaccattggcaatgagcggttccgctgccctgaggcactcttccagccttccttcctgggtgagtggagactgtctcccggctctgcctgacatgagggttacccctcggggctgtgctgtggaagctaagtcctgccctcatttccctctcaggcatggagtcctgtggcatccacgaaactaccttcaactccatcatgaagtgtgacgtggacatccgcaaagacctgtacgccaacacagtgctgtctggcggcaccaccatgtaccctggcattgccgacaggatgcagaaggagatcactgccctggcacccagcacaatgaagatcaaggtgggtgtctttcctgcctgagctgacctgggcaggtcggctgtggggtcctgtggtgtgtggggagctgtcacatccagggtcctcactgcctgtccccttccctcctcagatcattgctcctcctgagcgcaagtactccgtgtggatcggcggctccatcctggcctcgctgtccaccttccagcagatgtggatcagcaagcaggagtatgacgagtccggcccctccatcgtccaccgcaaatgcttctaggcggactatgacttagttgcgttacaccctttcttgacaaaacctaacttgcgcagaaaacaagatgagattggcatggctttatttgttttttttgttttgttttggttttttttttttttttggcttgactcaggatttaaaaactggaacggtga

SEQ ID NO: 15515 - DNA, 1102 bp, Homo sapiens
gagggtggggcgtcacccttgggaacacccgtgcccaccctccgctgcccagggtaggggtggggagccaggctttgggccccacttgataaagtcccctccccagactccacaggcaaatactggacggtgggcagtgactccgcggtcaccagcagcggcgacactcctgtggacttcttcttcgagttctgcgactataacaaggtggccatcaaggtgggcgggcgctacctgaagggcgaccacgcaggcgtcctgaaggcctcggcggaaaccgtggaccccgcctcgctctgggagtactagggccggcccgtccttccccgcccctgcccacatggcggctcctgccaaccctccctgctaaccccttctccgccaggtgggctccagggcgggaggcaagcccccttgcctttcaaactggaaaccccagagaaaacggtgcccccacctgtcgcccctatggactccccactctcccctccgcccgggttccctactcccctcgggtcagcggctgcggcctggccctgggagggatttcagatgcccctgccctcttgtctgccacggggcgagtctggcacctctttcttctgacctcagacggctctgagccttatttctctggaagcggctaagggacggttgggggctgggagccctgggcgtgtagtgtaactggaatcttttgcctctcccagccacctcctcccagccccccaggagagctgggcacatgtcccaagcctgtcagtggccctccctggtgcactgtccccgaaacccctgcttgggaagggaagctgtcgggtgggctaggactgacccttgtggtgtttttttgggtggtggctggaaacagcccctctcccacgtggcagaggctcagcctggctcccttccctggagcggcagggcgtgacggccacagggtctgcccgctgcacgttctgccaaggtggtggtggcgggcgggtaggggtgtgggggccgtcttcctcctgtctctttcctttcaccctagcctgactggaagcagaaaatgaccaaatcagtattttttttaatgaaatattattgctggaggcgtccc

SEQ ID NO: 15516 - DNA, 1207 bp, Homo sapiens
agcttcagggccagctcgtgggggagatgtcccttgtgtgaagaacgtggacttcttcctgattgcagcaggaagtctatccatggtcattaaacagggtagtgaaatgatcagatttagcttgtcacatgattattctggtagcagaggactgaggatgtaatgatcccagcaagagactcccaggaccctaagggactcgctgtgcatacagggtccctattgtgtttcttaaagccgactgtggagccgcctggctcacctgcccagggactctggccgcttagcagaaaggcgggtgagggacctggaggagcatgatagtctctcctgctgagggtctaaagatgctcattcccacagggccagttgttagaaatgcaggcactcacacagatacgctcttctctcagtggtgcctgcctttctttttttgtttaattgttccttgcagtagcacattccatgggagattccatgacagggctattctctcgatttcagtggttttgattttgtgtctgttgtcatagcgcctggagctaagccttatcaaataattgcacatctggtgatcacttaggcttccagaaatgtgaggcagggaggaccctcaagggactctggtcagcactcctactgctgagaggcttcaccgcattcccccagactcaccaacagcctcgttacacttgttacggtgtgtgtgcaccagtgcgctcagcgcctgcatcctcacaacccagccccttgtgaggctggccggaccacagcttgccctgttctgcaccattctagggctgaaggatttgcccaaaatatgtcactagatggtgacaaacaggcccttagtccagtgcctttagcaggggctggctggagcagcatggccatgttcagatgcctgtcccaccacttgttagctgtgtgcaccgcccccccgccaccgcaccaccaccacccctacccgagggtgacaggatcctcctgaaaagtctgttaggaggattaaatgacttgataactaagatgtttcatccataagcactcaataaatggtagctgctgctgttattcattccactgtatctaatctctgtactcttaaattttacaactttactcaataacttttaaaatattctacacttgtggctcccataaatttcctctttgctctattgaggccatttctagtccctgtgtg

SEQ ID NO: 15517 - DNA, 1251 bp, Homo sapiens
ccgggcactttgcagtttctcaggccccgggcagcagtgttgataggctcaaaactcctgaggcctggtaggttttgtaggtggattttttcccctcttctacttgttaacatttcttggctgggcacagtggttcatgcctgtaatcccagcactttgggagaccaaggtgggcggatcacttgaggttaggagttcgagaccagcctggccaacatggcgaaaccctgtctctaccaaaaaatacaaacattagcagggcgtggtggtgtgcacctgtagtcccagctacttgggaggcagaggctgcagtgagccaagatcacaccactacactccagcctgggtgacagagcaagactctgtctcaaacaaaaaaaaaaaaaaaaaattcttgcctagtcttctgggatttaaggtcaaaatcaatgcaaatctctcttcctaattttacccaagaagaatttaattatatatcatgtaaccttttaagtgactgcctcttccttcctcactgttgtgtccttgttgcagaagaggtcaagaaactttgtgcaacgcagttcaacaacatcttcttcttggattgacggatgacggctcaccgagagcatatctaaaaaacactctgcaaacatttggtcacatgcaagttagtggtcatatgacggactgcattcaggacaagggtaaagcaatacttgctttgaagaatcacatttcgactcggtctgctgatctgaggtttttagattttaaatatttatgtggaattaattaaaggtagttggctatatcgctatcatttcattcttttgacattatgtgaatattttactggaaaataagactaataaattgttaaaagtttttaaaattctggtttggtgttgagtctctctcctgctgcctatttatagattacactggccaccagctccgtgacccaggctggaatgcaatggctcactgcagcctcaacctcctgagctcaagcaatcctcccacctcagcctcccaagaagctagaaccacatgtacacaccaccacggtcggctgatgttttaattttgcagagatgggggggtctcactatgttgcccaggctggtctcgaactcccgtaatccagccatgtaggaaacctgagatgcagtgggccaaggggtatgttaaaacactgtgacgagttcagtgctaagaactgtaatgctcaggaaatcttacagcacgtgccatcctaagcctgtg

SEQ ID NO: 15518 - DNA, 1356 bp, Homo sapiens
gattctcgtgcctcagcctcccaagtagctgggatgacagatatgccaccacacccggctaatttttgtatttttagtagaaacagggttttaccatgttgtccagaccagtcctgaactcctagcctcatgtgatccccctgccttggcctcctaaagtgctgggataacaggcgtaagccaccacacctggcccatattatagttttattttgaacattgaactgtgttcatctgtgtaattagcatgtggatctcctcttttgtgaagtatctgttcacataagcacgtcctctcaccatttcaggatagtccctgaccctcttctccgtccacgtttgcttaggtaacttaataaaaatgcatgcagcggatttggaaaagcccatggtagaaaagcaggatcaatccccttcattaaggactggagaagaaaaaaaagacgtgtccatttccagactgcgagaggccttttctcttcgtcacacaacagagaacaagcctcacagcccaaagactccagaaccaagaaggagccctctaggacagaaaaggggtatgctgtcttctagcacttcaggtgccatctctgacaaaggcgtcctgagacctcagaaagaggcagtgagttccagtcacggacccagtgaccctacggacagagcggaggtggagaaggactcggggcacggcagcacttccgtggattctgaggggttcagcatcccagacacgggcagtcactgcagcagcgagtatgcggccagctccccaggggacaggggctcgcaggaacatgtggactctcaggagaaagcgcctaaaactgacgactctttttcagatgtggactgccattcaaaccaggaagataccggatgtaaatttcgagttttgcctcagccaactaatctcgcaaccccaaacacaaagcgttttaaaaaagaagaaattctttccagttctgacatttgtcaaaagttagtaaatactcaggacatgtcagcctctcaggttgatgtagctgtgaaaattaataagaaagttgtgcccctggacttttctatgagttctttagctaaacgaataaagcagttacatcatgaagcacagcaaagtgaaggggaacagaattacaggaagtttagggcaaagatttgtcctggagaaaatcaagcagccgaagatgaactaagaaaagagataaggtaaagttttaattttttactttttctctttttatctaaaatttttatttttattttttatttttttgagacagagtcttgctctgttgcgcaggctggaatgcagtggcatgatcttggctcactgcagcctccacctcccgggtt

SEQ ID NO: 15519 - DNA, 1099 bp, Homo sapiens
gagtacagaccacagcaccacgtctgctacggtgagttcattcccagcgagccaagggctcttcccaagagcagagttcatggagcggaaaacagcggctttttctttactgcttccctcttttaactgaaaaatcgcaatatctacccagctatctataagggttgcgttgacagcattatgcttctggccaaacagagagaacaagaaacgtgcaatgttcccttcgccttcgatggggcacatcgtctggatgctgaatttcatctgcgtcttcggcactgaaaagaaaaaacacgccaggtagcatcaccagagcagccctgagggaagtactcgcacagtggggaaggggacagtcaccaaacaccacagactgatgacatgggaaagggtgttttcaagaagaacatcacattttcagtctgtctctaagatgcttactactgaaaagggtttaagtgcaaactatgttaaaaaagtaaccaaagagtcattcctggtatttgattatgacacttctgaagctagaagggacctcagaccacctgctccaatccctgctgcctaaggttttgggggctgagggctggaaacccaggagctgcatctcccaggctcttggcctcataatcgccttctgtgagactgagggcaattaagatatgaatgacatgaactcgcttatctccatatcaacataaaccagaagaggcatacatctgtgggatagtcaatacataacatcctatctttatatggccatatgagaagataacttcagtgtccctatgatggtaagttcttgaatgtgagggcaagatggctgtgatagccatgactccccgctttgcctggttggacagaacccccttccccaaatgctcacagtcccccccttgagctgtgtctcactcagagaccctaaattttgcagacgaacaagggcatctttgcgttgcttcatctctgctcctcctctagaactatcccacaggctttctagacttagaatatctgacctgatgcaaatcgctatgtggccagtatgccacagaatgtcctaaacccttgctgcctcttatcaaaaccatgttgc

SEQ ID NO: 15520 - DNA, 1114 bp, Homo sapiens
ggtaaaagacccaaccccagcagaaagacaccgcgggcggcccctccgcggaaggcgtggcagggaggcagtcgccctgcggtgcaagctgctgctccagagcataccgtggcccaggtggtatccccaaggcctcgtgccgtggctggggtcctgggaggtggtcgccctgcagtgcaagctgctgctccagagcgtaccgtggcccagactgatcctcgaggcctcctgccgtggctggggtcatggtcggctgcgcatgtccagaagcatttccttcctgcgaccatcccggcgcccctagggggagaagccaggacagcagcttccgctgtctccacagcagacacgggacggattccacagacgggagcctcattcgtaccatgccaaacgcattcactcggggcagtattaaccgttctagaaagccactgttttatagcaaaacaggaaaggaaaagctaccagttttttattcagaatttttctcagatatataggattatagcttttatatgcctttttatattctgaaattataacaaaagatactttctaacagtagtatttttagaatggcagctataaagttaactcctggacacaagtatatactgtgcactgaaaaaatatccatctacacagcacccaaggggagggctgggggcaccggcacgggggcagcgtgcagccctgccctgtcaggctgtcagacaagccccggggggcagcaggtgggctcgggacgggctgggggagggacggccatggcacttgggggctccagggtgactcccatgaggcctcccttcaaccaggctttttggccccacaaatactttaagcaaatcattaaaattataacagttaatggtttgggggtgtttaggctgtaactgctaactcctaggaaacagccttttccctggacacagatggtccatacgctgagccacgtgaaactgctgatgttttgtttagatgcacacacatggcagcgtttcatacaggtcagcaggttagaccggcttttgaccatattcatcgctatttaaaacctgtggcaaaatgaacgcttattttacagactttctaatttgaccagatttct

SEQ ID NO: 15521 - DNA, 2553 bp, Homo sapiens
gcggcaccactgtcccaacactcccatcatcctagtgggaactaaacttgatcttagggatgataaagacacgatcgagaaactgaaggagaagaagctgactcccatcacctatccgcagggtctagccatggctaaggagattggtatggaatcctgtgtttttcctcctccttgtacctcttttattgtagtgacagagactggagtccagtctgggaaaggagggtgtgtgtctcccactcagggcctggtgtactcttggggaaccagctggcaaggccctgtgggtcttaacgtcagcgttggaaggtggaagcagggctgggagccggcagaaggcgcccgggccccaggagctgcctcccgctggtggtgtgatcagaagagagtggggtcgagtgtacattgccgtgtggtcgtgtttcctgtaggtgctgtaaaatacctggagtgctcggcgctcacacagcgaggcctcaagacagtgtttgacgaagcgatccgagcagtcctctgcccgcctcccgtgaagaagaggaagagaaaatgcctgctgttgtaaatgtctcagcccctcgttcttggtcctgtcccttggaacctttgtacgctttgctcaaaaaaaaacaaaaaaaaaaaacaaaaaaaaaaaacaacggtggagccttcgcactcaatgccaactttttgttacagattaatttttccataaaaccattttttgaaccaatcagtaattttaaggttttgtttgttctaaatgtaagagttcagactcacattctattaaaatttagccctaaaatgacaagccttcttaaagccttatttttcaaaagcgccccccccattcttgttcagattaagagttgccaaaataccttctgaactacactgcattgttgtgccgagaacaccgagcactgaactttgcaaagaccttcgtctttgagaagacggtagcttctgcagttaggaggtgcagacacttgctctcctatgtagttctcagatgcgtaaagcagaacagcctcccgaatgaagcgttgccattgaactcaccagtgagttagcagcacgtgttcccgacataacattgtactgtaatggagtgagcgtagcagctcagctctttggatcagtctttgtgatttcatagcgagttttctgaccagcttttgcggagattttgaacagaactgctatttcctctaatgaagaattctgtttagctgtgggtgtgccgggtggggtgtgtgtgatcaaaggacaaagacagtattttgacaaaatacgaagtggagatttacactacattgtacaaggaatgaaagtgtcacgggtaaaaactctaaaaggttaatttctgtcaaatgcagtagatgatgaaagaaaggttggtattatcaggaaatgttttcttaagcttttcctttctcttacacctgccatgcctccccaaattgggcatttaattcatctttaaactggttgttctgttagtcgctaacttagtaagtgcttttcttatagaaccccttctgactgagcaatatgcctccttgtattataaaatctttctgataatgcattagaaggtttttttgtcgattagtaaaagtgctttccatgttactttattcagagctaataagtgctttccttagttttctagtaactaggtgtaaaaatcatgtgttgcagctttatagtttttaaaatattttagataattcttaaactatgaaccttcttaacatcactgtcttgccagattaccgacactgtcacttgaccaatactgaccctctttacctcgcccacgcggacacacgcctcctgtagtcgctttgcctattgatgttcctttgggtctgtgaggttctgtaaactgtgctagtgctgacgatgttctgtacaacttaactcactggcgagaatacagcgtgggacccttcagccactacaacagaattttttaaattgacagttgcagaattgtggagtgtttttacattgatcttttgctaatgcaattagcattatgttttgcatgtatgacttaataaatccttgaatcatacgactggtaatactggtgtttttgagacttgatgaacaagttcctggtgtgtgtttgtttgccttgctttaaagtcctgggttgttggagacagtcattttcaatgcgtgtctccacacaggagggacagggagtgccacctccaggggagaactgggtgagcccaaatacggcaggagtggaggtgacattcatgtttggacctgtcgaacagtggcgaagctctgagggagaagcgcctatcggggtgtgtgtgcacatcctggcccagagctaggggctgaagatggagatgttgggaccctagactggccctggaagagtagaggttggtgaaccacatgcccttaagatcctttccagaggctgagtgcgtggcttacgcctctaagcccgacgctttgggaggctgacacaggaggagcgcttaagcccaggagttctagaccagcctggacaagaaagag

SEQ ID NO: 15522 - DNA, 1263 bp, Homo sapiens
cagaattcttaccacagcaaaggcataagatgcttgatacggaaaatcagaaacttaactcttttgttgcagatagtcatcagtggctctgtaaaaacgcagaggaaaagagccagaaggtttctgtttaatgcatcttgccttatctttttttattactgtgtacaaagatttttttacacaaagaaacttaatgctgtattaataaattcagtgtgtagcttcaattgggatagttccaaaagtgaagattttgtgaggaataagtgcaaattttttttttattttaaaaaattctttgaaactcttaagtctttgtgtctgcaatgaaattgtactccttgacagttgatagattatatattcttccatccctcaaacttgcattccactatatttattttttggcaaaagatgagctgtatttgtttgaaatctgagacactatgttcaattggatgtatctgttcaaatttattcccacgtgacgtggaagtccttcgttggatgtcacaacactacatttaaggttggtaaggatgacttggaggtccatggttttcattaccaacattttaagattctgaatgtcgatggagtctcactgaagagtcaccaaaggtgcctgccctcctcccctgctgggaagtgtcagttggagactgtcccaagggtgctgaagaatccagtggcaggggttctggctgctttccatctgagtgtgggatgggaggggtgttcatgatcatttggatatagcaatctactctgagaaatggaacacaaggagttacctatcactttcacttataattccaaaagatgactacaaccatgtccatgctcagattcaaacagttttccatatcacttttgggtggtaagatgatttaattacagttttttttttaattggcagcaccactaaccattccttacattcttttttgtatgtgtggttttctttttatttaacccgcagccgacatcgtagtttcttgttttgttttgttttacagagctgttgcatgacttatgttaccatcctaaaaaacactatattaaacatggaataaattgtctttttatgaattaggctttttgaacatcctgtgttgggatttttttgtttttcaattggcaacaaaagctctgtagggctgcagacatttaaagttcacataatcatctgtaagacattatgtattttgtggaaatactagaatttttttcctgattttgccattatatggatttgctatt

SEQ ID NO: 15523 - DNA, 1165 bp, Homo sapiens
gtatcttgtcaactggatctggcgcttctactttgagggcttctttgacctcattgctgtggtggccggcgtagtccagaccatcctatactgtgacttcttctacttgtacattacaaaaggtatgttgggtgcgacctgcgttgtttctagagtgacgtgttcttttaggagtgcccttgcccagcactcttctaatctggcactctctcataaactggctccagagaaacactttcatgattggccaataacattctggatcaggatgttgtctttttaaatataagaaccctttttcttttgcaatagcttttcctaaagtgacacattttcactgtaaaagattcatctggtgtttcagtgaacattaacaccagatacctctctatgcatacacagacacatgacttaaactgtacattgctgttctatacactgcttttatcccctcacatttttcatgtcactagaaatctacataattttcagtagccacagagtgtttcattatgtgcatgtaccataatttatttacccagcccccattcatgggtggtcaggccgttactggtttgctgttaaaatccagtcattaaatcagcatccttgtgtatatgtgtttttgcatttgtatgaacataggacgtgtgaactttacaaatatttgatgaaagctatcatccttgttcagaaaaaaaaaaacatttatgccaggtgcagtggctcacgcctgtaatcgagcactttgggaggccgaggcgggcggatcatgaggtcaggagatcgagaccatcctggctaacacgtgaaaccccgtctctactaaaaatacaaaaaacttagccaggcgtggtggtgggcgcctgtagtcccagttactcgggaggctgaggcaggagaatggtgtgaacctgggaggcggagcttgcagtgagcccagatcgcgccactgcactccagcctgggtgacagtgcgagactctctctctcaaaaaaaaaaaaaaaaaagatatttacgcaaatgcacccaaatgcatgtatatagttttgaggggttcaggagcccctgaaacccaaccacagatcccaggctaaaaatccagctatacaataaaattcctaatggtggaattgctaggtaaaaagcatatataggtcgggt

SEQ ID NO: 15524 - DNA, 1249 bp, Homo sapiens
tcacactgaattcaaaggagtattgtagtaaaaagacaactgtaaatttgtcagtattgacaaaatgtcctctctgttttttggtttgttttttgagatagggtctcactccattacccaggctggagtgctgtgacgtgatcatagctcactgcagcgttgacctcctgtgctcaagtgatcctcccgcctagcctctgagtagctgggaccatgggtgcatgccgccaccacctcagatttgtcttgtagtcagattgcaagtgctcaatacccacatttggctggttgctcctgtactggacaccacagttccaaaagcttagtttggaactaagcagctgccattttcctctgatgacacatccagtggacagattatgaaaatctcagcaggtgtgcggtgtccttgtctcgtcaagcaccatcccagcacgtgcccccttgtttctgtgcaggtgtgtgtaactggtgtgtgcaccgtttcgaccatcactgtgtttgggtgaacaactgcatcggggcctggaacatcaggtacttcctcatctacgtcttgaccttgacggcctcggctgccaccgtcgccattgtgagcaccacttttctggtccacttggtggtgatgtcagatttataccaggagacttacatcgatgaccttggacacctccatgttatggacacggtctttcttattcaggtaattatgctgtaggtttctgacttcaagtttcagaatcgcaaaaaagacatttatttttccagtaaaagcatgaagttaggtggggtgtggtggctcacgcctataatcccagcacttttggaggccgaggtgggaggatcgcatgaggctaggagttcaggaccagcctgggcaacacccaaatgtccatcaactgatgattgaataactggtctcctgtagagaccttgtctctacaaaaaatacaaaaatgagccagggccgggtgcagtggctcatgcctgtaatcctagcactttgagaagctaagacaagcagattgcctgagctcaggagcttgagaccagcctgggcaacatggtgaaaccccatctctactaaaatacaaaaaaattagctgggtgtggtggcacatgcccattgttctagctacttgggaggctgaggcacaaaaattgcttgaacccgggagggagaggttgcagtgagctgagattgcaccactgcactccagcctgggtgacagagcaagaccctgtctca

SEQ ID NO: 15525 - DNA, 1107 bp, Homo sapiens
taccagagaaaaagaagtagacttccgtactcagagttaacagcaaagaaagaaaaacaacacgacaggaagccctggatccacaaaggatcctggtgggaagaataggaaattctgtgtgcaatactgacatactcatccataccccaccccaactgtgactgtcctactaattaatctggttttatggattttccataatgtgctgttttagcagcaaatagaggggtaaactcatagataatagctaaatactgttagaaattaactttccgttatagctaaatgttaccagaatttttactccggttatgtatacagctttgattttataacatcctgctaatttttgttcttacagaaatacactttcgggaaatggcctctaaatcctggctgaattttttaaccttcctctgtggatcagcaataggatttcttttatgttctcagctatttagtattttgttgggagaaaaggttgacacccagcctaatgttcttcataatgatcctcatgcaaggcattcagatgataatggacagaatcatctagaaggacaaatgaacttcaatgcagattctagccaacataaaggtatggtttactttattaagcagtaaacataagcagtattttagtctaaattttgtcatattcctgtctgtatctgttaattaaaatgggctatatattccagatattaaaaataattcttggtttgcctcaagagaagggaattgctaaaactcagatttatttagggaataagatattaattttgaattcgtttttaagtagaaatagttcagaacccatgatttggggaagggcataactattcagatttgatttgtttctgaaaatgtttttctaggttcagttttgttatatgtgtgtctttggtttttgttacttgttttggtcatagcttttgcttaagtcttgttttcctagagaaacttgaggtgtatgtaagtttcgatttatatttttataattagttaatagaactaatcttttttttcctcaagaggcacaaagaacaaggaagttaaaaaccaaggatgcgttctaaagacttcattttctcctagcctcctacc

SEQ ID NO: 15526 - DNA, 1464 bp, Homo sapiens
atgaactgccacttcagcagcatgtctttcctgctcttcagaaactcgttcagagcagtgagaaatttctgtcagtaatctattaaaaactggctgctttcttttatgaagtgccaagcagagactatttaaggcagcatttagcatgcctatgaagcaccaggagaacttattaaaatgctgattctgagtcagtaggtctgggcctaagattatgcatttctaacaggctcccaggtgatgctgctgcttttaatcagtaaactacagtttgagacgaatttagattataatgtcaactcttactagctccagtgatgtcctagataacactgacatgaaaccaataaatcagagtgtcagttcacattaggatgagtttgctttcctttggctaaatcactaatagagggataaatagggactttgaaattaggacagtgctttcttcagtataatttattaatatttggattttacatctatgtaaataaccttttaaaatgttttgtttaatagatgagaacacagacattgctgaaaacctctatcagaaagttagaattctttgctgggttatgaccggccctcaaaacctagagaaaaaggccaaacacgtcaaagctacttgggcccagcgttgtaacaaagtgttgtttatgagttcagaagaaaataaagacttccctgctgtgggactgaaaaccaaagaaggcagagatcaactatactggaaaacaattaaagcttttcagtatgttcatgaacattatttagaagatgctgattggtttttgaaagcagatgatgacacgtatgtcatactagacaatttgaggtggcttctttcaaaatacgaccctgaagaacccatttactttgggagaagatttaagccttatgtaaagcagggctacatgagtggaggagcaggatatgtactaagcaaagaagccttgaaaagatttgttgatgcatttaaaacagacaagtgtacacatagttcctccattgaagacttagcactggggagatgcatggaaattatgaatgtagaagcaggagattccagagataccattggaaaagaaacttttcatccctttgtgccagaacaccatttaattaaaggttatctacctagaacgttttggtactggaattacaactattatcctcctgtagaggtaagtttagaaattttattactatgtcaatacttggactgactgaattttgttgataaaaacatgttaatatgtgtatgtttctttagtaccaacaacaaggactcttccttagtctttttaaatagagtggcagtataacaaaatagatgagaacagggacatcagcaatcagcagtagtcacttagcaaatagctattgatgctgttatatgccaggcactgagaatgtagaagtaaatcacagccaatttccagttctcgtgaaccttacatt

SEQ ID NO: 15527 - DNA, 2815 bp, Homo sapiens
ttttagaacattgatagggagcaataaatagaagattgtattattattctgttaccttggagtgtaagtactgcatttaagtgaatgaaaaatttgctttgaccagatactgaaggaaataagtaatagctagtatttatccaatgccaactgtatgctaggtactgtgcttagataatctgtgtataatagtgttaatcctcaaaatttgggtgttatacccctattatagataaggaaactgaggctcagagacaaagtaactttgtcactgtcacaaagctagtaagtaacagaggtaggatttatattcaaaaccctgtgtgttcattggaaccgtatcaggcttggggctattcatgtagcattatttccatttttatgtatatgatatatgacgtctgatgcattggccagtaatagtcaaattaacccagccaaattgtcacagtgattcttaaactgtggttctcacacttgcccaggatgttgttaaatgcagatctgaagaccccaatctcagaaattcaaatttaagcatggggcccaagagtatgcattcttaccagataccttgggcagtgactgtcaaaagtctggtcccaacaaacagcattaacgtcacctgggaacttgttggaaatgcagcctctctcggggcctcatctcagatcagatctactaaatcagatactctaggggcaggggcaggggcaggggctagcagttgtgtttaagcaaactctgcaggtgtctttcttatcctagtttgagaaccaatacccaacaacctacgtgattttggtgcaagtagtgtttgaaacacactgaagattactgcccaattactaagacatttttcaaaaagcatgttttaaatcagtgtagtccaggatcacactatattaaatataaagataacttaaaggatcattggatcattcattttggccaaatttttagcttctccaaagtgactaacatcagggcctacaataaaatctgtaattctccaagtttagtaattttatattgaggcaggaagggctcattaagtactaataagtacataatttattaaaaacatacataagtgtcatcaaaaaggtccacaattgttagtaaaaaaaattaaattgaagtagtaaatgctgttttataacatacatttttctgctaattcattctgttttgtgtgacctaataaagcaaaagaaaaataaaaaagcaattctccaagtacttcatagagcacataaaaccagatttcatgatgatgatgtattcactatcttttagattaagatctttgttatttggtaaatgatttcagtatggttttaaaacataaggcttttgatgtcttatgttctctaataatggtatgcttgtattttctagtgggaagttcatagataaagcagatttttgtcccagtttgctttcaaatataaatttcagagggctttttcttactgtaatgaggtatgaaaataaatcattgatcagctcttaatattttttgaatacagaattggatttgagcagtaaatttgctaactggttattttcacaattttcttgaatattaatttttcacttctttgagactgtcaaactatagttactaccaggttgatgcactgtacttgaaagaatcccttgattaaattacatctagcattttatttgccatttcaattttcagttcattagactataattctttgacagtttctgcctggtgtttattgcccttctttgtttgctttattactaacttccattttctagttactcttaaatgctgccttcacaaggttaatttggctgttaatagtgattagaatttttatcacttaattgataattttaagcctactaactagggttccctatgaaattgaaagtaaaagtctaagaataatgcctgctggctctcgagatacttgccctacttaaaaatctataatttaaaattaattctatgtctacaattattaaaggaagtaaagttatttgggttcttccactcacccttttctcaaaaacaacaacaaaaaacaaaactcattttatttttctactttatagtaggcctgacagaaacatagtgaagcaatctgggaggcaacctgtggtagattttatgctaaatgttaatgtaacctctgttgattttttaaaaatgtgtttatatataagatttgaaataaaaactttaatacaggctagaataaggaattttacaaattctctttagagcaaccaacattaaagttttagagttgaattttgctctatttcaactcccttacctctctagttttcagtttatattaagttttaataactttgcggggccctgcaaattaataatctacatgaagtatattattagagggaaactaatcttactgctaagcagtgtgttgtactacatagtgaatgttcgtgttttggaatttaaaaattatttaaggtaatggtgttacgaatggtttaaaaatgtctggtgacttgcttatttttaagtgatcaccattaagtcagaaaaatgtatttttaaatgtttcttgaagtgccttttgaacatttttaaacagcggatttaaataatgcataaaataaattgccatgttcaaagttgtttcatctgattatttttaaccaatataaaagttgtgagataaatgttgtcttttatgggtagtttggggttatttttccaaaagtttaaaattgttttcccatcaaagctatttagtttgaattggctttcataagttttactgcaatatatgtattatttact

SEQ ID NO: 15528 - DNA, 1164 bp, Homo sapiens
aaggaagaaagcaagatcacttctactggatttcagacagtagggataccttgtgaataaaacagacaagacacctgcccttttggagcttatgcgctactgggagaagagataagactgaaaaataaattaataaatgggagcacatattaagtgctaaaggaaatagaggaaacaatgggtggtgagttagataataacaagtatgtctattttagattaggtggccaggcagtaactcagtttagtccatctgagcatttgctcttatttcagtagttctttgctaactcaaggagctactgtacttaaaaacatgcaaaatatgttgtatttgtggcatagttcatatttacactatcataaaattatggccgagaagttaaatattctaaatgtgtcaacatagttctctgtaaaactgacttactttccaaatatattttgaaataaaacaatataaaaatgttttctgtttttaggaatggtggaaagcagcagacataattggagtgggttggataagcaaagtgatattcaaaatttaaatgaagagagaatcttagctttacagctttgtgggtggataaagaaaggaacggatgtagacgtggggccatttttgaactcccttgtacaagaaggggaatgggaaagagctgctgctgtggcattgttcaacttggatattcgccgagcaatccaaatcctgaatgaaggggcatcttctgaaaaaggtattaggttataaactaagatattagttataatctaagatgttagcagttcatggaatcttttaaagaaaagaggctaataattttcaaatatctaatcacttaaaattttaatttaatttttgttggaggagaaaacacagcagtatatctataacagtaaatacttagctcatctcttatgccttggtttagggctgtaaaaacaaagatgtgtcttaaatgttagtataatattataaggagtgctcaagtgtgtccattttcaatgttttctcttaaagatagttcacataacattttttaaaatatattttcttaaagattagggctactttagcctacaagtatttttacgatccatatttgagtgttttagtttatactttctttgggatggttattgtttgacctttaagaaactctg

SEQ ID NO: 15529 - DNA, 1207 bp, Homo sapiens
tccctaaacttcagcttggcagtagtttataatttgatgcttttgatgctttttttctctgggttttagtttctatatttttccaaatgccattttgaaaagttgcattatagatagatataagtaaacaggtgggcacagtggtgcacacctgtagtcccagctactcaggaggctgaggcaggaggatcacttgagcccaaaagtgtgcgtacagcctgggaaatatagggagaccctgtctcttaaaaaataaataaataaataaatgtatgtctgtctaatttggatttttaactgttatttgacctatttttttagggaccatgcagagtgccctgtgtcggcatgcacgtgtaaatgtatgcagttggatacaacagggaatctggtacctgcagagactgtccagccataaaatgttaccaccttaagagaacccttcaagtgtggagctttctagtaggtgtccttcatagctcagaaacatacctcagaacaagccattcatgacttacctgtaatgggaaaataaatcattctatcagatcagcagttttgatgtttgagtgattttgatatgcttcacagagacaaatgctgccaaaataaacatcgaagtatagacatgagttctgttcagcaggttgaaaagtctgatttagaaaaactttctaagttttggttgaaattatgaacactctagaagcagaatttctggaagagccaagaacagactttgagcctatatcttcaaagctgaaactggatatctttcaataaaatatgtgcacttttaaaataaaatgactaattctgtgattcagacaatagttttaagttcagctgtgcttagatttctttcagattaatttaaaattacagatttttacttttagaattgcagagcccctatcccacactggagaatattttttattactgtctgttatatatgtgtctatgtgtgtgtgtatatttatgtgtgtatgtataaatatgtattttttaaaggagccttttccctcctttgattttaagataagcaatcttttggcataacattatcgtcttcctagaaaagccaagatgaagaatctatcttacaactttttctcttcagtagagaaaaacatgtaccatttcaggtgaacatacaaaattttcactttctaccttttgccttccaatgtcctgatttgtcttc

SEQ ID NO: 15530 - DNA, 1320 bp, Homo sapiens
tatgatttcactcttgaaaattcagtgctctgtgattcataacctttatgtctgtttgcaccttaacagctttaaaatatgttcgcctattttatctaacctgtttgatgttctttgccgtttcactgtttaaggtcctcagcaaggatcataaagcaaagaaaatagcattatgttcactactctatttttaagaaaaaggtacatttgtatacaaattgaacttaagttctacttcctttctcccatataataaatatacaaattaggctatgaaggttttaggaaaggactcgattccttcagatggtctctcaaaatataacacctcaaatttatcttagaagaactgtgaaaaagaattgtggcatttttcagtcactacagctccgaagtctgagcaagaagtgggtgtgaagtctcctctctggtttgtaggaagttgaattggtgttattcctgcatttttttcttccacagtgtttatgaatgaattcagaaaaaaagttgccagttagcttaatttcttcagatgcattgatgtggaaatttaaaacttgtcctaaacagcagtgctagtttgctgatacaaggatgctagacctgctctgcgtgctctttctggagtggcccatttcggttttctgaaacccatggcagccctttccatcgtgaataatcgttgtgttcccacctttgttctctgcctttttgctacttcagtgtgctctctgaccagctttccaaagaactttccctgcttctgcctcggttgccatttgctctccttaccacatatgttcccagtttatgaagagatccacatttcctttcaacccctctgcctcctgaagaaaaacatctcatgatgatacatattattgctgataacacccttatttagaaatttgttggccacaatagagatggaaatgttttactgctggaaaaactgaaatcaactcatttccaattagagtataggcagaacacctagatatgacttttagttcttgaatatccattacttactttaatgaaaacagaactgccattggtcaataaactgtaaagggaagaggtaaattgtgatagagaattttctatgtcatgggaaattgaaatcacatttattttgattaccagcaatatgatttgttaactctgtgccaagttttaagtatattttttcacaaagatagagtgccatagtgaaactaaacactgtgcataaaggtacatgaattattccagttttaaagtattatgcatgtttgtttaataaatgtggcatggttttaatacaaatgctatgttatt

SEQ ID NO: 15531 - DNA, 1112 bp, Homo sapiens
ctgagttcagtgagtttcacaaacacataaaaagcaagcttaaatactggcagagggtggcctgaaaaggaaattcagctttcttgctgaatattattattaatcaaaataagtataaggatcaaataattataattgcattaaactctttggggacttgagacttctgtcatttctataaactaagaatagctattattgaattcacttatgaatcacaattccttacacttatttgtcatcttacacatcacaaaatgctttcacctgttatgatttggtttgatgttcacagtgcaaatgtgcaggacaggtattattagccccgtttaatagatgagtgagttgaacttacgaatggtcaagagctctttccataggcaacattgcctctaagatcctcttagctgtccctttgtgatgaataatcacttctttgctcaaggaagaactaggccttcaaaggttgctgtcattttatataaatgttgactgaaggtgtgcacaacctgacctggaaatacaagaagtatgtcattgacatatctttatgatattcaagcaggttaccttttttctaccaataataattgaaataaattaaagagagtacagattaaacatatgttttcaattgatggtgggaatgtaaagaggctcttaatgaatttgttaacggctgtttccattttgctcaatgctcggttatcaatgccaatgagttttggactttgatcataataacatttacctgtttctttaaaagctgttttttttttcatactgaaggttaccctagttgcatagtgcacttttgccagcctgatgacgcttctgaatgcctccagaccagtgctccctaagaatctgtaaactattcttttcatgccagctgttgtgctccttttattcccccaatttgcatatggtgctttactgaacaagagagtttttctttcggtttcacccaatgcaggtgtgcagtcattctgtgagagcttttgtaattggctatgtaaattatctctcaggtccaagggccaaaaatatagtttttcataaagacaataaaaaaccacaatatttatattttattttttttcagtcttctg

SEQ ID NO: 15532 - DNA, 1192 bp, Homo sapiens
gagaagtaggataagagcctcgaggttgtcagcaatgcatcctgtaccaccaactgcttaatgcctctggccaaggtcatccatgataactttggtatcgtggaaggactcatgaccacagtccttgccgtcactgccatccagaagactgtagatggcccctctgggaaactgtggtatgatggctgtgggctaatcagaacatcatccctgcatctactggagctaccaaaggtgtaggcaaggtcatccctgagctgaatgggaagctcactggcatggccttccatgttcccactgccaacgtgtcggtcgtggacctgacttgccatctggagaaacctgccaaatatgatgacatcaagtaggtgatgaagcaggcatcagagggctccctcaagggcatcctgggctacactgagcaccaagtcatctcccccgactttaacagcgacactcactcttccaccttcgattctagggctggcattgccctcaacgaccactttgtcaagctcatttcctgatatgacaatgaatttggctacagcaacagggtggtgaacctcatgacccacatggcctccaagaagtaagaccccccagaccaccaaccccaacgagagtgcaagaggaagagagaggccttcagctgccggggagctccctgctgcactcagtcccccaccacaatgagaatctcccttcctcacaatttccatgcagaccccctgaagagggaggggcctaaggagccccaccttgtcggttaccatcaataaagtcccctgagctcacctaaaaaaaaaaaaaaaacaaaagaaaataaaattatagccaatttcatttaaaataaagaaacaaaaattaaaaataacacactgtcataaattaatgtaagactatactaaaatcacatttcattatacattggggttacttttaaagtgtgaagcttgtttaatgattaaatatcttaaattagtttattatgtgaaaatattttgttgataacaataaggataattatctaataatataaaaattctaaaattttcaacaatttctaagtataattttttagaaactagaaagaatgaatagcttcttaaaatgctgttttaaattgtctattagaattcagtggacaacatttgtcataataataacctagaaggattcatgttaattt

SEQ ID NO: 15533 - DNA, 2688 bp, Homo sapiens
ctctgcatgaacgtgacactgactgcataatttgtttacaagaaattatgtccaacaaggtgatctaagaaattcaaccacttgataaagtttgcttcctcatttgaagaattcatctttatatcttgctgcagtatctggcaactttccactctcctcccttcatgatagtaattatgaaaagttattttcatcccaagtagtctacatggtaaaaggaaatttttgttagtagcatagacttggtgcttttttaaaagaacaaaagttttaaatgaaagacaatttaagactactcaagtcattataaaagtcaattatcaaagttaaaacattatcacatatatattaagaaatcctagctcattgaactcgcctgcagctctcgggttcctgtggctttcttctttatcggagccagggctacatgccagcaaccatgtccaagggacctgcagttggtattgatcttagcaccacctactcttacgtgggtgttttccagcacggaaaagtagagataattgccaatgatcagggaaactgaaccactccaagctatgtcgcctttatggacactaaacagttgattggtgatgccgcaaagcatcaagttgcaatgaaccccaccaacacagtttttgatgccaaacgtctgattggacgcagatttgatgatgctgttgtccagtctgatatgaagcattggcccttcatggtagtgaatgatgctgacaggccccaggtccaagtagaatacaagggagagaccaaaagcttctatccagaggaggtatcctctattgttctgacaaagatgaaggaaattgcagaagcctaccttgggaagactgttaccagtgctgtggtcacagtgccagcttactttaatgactctcagtttcaggttaccaaagatgctggaactattgctggtctcaatgtacttagaattattaatgagccaactgttgctgctattgtttacaaaagttcagacaaaaaggttggagcacaaagaaacgtgcttatctttgacctggggggtggcactttcggtgtgtcaatcctcactattgaggatggaatctttgaggtcaagtctacagccagagacaaccacttgggtggagaagattttgacaaccgaatggtcaaccattttattgctgagctcaagcgcaagcataagaaggacatcagtgagagcaagagagctgtaagatgcctccgtactgcttgtgaacatgctaagcgtactctctcttccagcacccaagtcagtattgagatcgattctctctatgtaggaattgacttctatacctccattacctgtgcccagtttgaagaattgaatgctgacctgttctgtggcaccctggacccagtagagaaagcccttcgagatgccaaaccagacaagtcacaaattcatgatattgtcctggttggtggttctattagtatccccaagattcagaagcttctccaagacttcttcaatggaaaagaactgaataagagcatcagccatgatgaagctgttgcttatggctgtccaggcagccatcctgtctggagacaagtctgaaaatgttcaagatttgctgctcttggacgtcactcctctttcccttggtattgaaactgctagtggagtcatgaccatcctcatcaactgtaataccaccattcctaccaagcagacacagaccttcattacctattctgacaaccagcctggtgtgcttattcaggtttatgaaggtgagcgtgccatgtccaaggataacaacctgcttggcaagtttgaattcacgggcatacctcctgaaccccaaggtgttcctcagattgaagtcacttttgacattgatgccaatggtatcctcagtgtctctgctgtggacaaaagtacaggaaaagagaataaaattactatcactaataataagggccatttgagcaaggaagacattgaacgtatggtccaggaagctgagaattaaaaagctgaagatgagaagcagagggacaaggcgtcatccaagaattcacttgagtcctatgcattcaacatgaaagcaactgtcgaagatgagaaacttcaagacaagattaatgatgaggacaaacagaagattctggacaggtgtaatgaaattatcaactggcacaataagaatcggactgccaagaaggaagaatttgaacatcagcagaaagagctggaggaactttgcaacccaatcatcaccaagctgtaccagagtgcagaaggcatgccaggaagaatgcctgggggattccctgttggtggagctcctccttctggtggtgcttccttagggcccaccatcgaagaggttgattaagccaacccaagtatagatgtagcattgttccacacatttaaaacatttgaaggacctaaatttgtagcaaattctgtggcagttttaaaaagttaagctgctatagtaagttactgggcattctcaatacttgaatatggaacatatgcacaggggaaggaaataacattgcactttataaacactgtattgtaagtggaaaatgcaatgtcttaaataaaactatttaaaattggcaccataaaaaaagaaaccttaaaaatgatttcattcgattatcaataactttgattataccaaagttatcaaa

SEQ ID NO: 15534 - DNA, 1292 bp, Homo sapiens
ttagtgagagagagaaaatatcttagaagttatgtaaaccacaaaacaaagcagtaccttatattactagcctctttttgttgcaggatctctccctctaaattacagcagttcattcagcaagtagggaaggtaattcttgttaatcctctattctgttggcgattcttccacgtacttagtagagttaaggcaaaaacttaccgaattggaagtatgtatcagaaggaattcttaattattcactttgaaataaaagaattttccttataggttccaagtagtagactgtactataatactgctcttctgaaataaattgaatatttttaccttgccaaaactatcattgaaggctggaattttaggtacagtatttttctgtgaatgattttatgttgttaaatattcttttaaaaattcatatctgtaattgttactgtagaaaaccaaatacaaagaattctaaaacctttgtaccgtctctgtgtatttgagattacttaaaatatctttttttctgttccaagttctactcagtgaatgtggattacagcaagctgaagaaggaacgtccagatttctaaatgaaatgtttcactataacgctgctttagaatgaaggtcttccagaagccacatccgcacaattttccacttaaccaggaaatatttctcctctaaatgcatgaaatcatgttggagatctctattgtaatctctattggagattacaatgattaaatcaataaataactgaaacttgatatgtgtcacttttttatgctgaaagtatgctctgaactttagagtataggaaattaactattagaatttaaagaatttcttgaatttctgtagtttgaaaatacgactttaagctgctttagtaaaacacttccattttgtgtatagactgttggtaacttcactagagcatacataacaactggaactggaaattatacaaaagtaaattgggaaggatactccagcatctgacactggcaaaatggaaacctttgagtttctcttactggctgttgaagtgtgtgcagtttttaacaatggtttttacttggcatctctttgttgtgattttcaaggttataagttgctttggtcctaggattgaagttgaaatctgagtttatcagtgctaaccatggtgctagtagtcaagagatcttgagaattttggctgctgagtcttggtgcagggtgcaggttttcttttcttttttcttttttttttttttgagatagtctctgtcacccaggctggagtgcag

SEQ ID NO: 15535 - DNA, 1159 bp, Homo sapiens
tttcatccacttcttaacctctcacacatggttatactctggatttaaatgtaaataagagtgataatctgcctgtttaacacagggaattatttttctcttgacaagagaaattgacagtgctctctatttagaggccatgaaagtaatttgatctaaacactgtgtactaagattattatgttttatgtcagaaaacaataaagttactaagctctgttagcatattctaaatgtttgaaatttagaagcaatggtgagaagacagactttttattgacaagaacttaattagcactttcttattgcttatcaaaacaaatgtgttaaatgcttctcccttacgaaataaagaaaggtgaaaagatggcctaggttgattttattttttgttttgtctttgtttctttgtttcgttttggtactttatttttttttaatcagacataatgctaatcagaaatcttagctgatgctgcacattggcttttcccaacggtccagaggctgctaattttagcggaaatgaagacattgatcaaagctctggtgagatgggggagtgagtgtgtgaacaaaaagagagctaatttaaaagaggcatcagactttcaaaggacagtgtcacaaaagttcttacagttcttacagggactttgtaagggaatccattcttatttctttaaaaaattgtcttctggtaaagccctgttaaattaactgaggacacagaaattaaacatttcaaaaagaataaacatattgataaaacaaatatattagtgttgttgtatgtttttaaatacttacttccaaatgatttaatctattttggtcattaaaatatgtcttaatttctcaaagaaaggcatgaagtcttaaattttatgagttttttatgctatcaatgagaaagataaagtaaaaattacagtagaaaaagacaaagtccttcaacaaagttaagaaagtttataataattggctaatttttttgaggtagttcatgtagagtgtgttgggagctatcctgaaggttaagtttattaaaatttagggtaaagtagtaagtagttccaagttcaggagatacacctgaataattctgaccacagtataaattttgcaatatgtcgaaaatgaaatcccaagcataagc

SEQ ID NO: 15536 - DNA, 1178 bp, Homo sapiens
tgccttctcatcctttacgctgctggtgtgcaagctgttaagcacagagtgtttaattaatggatagataccattagagagacagctggacctgcatccagatgagtttggattcaaggtgccaggagataaagatctgaaagtgggaaagctgaactgcaattgggttcatttataaaagaggctgttaaaggtcaactgtgttttcttgtgctagagataaagagatgctattaaaaacaattggaaagtaattcataagggagcactaagtcactcatgttaaattaatttgtctttctgatagcatggcattcatgatgggaaagtaaatttaccccaaatcaagatctttcaaaaacagccattgatcatgtactccctgcaaagccactggaataaacccctgtgtgccgggaccactggtgctgtgtgatcacagcatctccatagttcactgaagccccttcccaggctgagaattaaccaattattctgaaggacagcaagtgcagtgacatttctgtggatatgctgagatgcctgagcctgctgatgtctttctgtcgcctctgatgaactagtggccaagcaccagaacaacccatcgtgcacaattccacttttctgaaattcagcaatgtattagaacattctagcccactgagctccacttacaaccctcccacctctctgccagtactacaacacaccccatgttcaaacatacacttaccatgatgaaaactttttaatttatccaaacaatatatttacaattatgaatggcagtttaactccacatagtgacatcaaacactttctttgatcatctcctcttcaaggtaaagcttttcattcaaacactatcaactgttctccccagtttcctgatggcagcacatgttatgacaaagggtgattgcttttagtgctcagaaatgccagcctattaagacacatcttcatctttctctgggcaagatagagattgtgtctatttgctgccatgcatggggatgagaggggaaaaatccactccatcagattgtgattcctgtagacataaccctgggtatgaccaggttctctctctctctctttgttgccagaggaaaactgcttgttgcttctttttctttcttgagattgaaaactaattggggtctttctttatt

SEQ ID NO: 15537 - DNA, 1329 bp, Homo sapiens
aatataacacacttcagattgtctgatttacagtttggaaaggacaccgcaatgttcaaataggtaggagaccatcaaaaacacaattaaagtaacatattaggagacttgaaacttcagcctaataaatccttcatggttcttagccttattattgtgatataattctagatattttcttggagggcatgtgcccaactctcccgcaccccattttgtttgtcttttaaagttcttagaataaacagttctttatataataattatattttatttaagaaaatagtttgttaggtactttttaaaagatgtaaatttttaaatttacaaatacatatgggtctttgataagcaataggaattgaattacaagttactagggttataagcaaaaggttgcttaccataatgtcattaggtcacgatttttagctcacatctggaagcagcaactacttggctcaagtacatataagagtaattagttttattctctcttttttataaaatcgggtttcagatgagatgtttatcttagactattttagggaaaaattttacatgtttgagatggtggagtaaaaagactgttaaacatttcttttaaaaaattatttttacattacaacaatatatttatgatgtgttcagatcaaaaatttaacttctgtgtcccagatctactttcaaagtgagattttcacttgtcagcttaaatttctgactagaactaacatttgtgtatttttgtgcttagtcggaatacaaatttcacagtggatttttgaagtttgtccttaaattggataaaatcaagtgattaaagttactaaagagataaaaatggtaatttccatttttaaaagtaatttggttgtgtttatagttatttgtacaagtatttatcacagactctaaattgaaaaatgtagtatgatctatatttgaccctaaaaatgttggattaatttaacaaatatggcagatttttcataactaagtcttaagtcttctaaaaggaagctgttacccttctgtttttaattacattaattgaaatgtgttttaagagatacaatttcagcatattttatatattaaaaaacaaaaaaggattagtattgagccagtggccaaaaggtaatattactaccatgtagactgttatagttcaaattgtcccacttcacccagaattttagaaactagaagtctgggaggtactatatcagctgtagttgggtaattccaagtgctgatagtactattcatcttttttattattgtgtcagatgaaacaaatgccaagttgcaaaatatgcagatttt

SEQ ID NO: 15538 - DNA, 1165 bp, Homo sapiens
tagttatataatatttaaggacaaactatatgttttgctgttttaacgtagtgactcactgaactaaatacataattgaccaacattaagtgtatttccaatacagaagggttgaaaatattacattataaactcttttgaaaaatgtatctaaaattttttaagttctgttttgattccactttttggttgagtttttatgtttttgttttcaggtagattaataaatctggcagctgatttctgcaagattcttgtgttttgaatttctcattgaattggctactcaaacatagaaatcatttgttaatgatgtaatgtcttctctcagcttttatcttcactgctgtttgctgtctcttgatgatgacatgttaatacccaatagattaattgcaacaaacacttatactcaaataactaagtaaaaataatttttcttgttatgtccatgaaaagtgcttcagaataaaaatccacaagactgacagtgcagaacatttttctcaaatcatgggcggatcttggaggtctagtttcccgtagatgctgtaaccaattaccacaacttcagtaatttacacaaatttatcttatagttctggaggcagaagttcaaaagaagccttaagagactaaaaccaagatgtccttaggtctggttccttctggaggctccaggggagattcttccagctttcacttctagagtctgctgacattccttggctcctggctacatcacttcaatctctgcttccatggtcacatactcttctactatagtcaaatttccttcctgcctcttataaggatgcttgtgattacatttaggggatgctcagataatccaggacaatctctccatctcaagatccttaacttaatgacgtgtgccaagtccctttggctagataattattcataggtcccagggattaggacatggatgtaaggggtgagggcagggctgttattcagaacaccgcacggaggaggaagactgtgtagcaaagactctaattgatttactcaggaacagtggagttctgctgagggatctaggatttgaaagtactagagtttgcttttatttaccactgagatattttccccttattctgcataaataattttgaaaactttctatattaaatttcaacta

SEQ ID NO: 15539 - DNA, 1451 bp, Homo sapiens
tgtcatggtcctttggaatcttcatttaaatgttaaatctggaatcaaaatgaagcaaaaaatatctgtctccttttcactttcttcagtacataaatacattatttaatcaataagaattaactgtactaaatcatgtattatgctgttctagttacagcaaacactctttaagaaaaatatccaatacactaaataggtactatagtaatttttagacatggtacccattgatatgcatttaaaccttttactgctgtgttatgttgataacatatataaatattagataatgctaatgcttctgctgctgtcttttctgtaatattctctttcatgctgaatttactatgaccatttataagcagtgcagttaactacagatagcatttcaggacaaaatagatgactcaaaccatttattgcttaaaaaatagcttacgccatgctatgctataagcagcttttatgcacattgacaaatgaagagtaagcttcagcttgctaaaggaaactgtggaaccttttgtaacttttggtgatatggaaaattatttacaaaccgtcaaagaatatgaggaagttgctgtatgacatagtgctggcactgatattatccatcatctctttttggacacttctgtaaatgtgattggattgtttgaaagaagatttaaagtttcaaagttttttgttctgtttttgctttgcatttggagaaaatattgaaagcagggtatgttgtttcattcaccttgaaaaaaccatgagtaaatggggatatagaatctctgaatagctcgctaaaagattcaagcaagggacatgaattttgttccatctatcaataatatccagaagaacaacttttttaaagagtctatagcaaaaagcaaaaaaaaaaaaaaattctaaacacaaagtcaaaataaacctattgtaaaagcatttcgtgatgagcatgaaaaagattgtttaaagatgatccccccagctacccattttccaaaactacacagatcacagctcatttctctaagtggagcagttatcaagaaacccaaacaccaaaattgctactcttcacatttaatcctacaaaaagtactccaatttcaaaatatgtatgtaacctgcgatttcaatgattgttgttcatatacatcatgtattattttggcccattttgggcctaaaaaagaaaactatgccttaaaaatcagaaccttttctccccactatgcttatgtggccatctacagcacttagaataaaaacagatgttaaaatattcagtgaaagttttattggaaaaaggaattgagatatataattgagatttggtgaaattgaaggagaaaatttaagtgagtctttaaaatatattctgaatgaaaactgtattgaggattcatttttgttccttttttttctttttctcttttctcctt

SEQ ID NO: 15540 - DNA, 6744 bp, Homo sapiens
agtgttgcctagagcagtgggtaatagcattaacaataaaagcaaagaagtctgattagatacgatggtttttaaagaaatcaatttaaaaaaaaagatagttccacaatatttttgtaagtaaatgatgtgtgtcattcatattgacacaggatttattctgcacctgtgttatatatagttatctgtaagttcgtacagcttgctcatttatattcaaccatttaactattttaaattcctctttaatggtaataatatatttcataaatgcccataaagtggttgattgtggtttaaccatattagtgattgatttaatgtacattttatgtaagatagcatagtattgctaataatagaaacttaaaaatgttttaatttaggagacatcaaacaagagccaggaatgtatcgggaaggacccacataccaacggcgaggatcacttcagctctggcagtttttggtagctcttctggatgacccttcaaattctcattttattgcctggactggtcgaggcatggaatttaaactgattgagcctgaagaggttagtttaatagattttaattaggacactcagacatgttataacataaagaaactgacacatttgattaatataccaaaaatgtattcttaatcatttcaagactttagggaaactttctgaattaaaaagcatgcaaagataaaacatgtctacctttaaaatcaccaatgtattgcgtgttccttccggttgtatacaatcctacaaaattgatgttggagaaaattaaccagagcatgctttgcacctttatttaagaatgtctggcttcagggtttctaaaggagcatctgaattagagaaaagaggcaggagggaggttttatggtccttaggagagaggaacgatgtctgcaaaagtcaactggttgggggatgggtgaattattctttcaaattagcaatcattatttggacaacttggattttgtcatgagggttggagaggagcatttagaggccaaagttatgttcaaaagaagattggggaaaaacagctgtggcggataaagggatgcaagggcaacagtggaaaattctcagcccttaagtgtctcttacaagacacaggcctggtagaaacattttcctttgtccgtgacacttgttccaagtcagctggactggcatactccattggaaggttgggatgaagtttaaaatgttgccatagcacataaaaaattactaaaataagaagagcctggacagagataatactgtacagagaaatggaggacaccttcaactaacttcaattgtcccctccttcccactccccacatacaaatggagtatttccatgaagaatttctcagttcagtttttattcttcccagaactagctttaggcttaaggctactattgttcctgtagcataactcatcaatagcattttggactgctgatggaaaggtgaagttaatatcaaattgttgtgtcttcattactaaagatactttctctgctactattaaaattgactttagtttatatcagccaaaaaagcaatggaagatttttagctaccatacctctaactgattatattaggtattgaatctaaacacctcagtaatattgaaaaattcagtaagtttaaaaaatgtttgaacccaaagtgattttcatatacactgaacatccacacccttgactactgggtccatcatcttgaattttctgtctttattaaaccacgtattcaactataatcagataatatgccctaatttgatgcccagaagataagtttacataacttcttgaaatttaagagattatctgactcgagaatgtactgaaagtatgaaataaaaggcactggttagaacagtcaagtctccttcagtttatatcaatactttagtaacactagagggttagttttgcagtatctcccttgccccacatcaagcacgcacacacagaagactcaatgtcagtatttgaaaattctcattatctaggatgacgtttgggtgtttgaatgctgtagtgtgtttaaaattaacttagctgtcaaagaagattagttttttcatagatactctcacatgatgtaagtgaaagaaccacaaaaatgttaagcactaacaaattgagactagaagcatttaacaaagtaatttgaaagccctttcgcatgatgggagtgtgtgctcttcacctcatggaagatgttaataatcactgcaagagttggttcatgctggaactgagcactttctacagggatttgtatcagttaaacagttatttcccttcacctgtgattaaaatgaactgagcagaggtttttgttgttgttcctgccatatatttgttaagatagggaacattactgaattatgccagtatttcttgatccactcagaagaagaaaaattcttttgcaaatgattaagctttttatatagcaactgttgacttttatgatgttcagatttgagtaagtaggagatttgactagatgaccattaagtttcatcaaattctgagttactgtgatttttaaatggagggaagaagtagaattacatctgttccatacaacagactgacatttagacaactcttctgtagcagcctcataaagttaaaaagaggctggataattcagagtcagtagagcgtttccaaataataaccaactcaatgggaattgtgcaataagcactgaatgtctcctaaggcttttgttcaaaatgaaacatcccatatctgattgctgcattgctgactgttgcaattacttccatcaggcaatgactgtagggtcttgtttaaatttcttctttggaaagggtttgtgaaatttcttgtctttgtgacctgtggtcaccctgttccctctactgcctagcagctcattgggtgcctgtgtcagcacagtccgtgaaagatgtctctgaagccatcttattggaattactgatgggttccatttctttatatttcatcttgcattttaaaatgatattgagtgagactccagacctgcacagattatctgctcagtgtgtttagggtaactttagaaaacgcataatctttaacatgtctttttcttagatatttgagataatgaaatactatttttgaattagtcatgtctcctagggaattgttccaggaaacaatttttttttttttttttttttgagatggaatctcactctgtcacccaggctggagtgcagtggtgcgaccttggctcactgcaatctctgcctcccgggttcaagtgattctcctgcctcagcctccccagtagctgggacttcaggtgtgcacccccacacccagctaatttttgtatttttagtagggacggggtttcactatgttggccagggtggtcttgaactcctgacctcaggtgatctgcccacctcagcctcccagagtgctaggattacaggtgtgagccactgtgcccggccgggaaacaattattaacatagaaagtcgtctgtaagactcagtataaaagtcttttgatgaaattgaagcttgttgagctggaagagttaccaggaagtctgatagccaggccctgattgttgttatcaggttcagtgttacatattcaagcgtgatattttaaaataagttgattaatgcttgaactattacattatcttatttaatttatttgacaataagggtgaatgccatagtgctatcatctttttactctcttcactaacaactcaagttttcatttgaaggcgtatataaggaagtcactggaagttttcccaccatttttcccactccatattggaaactatgccttgactttgagtggtgttggatatggtggcgattggtcggtcgtatgtgaaggctgaatgaactttcttagttggtggttggcctacctggcctggaattatttacgctgttaatttataacttttgtcttgtctgcatctcttaagcatattgctctctcccatttacctcaactttatgaggaatatgacactaaaacaactctaagactacattttattgtttttaaatgtccactaatacccatgatgctgagaatgaactggcatgataagtatcaaactctgtggtatttttaaaaatcatatttctctctccagagacctccacaacattgtattaaagttgttgtgagtatgtgagtattttattttctaggtgcatcctggtgagtttctagaaaataatcctttataaatgaataaggattcagaaattattgtttaaggagatactaatactttattttcacatcccctccaggtttgcatatagttcggctgctatgcctattaaaggttcactgatgtccatagttaggtttttgaatgaaatattctttagaaaatgctttcatttcttattgcctccccccagcgcccccacccccgcttcaattcactattgctcagaagatttacattaaaatgaagtttatctttgggaaattgagatgttcctgccactgtgattgtctgctgggatatatgatgttgtccctgttacatcgcatctctctactcttaaaaaacatactgatgcatgtcattaaagtactttatttcttcattcagagaataaaaattactgagagggaaaatagctaggatcggtatttctaaaggaaaaaaaaaacctggagaaaggttattactaataaagcaaagagagacagaatgatctctttgaaaagcaatctattttagtatatatgacatagcaacaacttggaattttatggaaatgaaggcgctccctagccctattagataatgtcctcttggggttgcctaggtttgcgtggcagctgcagtttcttctcagactaataaaaagtggaaattaatgagagagtgactttagctggggtaggaaaagcaagctacactattctgtatactgctttggctagcctggggtggtgatgaggtagggatatatatacattgaggagagaggattttttttaaagctctattgaaaaactcttagatacattgctcctccaaagccacataataaaaagctctgagtttttttattaaacaacagagtagacattctgctttagagatttttgtttgtggactcatatacatggtgaccttttccacttccttcttatttttagcatccaattaccgttctctaaatgaatgcttaattcttcagtttggtattacccacagttttattcggctgctgctttaggcaataaaaagtatttgcagttcggtttattaatttgtgtactgtttcctctgctacacacattgtcacttgttcactctttcatatagtattgagcagggtatcttttttcctttggcttatcataacctcagtaaaacacctttacaaggagatcactaagctgctctttatctatagtttttgtctgaaaaaccaagaaggataaaacagacagtatatctcagaatgaaaaacgtgcctcattttggtgaactgtagcctgttcattcctgttgtaagaacatttccttatttccatttaattttgtattcaaaacaatagtgacaaataattctattgtggtgttttagaaggatcactgcacgcctggtttaaaatgcaaaccaggccaggcgcagtggcttactcctgtaatcccaacacttttggaggccaaggtgggtggaccacctgaggtcaggagttcgagaccagcctggccaacatggtgaaaccccacctctactaaaaatacaaaaattagccgggcgtggtggggcccacctgtaatcccacctactcagaaggctgaggcaggagaattgcttgaacacaggaggcggaggttgcagtgagccaagttcgcgccactgcactcccagcctgggtgacagagcaagactctgtttcaaaaaaaaaaaaaaaagcaaaccaggagacaggaaatccagattacgatagctcttgctactttacttatatccttgagttggacatttttgtgggtttggaagtaattaattaaataatttttatgaaatatgctgataagttaatacttaacactacaatgtaattctgtttcgcggcaggtggcccgacgttggggcattcagaaaaacaggccagctatgaactatgataaacttagccgttcactccgctattactatgagaaaggaattatgcaaaaggtgagcagctaatacagcattaaaattcattgaaatgttgcacattaatctgaacatcatactttaaacgccacatatcattgcattgctgaagcgagtttttcactcattttaacaaatgcttagctcttggttttggtattacaagcctttctatgtataaatgcctagacattgtagacaaatgtgtagtgatattgtatacagaataataggctttctggaaggtcctactttgctgcacatggttaaaaaagattgttttagtattaatagcacatctgtcttcagaagtttttattgcacattgtctacaattatataattttggaatgcttttgtttatagcaataaagaatctttagaataaatttgtacttttttcttgttttgattcttaaaacagacatttctttttctcatttgtgaaaacattttcttccttgcctcaaatcttgcctagttttatcatctgatagtttgacatcctaaacca

SEQ ID NO: 15541 - DNA, 1668 bp, Homo sapiens
gaagagcaaccagaggctgaagtaggtatctctcaaaaggattccaatcctgaagattccggggaaggaaagaaagaatctcttgaaagcgaagctgagttggaaggcttacaggatgctcctgcagggccacaggtgtctgaggagtaaaagccagagcaagtgccagtgtggatgatcctcaccctgcaagaagctggaaaactcctaggaatgcattgtcctcaccttgttatacctgcgtggcaccatggcaggattccacatttcatagaatacaggttttcaagcaaacccctgttgaccatgccctaatttcctattgatttctgttctataattgaatggatattcctatggaaaattttttgtttcaaaatacaggaaaaacattcctattacctttctgaggctggctttccagcaattgtttcaaaggaaaatagatccccttaaagaaaaaatacaggctttagggaacaaagggacaagcagaacaggtgtggaagagagattttcaggaagggaaaaatttatagctacagagggtagttagaaaaatcataacttatatgtgaataaaatacatataagcagcatttacggtagtggcattctacttattaagatgcaatgaaatgaagaaaggctttatgttcaaggacctttgccatagttcagctaattgtagttttatatagaaatgatcctgaacactctgaacttgacgtagtcctgcggtgatattctatctgcagtatttgtacctccagaatggcagatccctcagcaggaacaaaggcatattgacggttctctcagcgtatgcattaaaaaaggtacttcctgaaacttttgattcaataatgactaaacatactatgtacacaattactgtaaggctaattcacgtgccatactccacctgaaagcctgagttatcttgctataagcttttcatggagcacttcctttccagaaactgatttgtaactcatttagagaatgtcctggcgtcggtttttagcatatgtggtatttaaacagagctagaatgtgatgtctgaagataatgctgcatttctgggtttcttgtgtggattttaaaataaattgtgcctacaaatataaacaactcatcttgttttataatttgctggggagtggcaaatattagagaagtattagagaacttaaaaaataatagggaacttgacaaatattggagaacagcaaagtaataattattttaatatgtacaattgcagaacaaaatgactagaattctcacctcactttgctgatcaaattctatcttgtggattttgtttgtttgttggtttgtttttgttttgaaatggagtttggctcttgtcgcccacacgggagtgaaatggcactatctcaagctcactgtgacctccgcctctcaggttcaagtgactctcctgcctcagcctcctgagtagctgggattacaggtgcccgccaacacgcccagttaatttttgtacttttttttgtttgttttgagacagagtctcactctgttgtccagactggagtgcggtggtgcaatctcggctcactgcaagctctgcctccccagttcacgccagctaattttttgcatttttagtagagacggggtttcatcatgtgagccag

SEQ ID NO: 15542 - DNA, 1182 bp, Homo sapiens
aatggcactgtctctgctcaccgcaacctccacctcctgggttcaagtgattctcctgcctcagcctcccagtagctgggattacaggcacccaccaccatgcccagctaattttttatatttttaatagagacggagtttcattgttttggcgaggctggtctcgaattcctgacctctggtgatccacctgccttggcctcccaaagtgctgggattacaggcgtgagccaccgcgcccggcctacagtaacttattttaaaagagacatcccttcttattcccctatgccatctttatttgtttgtttatatttgtatattctcgtacattctttggcgatgctctgtggatttttttttcctatcttagataaaatagaattaaagttttgattgttatactctcagtatttatttatttatttgactgttattttgaattgttttattttagatgaaaaagagaaattcgaacccacagtcttcagggatacacttgtccaggggcttaatgaggctggtgatgaccttgaagctgtagccaaatttctggactctacaggctcaagattagattatcgtcgctatgcagacacactcttcgatatcctggtggctggcagtatgcttggtaaaccatgcattatcgcttcttgtagtatatttatatatttttaattctgttgaagtatttccttataagatagagtctttataagtttatgtttattagagttaataaaaatacaaatggaagcctataattttacctggtttaggatttggaatggtattaatgcagatgtgaaatgattattggttaatagaagcatagaatggaggactttggttgacgttacaacaaagttggccactttgcttctcctaaaagccgcctttctcatatgtccctaatctttcagtgtttttggtggggccataaaaggggtaatttctgcaaaatactataacttagtgtataaatttccaaggtttaattaatgccatttcatccataaataaagcatataagaaatatagtttaaacctggtttttgaaaaatcatttaaattttaagtaagtagaaaaattaaagatagaagattagaaattgttaaagataggtgaaaacaaaataaaagctataccttatagaacagaggcatcaggaaagtagg

SEQ ID NO: 15543 - DNA, 1181 bp, Homo sapiens
aggaacttatttcttaacagttatggaggctaagtcccatgtcaaggggctgcatctggtgagggccttcttgctggtggggactctgcagtgtcccaggaaggctcagagtatcacatggcgagggggctgagtgtgctagctcaggtctcccctcctcttttttaaagccaccaggtcccctcccaacataacccactaatccatgaatggattaatccattcatgagggcagagcccttataatccagtaactctttaaaagcctcatctctcagtattgccacagtagggtccaagtttatctcaattgcttaccctttttttctttttctttgtgaaactgcctgatttcagaagatgtttagctcagtaaatataccagagatttgttgttttgtaaaacagtctttattcttttcttccaaatgtgagatattctaagtgaaatgaagacttttgtcctttatgcttgctgaaatttgaatggcttgttttatagcagtcttttttccctttttcaggaactctttccagttaacagacagagtgtggatcattttgctaaatacttcactgacgcaggtcttaaggagctttccgacttcctccgagtccagcagtccctgggcaccaggaaggaactgcagaaggagctccaggagcgtctttctcaggaatgcccgatcaaggaggtgggagaccacgggcagacatcacctcaatacacatgaatgagaggaattacatgggctgtgtagcaaaggctttccttaacaagtctgtcctatgcttattgctgtaaactttgtccacttattcctaccatttaaattaactcagcttcaaagtattgatttagaatcctccatttttgttaacactctaggatggtccagaaattaatagtgatttccacacaactgacttattttaccaggctgctatgattttcaaaatatttcatctgtcaaagagatttgaccatccactatcagtatagcccattatatggtagttttaaaattttgttgcaggttatctaacctgattaagcatttgtctagtgtttggaattaacactggattttttgttcatcactctgtatgaatatgtaacaggctttttatttgaaaaaagtttgaattcctgtcatgggaaaagactagttggatcagtg

SEQ ID NO: 15544 - DNA, 1288 bp, Homo sapiens
gttatattgtttaattttatatatattcaaatttttatataatttatatgtataaatttaatatatataaaatgtattcatttataggtatttgtatatgtatgcatgttgcatttttagacaggcaaaatttacgtgaaagcagaaaagagcaagagtttgctatctgccctcatgtgactattttaccttataatgggtgcctagggtaaaagtatgctggtgcaatggcagggttctgggttggtgactgtagtaacttttgaccttaattagaggaatctgggaggaaatatctcacttctttcttctctcctagaatccgaatcggaaggtgaggaaaattaaatggctcaacaagcacaatacctaggttaccacacaccactttttgattgggaatgctgaaccatttgagaagagaaacttggcttctgttttcgcaaaggaaaaaaaaaataggataggcttcccttgtgcagagggagaaatggttttgtttttgttttgtttttaaatggagccctgaggcatcagctattatacttgggactctacctctcactcactatatgctaacttaaagccattcaacaaggagtcaagtagatctgaaattaaatactcaacagactcctccttttttagctgtatttttcaggtactgtgtggtgaccgccccactggtgtctattacaggccactttggtagttgtgtatctgctcatgtatgtgatttgacaaaccagttttttaaaataaatggctttttaaaaatctgggcttatattgtcagagcttttatttctttcctgtacgtgacttcttacacagatagtattttggtgttttttctctttccatccacaatactgaatggttatatttcttgtcatctattaaaaactattctgctcacacctgtaatcccagcactttgggaggccaacgcgggaagatcatgaggccaggagatcgagaccatcctggctaacacagtgaaaccccatctctactaaaaatacaaaaaattagccgggtgtggtggtgggcacctgtagtctcagctactcgggaggctgaggcaggagaatggcgtgaacccgggaggcggagcttgcagtgagccaagattgtgctactgcaccccagcctgggcgacagagcgagactccgtctcaaataaaaaaaaaacagaaaactgttctgtttctctcatctcatgagtaatacatttcagttatcctcatggcaaaggagaagttaacccccaaatacacgcacattg

SEQ ID NO: 15545 - DNA, 1217 bp, Homo sapiens
gttaagctccatttgccagtttaaggaaggaaacactatctggaaaagtaccttattgatagtggaattatatatttttactctatgtttctctacatgtttttttctttccgttgctgaaaaatatttgaaacttgtggtctctgaagctcggtggcacctggaatttactgtattcattgtcgggcactgtccactgtggcctttcttagcatttttacctgcagaaaaactttgtatggtaccactgtgttggttatatggtgaatctgaacgtacatctcactggtataattatatgtagcactgtgctgtgtagatagttcctactggaaaaagagtggaaatttattaaaatcagaaagtatgagatcctgttatgttaagggaaatccaaattcccaattttttttggtctttttaggaaagattgttgtggtaaaaagtgttagtataaaaatgataatttacttgtagtcttttatgattacaccaatgtattctagaaatagttatgtcttaggaaattgtggtttaatttttgacttttacaggtaagtgcaaaggagaagtggtttcatgaaatgttctaatgtataataacatttaccttcagcctccatcagaatggaacgagttttgagtaatcaggaagtatatctatatgatcttgatattgttttataataatttgaagtctaaaagactgcatttttaaacaagttagtattaatgcgttggcccacgtagcaaaaagatatttgattatcttaaaaattgttaaataccgttttcatgaaatttctcagtattgtaacagcaacttgtcaaacctaagcatatttgaatatgatctcccataatttgaaattgaaatcgtattgtgtggctctgtatattctgttaaaaaattaaaggacagaaacctttctttgtgtatgcatgtttgaattaaaagaaagtaatggaagaattgatcgatgaattaagtgaggtggaattcttttctttctgctttagcttctctctgttggacttagagctgggtattgctattttagtgtataatcaagctgtggaaataaatttccagcattaatgtctattggtagtcatcctcaaatcctttcttgaaatgtttcagtggctaatattatctccatggtgagaaaaagtttttctaaaaagagaagccattaatatttatttgggaaaaa

SEQ ID NO: 15546 - DNA, 1116 bp, Homo sapiens
cacttggttagccttaatttttttaaaaaaaaaaaaaacaaaaactttcttgaatatttcagtttgttcattttaagtttgtgctgctggtatttgggaagaaaaatcaatcagttaagtgctaccagaaagtgtaccaatttttataaaaattaagaatgatataaatttcacaatctaaaattttaattttgtgcaatattttcatttaatgcatgtgtatttgagtaattgtaagataaatgaatttttaattttttgagatgtagcttaaactgtcttcttaatccaacaacttacattccgttgttgctgcatccttttatttaaggacttgttttaaaagtctttttgtcactccttggaaaattcttttattagtagtaaattttgcttttaggagcatggctcctgtattacaagggaaaaaatatgaagagcacattttaggattataattgttaaaagataatgtgtgcatatcattgtacagtaagtgtcaactgtgtgcctaactgttctatcaatactttctttctttaacaaagaagaaacaacaatcagaatgtcagttatttttattcaactaaaaggattaaaaaatttatttggtttgtgttctgtccattagaaaatactaataaagtattaacaaacatttttgttgagttcatttaatagtaatgtatttttgttacttttaagatgcttgctcagtagtcttatttttagtatctgtttgtattttcttttcttttagatatcaaccaattcaagttccaggttgatagatgagtgcttgagtgattactgacttaaatggactgaatttaactttttcttttatggggcaaataatttacaccacagtgttaaagaaactttatacttcctcatcgtatcaaattataaagtattttcccacagatgaaaagatttataattagtaatccattttatttgatctcattttaaattcatattttggctaatattttagattttgccattctaaaagtagattggtcataatatttgcatctttcttggagctgtatcaacagacttctaaggcctcagatgtgataacttctagcccatcagggattggcatat

SEQ ID NO: 15547 - DNA, 1138 bp, Homo sapiens
attaatacatccataagtctgtggttcttctcattctcatctataatccaccactaccaagagagatttctgtgtcttaaatgatttggtgcatattttgcaacattgagagaaaactgcccccatctcaagcaagaatggcgttggtttcttccatttcaaactaatcagcattctccagcaatgacaaagtgccagagtgtatatatgaaagctaaggaaagcacaaaacaatggttcagagataaattggctaatttgtttaacagttggagactgtgcaatgtacgacttggaggagtttgtttggcataatgattttgtaggtctgtcagcattttgatatattgtggattagccaggtgaatgatccttgaaacatctctttcaggtctggagaaagagacagaatgcccttaaagtgtgaaataaccttatacctgaattacagttttgtgatataaaataaagctgagtataaaataaaaccaatcaaacacagaatttgattggatttgttattcattggtatacaacaatttttattcttatgtgtgctttaagggctgtgttttgctcttagggtactcaattttatgtttccttttggcattctttgtgcaaaaagaagcatgtggtggctctcatttaaatttcaaaattattagttttatctttaacagattactgattatacagaagatataatttattggaagaactgccaaatacattttgtccttctaaaaatatggaaatttaaatagtagtctggaaagttaccatatgataatttttaattgtgtgatctagacatgccttaggtaactgcagaaatagcaaattaaatgattaatgagcttattagtcatagtaaacatacagattcctaattctatgacagtgtacatatatgaaaataaatgatgaaaaaagaactataatatttttaaaaatatgcttttatttatatttcacataatgtaaagttctacaaaataaagctagtaggcaagacccctcagtgtatacctttaaacccataaattaattttatatcaataaaataaaatactttctctagttttggagcttctgtatttcctatagttttctgactgtccattttatccatctt

SEQ ID NO: 15548 - DNA, 1741 bp, Homo sapiens
aatgttttcagtgatatgaaaaggttaagtatgccagtagtttacaaaacagaaaatacttaactaggagtaggaggctttatatgctaaaaatgataaaactgactgtaaattaatttggggaaagccagtattgttaaaataccattttatacaaaataaaaagctgctctcactgtcagctctcatattcttccaggttttgcactctacataaaattatttctacaatgtcaagactagccaaaggactttataatacaatattatattactaaagaatgagttaagtttgagattttgatgatttgattttgtgtgtgtttaataggcttcaccttattacatgctattttattttgcttttttaaaaactcaggacattaactaattttaggttttcctttatcatggctttctacagtatttctattgtttaacataaaatagtttgccaaagaagtttctgaagtcttcacagctcttaaaagccaggccagtactgactgtgtggtggtaaatgctattcattattttcttttctttcttccaagtgcatgtgtgtccttgtcttcttaagtctgagaggttgctggaaaggactgttttcttgtacttgttcatttgtgcctcagccattctagttttgttgtgtgttggaggacagtctaatgaagacaggataaatgtgattctgactagtgggaaatttcagattactttttaatgattggaatgggctataagatattgtgctgaagagaaaacagttgttctgttcactgctttcattgagaaaatgtggaatgtctcttgactaattgacaaagtgtaatgaaatgacaagctggttgaagctggtaatcaatgcatggccatatttattcattttccacacacttgaccatctactttgtataacacattctgctaaggcccagggatacaatggcaaacaagatagatgtagttccttcccttgtggcatgtcataagagaaacagatgtgcatatacacacaataaataagaaaattaataattgtattaagtggtatgaaaaaaagggggaggattgttcactcactgttacctgtgttagtatctgcaaatgcatgaatggttgaactcccatgtcagcatttttgttgccatttatttagtaccagacatagtgctggtctcacagcttaatatttggtaatgaataaattctgctagtggtatatgttgatctgaacttacaatgatgggatatagaattggcagagtggcagatgttcacaattgtctacaagtagatgtgctagacaatggaaggatgcaggccaacctctttgattacaattgagattcatgtgactattgagccctggaaatgtagcttgtccaaattgagatgtgctgtcagtataaaatacataccagattttaaagatgtaccaaaaaatgtaaactatctcaatttttatattggtgaaatcaatatgtcttggtatagtggcttaaataaaacaattttagcctttctcagtttatttttctgcaaaaagattaaaaattgtacatgaagctcatgttaactttcttttggtcagtgctattttaaaggaagtatgagttgaaaaaaaattgaaataaactatatcatattactaggacttaatatagtggcatacccaggaaatgcttagtaagtgttcccttcacattttaaaatttgagtatacaatcatgtttga

SEQ ID NO: 15549 - DNA, 1136 bp, Homo sapiens
ttgcataatgagaagagaagcgggacaggagagaactagtgggttcgttttcagatgcgttgcattacaattatcaggcctgcttaggattccgtgtactgcataaaatatactccataaatattttgattttttattgtacagtccaagcctgtaaaattctaccaaacccacctcactactggaaatgatcaaagtgagaacccccatttttaagctacctacttaatccaataagcctctgtgcgaaaacacacatttgcctgcccttaaaagagcagtcggttggctttcctgcgtgctcaatgcatttccgaggctctaagctcccgttctcgaagcgcgaaaacgcggttccccctgctggtcagggctgcgtaatgcagcgaaaagaggggaaattcctaggggcgtggtcgttggtggatggcgtaaaacgagcgccggggacatgggattgtgcttgcgtcaacggcgcgcgccgtgggaaccttgacaagcagcatggctgcaggttgctcagaggcgccgcggccagcggcggcttctgatgggtctctggtagggcaggctggcgtcctgccttgcctagagttgccgacttatgccgctgcttgtgcgctggtgaacagtcgctactcatgcctggtggccgggccgcaccaaaggcacatcgcgctgtcgccccgctaccttaacaggaaacgcaccggcattcgagaacagcttgatgcggagctccttcgctattctgagaggtaccgatctctttgcctgttccttcttttgtgcacgggaagtaaagcaggtggatgtgctgacgacgcagcagaaaggggcaaatggcaaaggtcgcattgccccccagagcttagccccctggatttctagagtcgcgatccgtccctcaaggccagtaccgctctggtaaagatctatacagggtccctttcatagatagagaagaaaacttaaagatgaagttcaggtgtgggcggagggagtggagattcttgctccagaaccctggtgtaggggtaggaaaagaccagggatctggagacctagtaggcccagttctgtttggcattcaacgtttcatttatccccttacggatgatgctttctcatttgac

SEQ ID NO: 15550 - DNA, 1121 bp, Homo sapiens
gaccccgtaggcaaaatcacaaccttgctattaaaaaaaattttgttttacatacacatttgcaggtgttccctagagtgtggtgttttgaatttgctctttgtcatctgtataattgccaaatgattatagtgatacacatgacctgcattcacttttttctagtttccttaattatgtttagaataaattcatttccctagaccgagaaccacaaacaggtagtgtggagcatacaccgaatttagaagcatgtggataaggtcagtgctcacactgcctagtccacagggagaggatgctgcatgaatatatacttgcctctgagtggaggagaaatcgtggcatgaaagagagagtaccagtgatgacttcttatccctggagctgggctttcactgctacccatatcccagccctgcgagtctgttctagccagcacagacaccgcagatccggaactgaatgttcctaaatggcgcagccaatccaggcttttcagaaactgggcaaaaacattaaaatggggacgatcgggtcttccgcagtggtccaacacaggatttcttttaaatgtttcaaaaacatgtccttaaaatttcagcctgcttcttagcgagtgggccagttttgcttaaaactggtgggggggcgggggggaagtttttaaaaattgccaaaaagttagatgcaaatgtattactgtataaagcaaagctgtatatactaaacattttttagcagagtaatatttatttgcatagtctatttattgtattcgtatcacactgttattaaatactgggatgaaatcagtgacctgaagcaagaaatcttgccttttaatgtatcattaattagggctgctgtgatattgtcagcttgcattaacaattagaagatagagaacccgccatcagggtgtctacctaacttctcagggactacacttggtagttttccaccatttaaagaactggtaaatatgaaacatttgttgagttaccagaattgccattaacagtgttttctttcccatattccatgctttctgcctctgtgtatatatataatatatatgtatatgactgtgctgtgtatttatcgaagctagtaagcaa

SEQ ID NO: 15551 - DNA, 1171 bp, Homo sapiens
ttcataaatttgtctctacccttgacctttgtccagaggcctagttctttatttctaactgcttgctaaacgtctgtggcaggcaggctgtcttagtacgaaacatcagcgtttaaaatcagaagcatctgtctcaccaaagccgctccttcatacacattctcccctgtttaatggtatttccattctcacagtcacccatagttatctttgattgtcagatcccatggattctacttttgcattgtctcttgcatttggccacatcttagggtgctgacccagttatacttatgttgtcatggagcctattaacttgtcagttaagagcagggtacttgcctcactcattttcacttgccgcttggtgtccagaacagtgccttacgcaaagggagcaagccctcactatttgttgaatgaatgtcaattaagtgttttaatactttacctgcatttcatgaactatttgtcattgaatatattttctgttattaattctcttaatacttttaatcttaaccaatcaagcacaagaataaaatttcatacccagaacctcaactatggtacttctgttccttctcaggatgagaaattagttaagcatgcaggggtcaggaaacattaatttacctttccttcttgagagccagatgtaattcgtaggattattacatttttatggcaattttagataacatatttccctttgtacattaatttttctgctttttctcttctttatttttaataggtcttcaaaatggaaaactatcacaatgacatagatgctattgatagtacatcaatatgattcagctcttcccctgcctggcagagtgtggctgctgtgtgcacagccatgtaatacatattagttacacaggcattagagaagcccttcccatccatatgtatgtgcatggcctgtggaagttaataatgccatatatcacatgcacatagaatgtaaaacgtacttcagaatgacagcaagctcatataaaatgagtattggcgcatgattaaaggaaaccagggaaagatttttgtcctttcagagaacagaattatttgtttgttctgtgtgtctcagcatcccagaccctcattctgcctttttgtttttttgttttttgtttttcgttttttggggggtttttttggt

SEQ ID NO: 15552 - DNA, 1155 bp, Homo sapiens
ggcgtcgctgcggccgcggctgagggacctgcccgcgctgctgcggagcgggctcacgctgcggaggaagcggagcgccgctgggggccgggtgagtggcccggccctgtccgagtgggcacgggcggcgcgcacgtggagcccgcgcccaccccccgggccgctgaggggggcgtctggaagttggggaggtggcggaagggacgcccttctgccggactcggctgaagaggggcccgggacggcgggttttgaggtgccaccccctgagcgacggcttcccccgcccccacacctcccccccaccaggctgcacctgacttaaccccagggcccccagattcaggctgcgggaccgggcatcggctgaagacgagctgtttgcctcttctcggaggggaagctgcaggtgtccagcgtccaacagccagccagccctgtcccaaccgcaagcttcaggccccacgagcggcatccctgtttgcaggacgcatgcgacgtgtgtgcttgttttggaggtgctgttgcaagctctgggcatcgagactggttttggtggtctccaccgccgaggggcagacccaggagtcggaagctcttgggtgagcttccagttcctgggttccggtgtctccagcacttaatactcctggacaccctcttgagcaggagggtgcacgcccccaagaaccttcaatattgacttcctgatggtgtgttcagatacgatttcctggtgaaggagtgtccctcattgagttctaagtgcatctaatgacctgagcaggtcaggcatgttttgtatttttaagagaagcaggaaggtctgctgattgtctcctgggatctttaagaagccacctaggaggccccgccagggcctcaggacacagagctgacttactcagatttccctgctcaccagggtttggcggcacctttggtgggttctactcatcttttaaaaatttattattaagtggtctttaatgagaagctgcatcaatgtggtttttctttcccgtttggctgtaatttttaaaatgcagtcttgtctgacttaaaacaagaccttgctgggagacttctagctctttcagagatgggtttgtgtaaacttgagagtgagggataaccacttgttttcatgcgccc

SEQ ID NO: 15553 - DNA, 2351 bp, Homo sapiens
aaatgaatcatagagctaagtataaaatgtaaaactataaacttttaaaggaaaatataggagaaaattattacatccctaaattaggcaaaaattcttatattaataacaccaaaacaatactttcaaggaaaaaaattggtaaattagaattcattaaaaattaagaatttgctttgcaaatgacatcgtcaaaataatgcaaagaaaagccacaaactaggaaaaaaccatctgtgaattacatatatgacaaaagacttgtatccagaatataaaaagatctcaaaaatgcaacaataaaaacacaaggaaatttttaaaagaatcaaaattttgacctttttcgcaacgggtttgccgccagaacacaggtgtcgtgaaaactacccctaaaagccaaaatgggaaaggaaaagactcatatcaacattgtcgtcattggacacgtagattcaggcaagtccaccactactggccatctgatctataaatgcggtggcatcgacaaaagaaccattgaaaaatttgagaaggaggctgctgagatgggaaagggctccttcaagtatgcctgggtcttggataaactgaaagctgagcgtgaacgtggtatcaccattgatatctccttgtggaaatttgagaccagcaagtactatgtgactatcattgatgccccaggacacagggacttcatcaaaaacatgattacagggacatctcaggctgactgtgctgtcctgattgttgctgctggtgttggtgaatttgaagctggtatctccaagaatgggcagacccgagagcatgcccttctggcttacacactgggtgtgaaacaactaattgtcggtgttaacaaaatggattccactgagccaccctacagccagaagagatatgaggaaattgttaaggaatcagcacttacattaagaaaattggctacaaccccgacacagtagcatttgtgccaatttctggttggaatggtgacaacatgctggagccaagtgctaacatgccttggttcaagggatggaaagtcacccgtaaggatggcaatgccagtggaaccacgctgcttgaggctctggactgcatcctaccaccaactcatccaactgacaagcccttgcgcctgcctctccaggatgtctacaaaattggtggtattggtactgttcctgttggccgagtggagactggtgttctcaaacccggtatggtggtcacctttgctccagtcaacgttacaacggaagtaaaatctgtcgaaatgcaccatgaagctttgagtgaagctcttcctggggacaatgtgggcttcaatgtcaagaatgtgtctgtcaaggatgttcgtcgtggcaacgtcgctggtgacagcaaaaatgacccaccaatggaagcagcgggcttcactgctcaggtgattatcctgaaccatccaggccaaataagcaccggctatgcccctgtattggattgccacacggctcacattgcatgcaagtttgctgagctgaaggaaaagattgatcgccgttctggtaaaaagctggaagatggccctaaattcttgaagtctggtgatgctgccattgttgatatggttcctggcaagcccatgtgtgttgagagcttctcagactatccacctttgggtcgctttgctgttcgtgatatgagacagacagttgcggtgggtgtcatcaaagcagtggacaagaaggctgctggagctggcaaggtcaccaagtctgcccagaaagctcagaaggctaaatgaatattatccctaatacctgccaccccactcttaatcagtggtggaagaatggtctcagaactgtttgtttcaattggccatttaagtttagtagtaaaagactggttaatgataacaatgcatcgtaaaaccttcagaaggaaaggagaatgttttgtggaccactttggttttcttttttgcgtgtggcagttttaagttattagtttttaaaatcagtactttttaatggaaacaactggaccaaaaatttgtcacagaattttgagacccattaaaaaagttaaatgagaaaaaaaaaaaaagaatcaaaattttgaacagacacttcaactaaaatacatatgtatggcaagtaagcacatgaaaagacagtcaacatcaatagacatcagggaaatacaaactgaaaccactacctgccaattaggaaggctaaagtttaaacacaatatgacagtacaatgtattagtgaggattcaggccactgaaatatttgaacaacagtttggtagtttcttataagaaacttaaatacacactgacgatctgatccag

SEQ ID NO: 15554 - DNA, 2479 bp, Homo sapiens
ttatctggtatcttgttaaaaatgcagaatttcatgccactctaggtctactaaatcagaatttgcattcttaacaaggttcccaagtgatttttatgagaagaaagtatcagagtgcaaacaaattactcgtctaatatgtagaattcccagtggtctcacagccctagatcaaatgtgtcagacactagatcattataatcttcattggttttgacagctaattaattagtttaataatattgacatatggcttcttaagtatttgaattctagattgctaatgatccttatttttgcagtaaaaaagtaacactttatatttttcttgttaactataaatggaatcagagctgtaaatgcctgaaattttaagtgtgaaaaggggtgccacccttttatatactgcacaacaaatttgcatttgtatattctttttaaaaaatctctgaagacttgctcagtgaaatggttctgattttttgcttcaaatgatttgcactaattgattttctggagagcggagttacgttaacaacaaaattcttttatagttcctttgatactatttcaaataaggattacacattgaaagtttttatagaaattatgaaaattggataatcttaactatggtaaccattactattatccatactactttctccccactgaactttcaaatttgaaaattggggtagcttttgtaggtcactttcttataaagatgctgatggtcacagatctcctaagtatccagaataatatttttatcatgagaaggattccacacaaaattggggtcttgcaccccatatttcagaggatctgaacagaaattgtggcttcattgcacattttaaatctctatagattcttgaaatcacccaacctctcacatttgaaaacccaacggcctggagtattctggtggcactggagccagcactagctttttggaatccaagtggggagagaaacaaaaatagacttttcaagggactgtcccagactacccagggcaaatgtcttcccttcccttcctgaagccacaggaaagcaccctggagtcctttgtataccactatggaaatttttaaggcaagctctcaagacttgaagagttggaattctcggcatttaaatgatgcctgaagtttgttttgaaaaagcaatatttcattgctcttttcaattgtgaagcaactgctcagcaaatattactcatttttttaaaaagttgaattaaagggaaatatatttttaaaaccaaaatagatcaaaatgatcccagttttaagggattttgcctattttggaagaataaaactaaaatgttaaaactgttgaattacagagaacagatgtactctgagacataattttaaacaaatatttaaaataaggcaggttaacatttgcgtttaggcacaataaatctgtattaaagggaagcacatcaaggaaatatatacatgttgaataatgtaactgaaaaatattttttaaaaaccacttaaaaagaaaaataatttgatgggtactttaagcattgtagatagaaattaatgtataatagtgtcctcccagtctttgtatgaaaaattaaaactctctagtcctttaatgagcatgaatttatacttctacatttgttgcttagtaaaattatactcagtactttgagttattcagatttatgtttaatattgttaaattcttcatcagagagcataaatatattgtcttctatactttgtaacttgtgcatatctaaagaaactaacaacgaacattttgggagatgtttttgtgtttttttatagtagagttttagagtacatttgtcttaataggaagtttttaccataaacccaagattttatttcacgtattgttgctttctcttatatggaacttattgtgtacctcttacctttatttctaatcatttagtgatactaatcttttcatagtaaatatatttgtttctaattgtattcctagagtttacattcctaaagaataaacgacgactttggctatttttgtgtgttccctaccttcttaaggctatggaaataaactggagtttagttttttgaatttttgtatatttgtgtaaatgttctccatatgtagtactttatacaacaagtgttgcctcttgttttattgaaataaaaactgaaaaaaatattttttccagatcagtttactcatttaaaaaattattataaaaatttgcagaagttttgatatgaaggaagagaataaaggaggaagacttaggtaagttgagccattgagagcttttgggggtaagtgataagacaatgacctcattcctggctttgtgctttacatgtcatagggctgaggagtatgacaggtccactcgtattcatccaaagatgaagatgagctctatgggccatgcaccagtggcggattatttgtcatatcagaagcacaggca

SEQ ID NO: 15555 - DNA, 1241 bp, Homo sapiens
ggcatttctgttgttatctctgaaacatttttatatcaaaaatcagattgctggtaggtgtgttgttttgaagtgttttatctggatttagcatgtgaagatccctttcaattattaaggtataataggctgtaaagctgatttaccctactgctggactttggaaatcctagttagtttggactcctataattcagagcatacgtcattggaagacttcctggaaatcagtgtaaatcttgcaacatagctctcaagataccactgtataatatgtaattgtttgtctgcaaatgcatttttcatctataaaatgtcatgaaagaaaataaaggtagtgaaatatggacaaaggacatttatatattaactaaagttgtttatgtttgtgttcttaaatttaaaacacgaagaaaaagaaatgtctttcttgttagtgaacaggcctgttttaaatatcttagtatgatatcaaaagaataatcaatttagttacctcccaactaaaaagtaaaaatgaaaaagacgacatggcagaagttgaaacaaacttgtatgtatctgtatgtgacctctagatggaaataaaagtttgatgtttgctagccgtggtccttttggctatggttgcggttcccctgtaaagcaaatgtacttaagtcatcattcagagtgagagagagaaagcacggctgaggctgagtcagttgaccgttgaggaagacctaaggagctgtccagttcttggctctttttcactgtgactgcacagcggtttccttcttcatagtcccttgctgtagtcaccaagagagcatgctagtgttttcctcttgttcctgcttatgcagagctcagatatatgaaaaatttgtatgctttgaaggctgccaaagcatttatactctggacatagttttaactgcaactgctttggctaccagtttaaaccgagttcttcaaaaagcatgaactcgttttcattcattagccctgtttacaatgtggattttgacataaatgaatttgattttcttttagctccagtaacagaatggaataagatctattgccataaattgtagttaagaactgtaaggcaatcgggcagtgaaacttgatattgtattaacttaataggaaccctgtgtacaatttaaaatatttgtaaaatatcactgtgaatttacagatgtctttttgtcattctttaacaatgaatttcccctgtgcatagttat

SEQ ID NO: 15556 - DNA, 1234 bp, Homo sapiens
ttgtttaggaaatacagaattaacaggtcaagaagaactgatggagatatctgaagttgacgagggattttattccagggctgcgtctagtaccagccagtcgggtttatcaaacagtagtcacaattgtagtaacaagccaagtataggaaagaaccacagacggtcaggaggaagcaaaactggaggaaaagaaaaagaaactacaggggaatcttgcaaagatcactttgctcgaaaacaaactcagagagcccaaagtgagaatcttgagcttctctctttgaagagacttactttaacaaccagccaatccctacctaagcctagtagccatggtttggctaagaccgcagcgactgtatttagtaaatcctttgaacaagtcagtggtgtcacagtcccacataacccgtcatctgctgttggttgtggggctgggacagatgccaataggttttccgcttgtagtctccaagaagaaaagcttatttacgtttcagaaagaactgaacttccaatgaagcatcaatcaggtcagcagagacctcctagtattagcattactctgtccacagattaattagtaacatatttttctcccataacctagtgaacctggaaatacaactttgcttctttatgaaagtaccctgggtctttcatccgtattcctgacaggagccctgatgtcttaaattctgaaggctcccctgactttatgaagggaagattgtctaggttgcagtaagttgaaatatggttttgttatttcttgattaagattttttccccttggtttgagtcttttttttccctcctcttatttgttattgttgccctaagattgtcagtgacaataaattttgacaggttgtctaatcaagttggttatgtctcatgtgaggttgtaaggtggtttttcttgttttggtttggtttggttttttaatagctcctattttgatggctgtgtgtttggccttcagagtcaaagggagtctgcatgtatgggaactgttttatagagaatggggcagaggcacaactccaggaattctctagctcctggtcaggaagccaatctgaaaacaggcatgtggaaacacaaaaatgatgtgtatgaaaagcacctgatgaaaatatttgtaagcagatcatctttatgattagaacaatttgctcaaagccctggaaaatgcctggtaacccagtgcctagaatattatatgat

SEQ ID NO: 15557 - DNA, 1104 bp, Homo sapiens
agatttactctaatattcaccaatcatagttgcataaaatctagactgtctccagagtgtacaacattattttaacatacggcttgcattactaatagagtttatatgttaattcgtatggtattctagatacttaagttttgtacctttcaaaatagaaaagaaatataaggtcattttcttcacatatttcatatttaaatgattacttcgcttagcaaatataacttgttacatgagtaagatcaaggattattaagacactgtatctgtatctcagccatcctgaaaatttgttacatatgttttttaagtggaaggatgtacagtttaactaccggtgttgatgaataataatggattatcatggtttaaggttttaacttaaaattcctttctattcaggtctttttcaaaaaaatgttttagactatttaaatttagtttgtaaatttgtgtgtaagaaagtatgtattttaatatattttctttcacttctataggaaatagttgacaaacagggacataccaaagtattgagttttacgattccatctttatccaaaccatctgtataccatgaagtaagtgacattttatcacagtaagtttattgaccctaagctttgatattgccacaagttataatctagttatttaggaaaaaaattgatcaatttattagtacctgcaaaagtataaacacccacaaagtatttactatttccaaattgagataagaaatcaaaataaatgaacatcaaactaaaatgtgctaataagagatctattgaaagtattctttttgaaatatttttccctcttcctgatggatggctacttgtgtgtgttggccggcgggcaggggggtggtgggtgggcaattgtgtatttccatggtagaatttgtgaaattaaactaatttttatttctcatttgtggtttgttttaaaattagttattaaatcttcgagcagaaaatttggtaggcagcctaaatatgtttaagatatatgatgttcgtggtagctattttagtggtatatatatattctatatatcaccttttcagcagaatagctttttttttctttattcaaatg

SEQ ID NO: 15558 - DNA, 1238 bp, Homo sapiens
ttaacagcaacttctggacattcagtaccaggaactgttttaggtgctgtggagagaagagttaaaaatgaaacaaaaattattgccttcatgagcctcacattagtggacagagtccaaaaaaaaagtgacaacgtaatgcgctactgcgacacaaagcaaagcaaggtgggcaagcaacactagttctttattcccgcacgccctaatccccaagtagctcttccgggtcactgcagtcttcacgggctccagactccgcccatggtccgtccttcaggccttgactccgcccacgcatcgacgtagaatttcccggccgggctccatgaagtaccacccacccgcgacgccgacgcaaggctgctgctatggggccgggcggccgtgtggcgcggctgctcgccccactaatgtggcgcagggcggtttcctcggtggcggggtccgcggttggagccgagcccgggcttcggctgctggccgtgcagcggcttcccgtaggagcagcgttctgccgggcttgccagaccccaaactttgtccgcggcctgcacagcgagcctgggctggaggagcgggcggaggggacggtcaacgagggacgcccagaatcggacgcggcaggtacgggcgtggagaagaacgaaggcgaccctctccgggcagtctggagtcaggtcccagccaaggtggctctgggttcccctctatgtgcatttctcttggagtcacaaaactcctgcacatccagagctggaagggacttcaaaggttgttggcgccaaccttcccgtttcacagtgaagaaattgagggcaagagatgaactgcagaatcccagcctcccggacggccatctcccacccttggcatcacagtctcaccgtcctcacttccttttaccctcttcctaggatcctgggaaatgggtttgtggggactgttggggcttgaggattctgaggagccagggtctgggtgcgaaggggtgcgtaggaagcgccagtaggagatgggtccaagttaatatcctctagttattgctgacgtttttagaaacttaagaatggtaaacagatcacatctaagaatgtagagtatgagagggagaggccttagtgggcttagctactaggtcctttggagtcggctttagaacttgggcgagcttttaaatttacagcctgtaatactccaagctgaagatcagaatatctaaatctttacgggaaaaa

SEQ ID NO: 15559 - DNA, 1254 bp, Homo sapiens
gaaaactggaaggttcaaaataataattactcaaaaatgtagctctttcagtgactgatcttaggccacagtaattctcctaggcctcagtttcttcatctctcaactgaaggttgtggaccagatactgcctaagagcccttccagctcacaattctgtgacccgttatgactgagattcaatttaatatgctccaggatatcacctcctacccattttgtggtgctgtttttctttgcacagcatttctgtgattgtggtgtattgctccttttaagtattagtagaaagtcatttgtcactggtgtctggttctacttgcatatggttaatagcgaaggatgtatagtggctctgcgtaatctgagcaccctgaccataaaagttgagcggtgctatgatactactgcccaggttcaccttccaggaggcctttaccctgctatctgtaaaaacactttggatctaaacaccctcatggaggaacagtcagctgccggcatctctgggtgcatacacgtctatctgcttggccatcctgatacaaacaactatttgtgcatttcagatcatactggtcccaagtttgacatcgatatgatggtttcacttctgaggcaagaaaatgcaagagacatttgtgtgatccaggttcctccagaaatgagatatacagattactttgtgattgttagtggaacttctacccgacacttacatgccatggccttctacgttgtgaaaatggtaggatgctttcttttctcttttggaccattaactgagtggaatagtgacagtgcatcaggccaaggagcaacacttagagggtaaacccatcatacaaagttacagaagaagcccaaattttcagaatttgcatgaattcattttatgttctttgatagtgaaacatatgggagcaaatatccagccctattgagttaggatatatcaaaatcttttctcttgtgaccgcaaggaagattttttttttttttctaattgagatggagttttgctcttgttgcccaggctggagtgcaatggcgcgatctctgctcaccgcaacctccgcctcccgggtttaagtgattctcctgcctcatcctcctgagtagctgggattacaggcatgcgccaccaggcccagataattttgtatttttagtagagacgggtttctccatgttggtcaggctggtctcaaactcctgacctcaggggatccgcctgcctcagcctcctaaagt

SEQ ID NO: 15560 - DNA, 2646 bp, Homo sapiens
ttcaggaaattctgactcaggtaaagcagcaccaacaacagaaggctctgcaaagtggaccacctcagtcaagacggaagtaaaggctcaggaaacagcccaccacagaggcagatgccaaaccaaagacagattgcttaaccaacagatgggcgctgaccccctatccagaatcacatgcacaagtttttacctagccagttgtttctgaggaccaggcaacttttgaactcctgtctctgtgagaatgtatactttatgctctctgaaatgtatgacacccagctttaaaacaaacaaacaaacaaacaaaaaaagggtgggggagggagggaaagagaagagctctgcacttccctttgttgtagtctcacagtataacagatattctaattcttcttaatattcccccataatgccagaaattggcttaatgatgctttcactaaattcatcaaatagattgctcctaaatccaattgttaaaattggatcagaataattatcacaggaacttaaatgttaagccattagcatagaaaaactgttctcagttttatttttacctaacactaacatgagtaacctaagggaagtgctgaatggtgttggcaggggtattaaacgtgcatttttactcaactacctcaggtattcagtaatacaatgaaaagcaaaattgttccttttttttgaaaattttatatactttataatgatagaagtccaaccgttttttaaaaaataaatttaaaatttaacagcaatcagctaacaggcaaattaagatttttacttctggctggtgacagtaaagctggaaaattaatttcagggttttttgaggcttttgacacagttattagttaaatcaaatgttcaaaaatacggagcagtgcctagtatctggagagcagcactaccatttattctttcatttatagttgggaaagtttttgacggtactaacaaagtggtcgcaggagattttggaacggctggtttaaatggcttcaggagacttcagttttttgtttagctacatgattgaatgcataataaatgctttgtgcttctgactatcaatacctaaagaaagtgcatcagtgaagagatgcaagactttcaactgactggcaaaaagcaagctttagcttgtcttataggatgcttagtttgccactacacttcagaccaatgggacagtcatagatggtgtgacagtgtttaaacgcaacaaaaggctacatttccatggggccagcactgtcatgagcctcactaagctattttgaagatttttaagcactgataaattaaaaaaaaaaaattagactccaccttaagtagtaaagtataacaggatttctgtatactgtgcaatcagttctttgaaaaaaaagtcaaaagatagagaatacaagaaaagtttttgggatataatttgaatgactgtgaaaacatatgacctttgataacgaactcatttgctcactccttgacagcaaagcccagtacgtacaattgtgttgggtgtgggtggtctccaaggccacgctgctctctgaattgattttttgagttttgtttgtaagatgatcacagtcatgttacactgatctaaaggacatatatataaccctttaaaaaaaaaatcactgcctcattcttatttcaagatgaatttctatacagactagatgtttttctgaagatcaattagacattttgaaaatgatttaaagtgttttccttaatgttctctgaaaacaagtttcttttgtagttttaaccaaaaaagtgccctttttgtcactggattctcctagcattcatgatttttttttcatacaatgaattaaaattgctaaaatcatggactggctttctggttggatttcaggtaagatgtgtttaaggccagagcttttctcagtatttgatttttttccccaatatttgattttttaaaaatatacacataggtgctgcatttatatctgctggtttaaattctgtcatatttcacttctagccttttagtatggcaaatcatattttacttttacttaagcatttgtaatttggagtatctggtactagctaagaaataattctataattgagttttgtactcaccatatatggatcattcctcatgtataatgtgccccaaatgcagcttcattttccagataccttgacgcagaataaattttttcatcatttaggtgcagcttgttgtgtagtatgttttatttttggttttcaattgaatgggaatgttctgaattttttttcaaactctacgcagatttctgttataccatgtccagccatggtacttaatgtgaaccttgataatactcttgcatatgaactaagaactagagcgttcagagtttttcctaacaaacactttgtttactttcttgtgttactggagtattctggaagggttacagaagtcctcctagaagaatattatcacctcaaagtataaaaataagaccagtgggctatgttttatattattttttaaaatttttgccattccattaaacaaacagggttaagatttacatttaagctaaattaaattaataaaaatctgagcagagaagtcaagcacaggagccagtgcta

SEQ ID NO: 15561 - DNA, 1183 bp, Homo sapiens
tgatcacaccactgcactccagcctaggccacacagtaagaccctgcctcagacaaacaaaggcatgtggtgtgcagtatccttgaaacttagggtacagagattcctagagtgtgttgcatacacaggaagcccaaggagccctgatgcaagtgggccaaggaccatactttgagcaccactggtgtagtgaacacaggcaatggagacagacccagctctccctctagctctgttagctgtgtgatcatggtccagataactcaatttctccagccttccatttccgcatttgtgaagtggaggtaatactacttcatcaggacgtggtgaggattagctgagagacagcacgtggaggtctccattagggcccggcacagaataagcatatagtatatgcaggagggaggcctaaattgtgaacccacaggaattgctgcctctccctaatttccttcacgaaggctttaattctgcatttcagccagtcacatgcaaatgttaggctggttggcccaagatgcctatcagtgatacctgaaagtatcataacttgttgttgggtctgttacagattgctccagcggaagcaccagatgctaaagtgaggatggtgattatcactggaccaccagaggctcagttcaaggtatgtgctctagagtatgtgctatgtccacaggtaacaaatgcacaggtagtccataacctggcgtctcccttaaatatgtctaaatctcagaaagagtcaatggaaattcttatctaagagctgagtagaatcacactcaaaattatatttcgaaattaaccaaaagtctttaattttaagagttctgtactggttgctggatttacctgtctctcaaaggttaattttgcttaatggtttgtaatcctatgctaaggtgagaccttaaaatttacaaacctgccaggttaatatgccttggaaacttgttttcagatgttttccctcctgtccctgagattgcctagacttgaattaaaatgccccctttttccttacccttggattatctctgttagaccctgcccatagactctacaaatctctctaatccctgggatcttagagataggaatggcaggagctcttgtagcatttgttctggtatgaaccattgcacgtttagtgggatttgaggtctttggggct

SEQ ID NO: 15562 - DNA, 1259 bp, Homo sapiens
ctaaagaaactggtaaaaactaagtttagacacaggaattctggcttgtgtttttggaatatttccatgctttctccttgcttggtgacccagaaaatgcaattgcacgagaatgccaattatgcctagaattggttaatacagactaggaacatacttatgaaaggttatgtacttagggtatttggtttcctcaaaaactatacatctttccagtcattttttaattcactgttcaattgtgaaaatggttcaactttaagcggttgagaagtaagctttatttaaaatatggacttgattgaactatatgtatccagtaatcgttagttgagaaaatgggagggcaaatattttcttctctcttgcagctttacagtttcggatttacgtcttttggggcttactcatttcccatcatgttttaccacccacttttacatattaccaggctccacagtttgtttttaattgccgtctgtggctgaattattagctgtcttcctccaattttcattctttttctttcccttctttttcattctgcagattgcaggaattgacgctgtataatccagaacgcactattacagttaaaggcaatgttgagacatgtgccaaagctgaggaggagatcatgaagaaaatcagggagtcttatgaaaatgatattgcttctatgaatgttagttttgttatgaagggcatgtctttattttaacaaatagttaaaacaatgtttttaactgcattaatattgaattcttttgtggcattatcactagaagtagttctagttgatttttagcacctcagcaagtaccctgggatagtagggaagatactggctttgacattaagctttgctgtctctgtgactttagcaaattattcagtctttgagccttagcttccttctgtctgaagtaaggctagtgtctacctacaaaggttaatatagtacctctcttacaatgttaatttgagagagtttaatatagaagaaatgttacatgaactggatttgaatcacagctgaaccatttatgagctgcagctctcttctcttatatgatttactcagtctctctgaggctcagtttactcatctgtaaaatgggactactgcctaccttgcattcttattaggattacaatagatataatgcatataaaagttaatgttaagattacaggtttaaaacttggttagccatataaaccttggagatacaagaatttcaattgataaaacaatc

SEQ ID NO: 15563 - DNA, 2911 bp, Homo sapiens
caatgaacctagatagcgccactgcacttcagcctgggcaacagagtgagactccgtcccaaaaaagaaaaaaattagccgggcgtggtggcgcgcgcgggagcctgaggtgggaggatcgtctgagcccgggagtttgaggctgtggtgagcagtgatcgcttcactgcacttcagcttgggtgacagagcgagaccctgactcaaaaaataaacaaacataaaaaaacgcttccaatgttttgttcccttacatcagaatccacttggacaatatttaaaggggctaaggtcatataaggctcatctggcgactgaaaagtcttcaaagaggttgacgcgtccgaggtgagtctgaagtttggaggacagcacgggaccgcgattccaaggcgcccaggttgagagcgcaggccgcccgccaacctccaccctcgctccaggcccagccgacacaaagcctcgcgggaggtggagcctcgtgacgtcacagagacgcccgccccctttacgtcgtgctctgaggaggccaggagatttctggcggcgccggcgccattttgctggagcctgcgaccgagtgggagtggagtggagcggctgtggttgccgactctttcctcttccccacggtccagtcagcgggttaattaggccatcggccctcgagccgagacttgtctcttatttagttctggggagcgcctcgtcgacatgagtgatgtggaggaaaacaacttcgagggcagagtgagtacaaagccgcgggagccgtctaggcggcggcccaatgctcggggtttcacgggaacaagcgcggtcgggcggggttgcgggtagtcccgcgaggagcaacctctggagccatcgcgattgattcctcccatcccaagatggcttctgggttccactccttccccaaacaccacggataacacccctcccccttttttggaggctgactgatacctggacttctgggtcctcttccctccccgcccccgcattgcttcctcccttctccccacccctgaggcttccttatgtctgctccgaggtgtgggtccccgtcgcggttgggcgggaggaggcggcagggagctcccctccgtccggatagtggtaggtgcttcctgcggtggcatttctggcgaccccgagcatcgtagagggtctcgggatcgaaagtgcgcggggctgctttccgggcggggagaagctggcgtgggactagctggggcctgtgtctccttggctctctatttcagtgagcggccgcgtctctgttggaaccggcggcgttgcgtctaaaaaggcgaaagccttgaggttgaaggtgggacgagcctaatgaagtggttagtcaacgaccgcaccgacccttaagcgttcttaagacgagagctgtgaggggaaactacgcaaggagcccttttcccttaatgtcccttcgactttcctttcacttcgaaatgaatgtggaaatgctgtcacgccttatttttctaattcctcgatgttgggttttttctcttctttatatctcaacttttaatgctcttcttcctatgacctttcatctaaaaactgaccactcctttacaggtttttacggtaaaaaaaaaaaaatctgtctttctttaatcttacatagctgaacgaattcattggctcagtatttttaagataactagtcagtatatactgttctgtaacttaaaagatgacctgaaaattaacaggccctctcccatttctcttctcactctatcccccaccgaagagggctcagaaaaaagtttttattaatatatttggggtcggagaaatacaaacatcacaaagaatacgatatccccagcttaaatgtactggaacgtttgtcagtgagtttcatttccaaagtttaccctacatagggaattgtagaagtgagttagtagaagtgagttcgtgtgaaaccctggaaagaaaacaaaagccccatgcaacacgttccgggctgttgtgtagatgtttattctagtcactaggggaagcacataaaaacacctgaggtgtgtgtgctgaagggcgaattttgtccttttggggagttcatgatataaacatctagaaccaaaaagtcaaatcagaaggtcagtttaggctttagttctctttgaggaaagatttaaagcaatagactataatagttacccggtagactaaaaaatttgcctttaattcttttgattggaatttttttttacaaagtttggagcatggaaacaaatgaaaattgaacctgcttattttttaggatggtgtattgatggccccaacagaactttctaaaatcatgcgataaacatatatgatagtagttgtaaaatgcttcttgttttgaaaatgttgagtaattatcgatagaaattttgctgtccattcatacattccttcaattaactttcattgttaaaaaattgggggattgatgtttggtttggtttgtggggagtgaagaggactactggagggaccttgtttgcttgctttttttctttttttaatttatcatcaagtctaggaaaggagtaagttgccgacaattgtcacttttccctcctaagaaagtaacatgttaagattcccacctaccagcctgggtgacagtgagactcccgtctcaaaaaaaaaaaaaaagattcccacccacttttaagctaaagtatatgtaggcattaaagatttatttaatagaaataaagggccctcttacggccctttgtggtcataggaaatatttttttcacaagtggtacccaagtgtattttagtgtaaatcaactagtgcttgtaggctcacctgttgtatctttttatttttcgtcttttagtttttataggatgagataattgtctttatttg

SEQ ID NO: 15564 - DNA, 1187 bp, Homo sapiens
aagctagtgtacctggagggaggaatttatgttggttaatgagtaacatagttctctcatcccattacttatttatgatcaatttatttttaattaagcttttaaaattattaatgctacatgacatgcaaagttaaaatcagcatggaagaatgaatgtaccatgaaagttaaaggtttctatccctactcttacttcatagagttaatcatggttagtagtttcagatttagttatattagtaaagtggttctcaattcatgactggcatttttggcagtactatactttgcaatgcaggattgtcctgacctgaacactactcagtgtttagtgtcccttaatatttggttttctaccacagttactgagacaatcaaaaatggcctagtacatttccaaatgctcactggggagaggtggtatgctaattttaaaaaacatacatcttagaaagcatatgtttatgttttcaatttcacacagtaagtattgactctagtataaaagaatatttaagtgcgcacagacttcttgagggaggcccagagaaagtccacttgggaggaactgtgcttacttctaaagtcttagatgataagatttttcaatcttacctgctttctttcctgatagtcttactttcttgtgttttcagctacctgtctttttgttactgtttgatgatttttgaattgtgtgctcttgcttcgctgggttttattggaggaaattctgtgcagcccagttagaggacacattctttccaaggtttgccaaggcttttctttggcacctgtggaagccactgacccaagaccacttcgtagtttctctgcttggggtgttctgaactaggcaggtaggtatatttggaaccctgaatccttgagagtaggctgtgattactaattctcaggtgatatttttttctgctaatatggagtccaatctgagacaggccaacttccttattgtcttccttggccaacaggcatgtttttattagactactcttacaaagtaggggttagtcctataaggtctcagcttcatgtgggaaggtctaagttgcatttttcatcttgaacaggccagggcctaaatggcagcttctgaactcctggttactgaaatcctaaacaccccagggcagtcataacttcagtacctacttactagtttg

SEQ ID NO: 15565 - DNA, 1251 bp, Homo sapiens
gggaaataattgtcagctattttgtatacatacacacaaaatatatacattatataatatgtatattatgtattatataatatatataaaatgttttgtatattttttacatatctgttaaaaaatgtactttgtttttttgtttgtttgttttgagatggagtctctctctgtcacccatgctggagtacagtggcgcgatctcagcccgctgcaacctctgcctcctgggttcatgcgactctcgtgcctcagcctcccaagtaattgagattacagttgggtgccaccatgtccggctaatttttgtatttttagtacagatggggtttcaccatgttggccagggtggtctcgagctcctgacctcaagtgatccacccaccttggcctcccaaagtgctgagattacaagcatgagccactgcacctagccaagaagtgtactttttgtttaatgattaccgaaagaagttctcctttagaagcattgacttatacaaattcccacattcacctcagttaatatcttcctttaggattcttggataatagaaattcttcctaaaacatactcagagatgcagctcattattaaattaaggtaaccacattctgtattgttgctagcttttcatgtaaacattattcacactttaaaggattaggtgtttaaatattgatggtcatctttgtctggtgttaggtgccagacacctggctgctgaatttgttttttccctcaccaaagttgtcatttggaacgccagctgggaggactttgaaggaaaagaaaatatatgacaataggcagtattgacacattgtttaaaatctttttcacaataaaacaaaacacccaagttgtcatattgttaaagttggaaatctataggtttttctttttttttttttttttctttttttgattctagatttcatggccagaacacaaattcacgtttcttgtcctaggacagggaattggtgacaaaatggattatactattttaataacagtggaaactttcaaactacatgtgtttacaccaaattcttggcttctcaaagcaacatgaattaaagcacagtatcaaggtgatgccctatgacaatgtttcaacacacacttgaaattttaagagaaatttcagttcttcactcaggaaatgtgctgtattctctaatgtactttcatgctgcagcatggagcctctttaaacagctttgggataattatagcagcacaag

SEQ ID NO: 15566 - DNA, 1141 bp, Homo sapiens
aaaggaattatttctattataaatggtattcatgattgactacttaattaatgcacattagatttctcctaatataaaatgaaatgatgcagtttagttcatttcagtctagatgcccgtactaacaagaatacagttagataagttcattgtatctcaatgaagaatcattgaacttgaaacccaagtcccaaatgaatctgcaggaatgagcagtgctctgcgggggcaaacagccccagaggtcccagggttcttcctaggtaatgagagtatagctgtgatcaaggaaatgtgaacttctcttttgggaagatctgcgataattagctttatggaagcgaaaatggtttagagtggtgttgagcaattgttaagagttgaaatagacacacacatgcatgtgcttttgggaaacatgatgtgccaacgtattaatgtgcctgagggctccttgtggataggtcagtgtccacatttcagcactcagggcatgactgtacacaacctaagactatatatatattttttcattttcaaatgtacaaatacccatagaggtgatgtgcctggataagtcatttaaccatagcttagtgaaataaatgtgatggccctaaaaagtagaattttcactttcattacagccatgcctttattatgcagtctccatttctgtgtgatatttggtaatatcacatgtcaaatacatcaggactttgtttattttggctaactctaactatacaattgctgaacatagctttctgaaatagaaattataagagaaacccagtatgcctacagcattagtagcctaaatcctagattctagaatccaataaatttatagtagttcttaagaagtttcctttaaagcaacaaatagattattaaggcaaatttagataataacccaagttagcaataaaaccatgtgacattatagattatgtccagatactaactgctttgaccataatatcccaatgacaataaaaaatgatccttggtttaaaaattattaaatggtacttatttttatgtataacaagtgtcatgatcccagtgactggagttgattttcaaggtggatagccatagagttaggtaaaattattttgaattggcaaactaaaga

SEQ ID NO: 15567 - DNA, 1130 bp, Homo sapiens
gtaaataggtcccgaaatggcgactcatgccctctccctaattcagtcaccaggatcttgcctccttaactcttcttggggaaggaaggacaaaaaggaaaataaaaaatcactgagaagtatattttttagctattctatgtaacaaacctcttaaaatgttgtcactttactcaatggccatttgttctctctcccaagcctaagggtggggcaagtggttttgtgggtggtcctggcttggtagatctcagctgggcctgctcacgcttctgcagtcacctgctgggctggttggggcctcactgatctagaatagtctcacctgggatgactcagcgacttccccttggcaggattctaggggagagtggaaccaatggctgggctggaacctgcatgccagcacctcccccacatgctgttggtcaagccagattcaagagatggggaaacagactccgcctctggatgccgcaaagtcccacggcaaagggcaggaatatagaggtgagtggagaattggaatcatcatgatgcatcggtaatgagaggagaaggcagtgggagaagtaatttggggggaaaagaggaacaggctcaatctaaaagaatgggattgctcctcacttcggttgcccctgccctctcttcagccctctcctcaagtataggaaggtttaataccatttgtctagaaaaaaattgatctgatctggtctgatgactctggtgagcctcctacttctctctgtggagtgccattggcttctctgaggtattgggcacacatctgagtaggcagctttgagaccagcaagtcagcagggctcctaaggccaggagcgatgtctcagcctccagcagcacccaggccactttgtcagaggaatcggagggcaaggaggagaatcttagcatcaccctataagatcagggccctgcttacctgtcctatgccatcatttgccatttctcctcatacacacccactccctggcatactgagctaccttcatttcctgaaattgtggtgaaaagagcctcatgtctttgcacactcactccttgtgctgagaatgcctctccccacccagacaactcccttcccagttcagggtgagggtcac

SEQ ID NO: 15568 - DNA, 4019 bp, Homo sapiens
ttgaagctattttagaggaatttcattaaatatttcacatggaaacttggaaagctggaaatggatgtgaggagacagttcaaaatggtattgaaaatattaagtgattacttaaaggcttattttataataggtggcaattttggaggtagccccggttatggaggaggaagaggaggatatggtggtggaggacctggatatggcaaccagggtgggggctacggaggtggttatgacaactatggaggaggtaataaattcacctgcaacctttatgtgggaatttggaattaatgtctttgtaacacttgatcttttgtttccatgtttgtcactagatgcccataaaatttgtggataagtgtttgcttttatttgtttttatgggagctttgtcctaagtccttggtttaatgtttgtattgttctgagtattccaattttttaataggaaattatggaagtggaaattacaatgattttggaaattataaccagcaaccttctaactacggtccaatgaagagtggaaactttggtggtagcaggaacatggggggaccatatggtggaggtaatttataaaaattgaggttattcagatttttgtgattaaaggattagccttttgtgacttaaagggaagataacatactaagtagtttgtactgtgggcagtgctccatgtacggtcttagtgaaaataaagaaattttgcataaatctccacagaagtactcagcaagcagttatgacatcaaattgggattagggatgttggaggtgggggtgttcagtagtttaatttctggtggggactcataaacagctaaatacagttgcaacccacattgcaagtggtatacattggaatgagggtctttgaagttaaatccttaaaccatgattcaaaccattgcttagcttatttttgaggtttttagctaggagtaaactagctttgtcttgggcttgatgtacttttaaaaaaatcccttactcagtccaaatgaggatgagagggtgaaaggaccctttatttaaaagaatagggtcagccacgaaataaaaatgtctatgaacccgagtaatttatctcctgagtaattctgctaactggctgcaaaggattaggatctgcttgtttaaaagactggatggatataaaatagaatcaactgtagtgttaggctgatcatgggaaatcaaagtaagtttgttttctcttgctgttccaacaattataggaaactatggtccaggaggcagtggaggaagtgggggttatggtgggaggagccgatactgagcttcttcctatttgccatgggtaagtagcttttgagttttacaattattattatcttgggagacatagctgcaggagtaaaagctttttaggatcatgttatctttccttaaaatctggttagatggataatttcataacctattttttttttactctttacttctgttgaaacaggcttcactgtataaataggagaggatgagagcccagaggtaacagaacagcttcaggttatcgaaataacaatgttaaggaaactcttatctcagtcatgcataaatatgcagtgatatggcagaagacaccagagcagatgcagagagccattttgtgaatggattggattatttaataacattaccttactgtggaggaaggattgtaaaaaaaaatgcctttgagacagtttcttagctttttaattgttgtttctttctagtggtctttgtaagagtgtagaagcattccttctttgataatgttaaatttgtaagtttcaggtgacatgtgaaaccttttttaagatttttctcaaagttttgaaaagctattagccaggatcatggtgtaataagacataacgtttttcctttaaaaaaatttaagtgcgtgtgtagagttaagaagctgttgtacatttatgatttaataaaataattctaaaggaaattgtgtaattatagactttttattttaaataagttaaggagtgggtagtataattaaggtccgttgcaaagctgttgttatatttgtataagataaatgctggtcagatgtaagtgtgttgtctgcaattcatcaggattaaattatgtagataacttaagggatatctctgcaaggagaaacacctttttagatcttttagatgctgcttcttcaatgcaaggaaaggaaataaccccagcgaggtactcttcagggacacaggtctagtacaagagaactcttgacggctactaagttcagccagtcttaaaaaactgtgctgtttctacaaaactttaactacagtagtttataaggatgccaacgaaagctgagggtgtagagcaaaatagttctaagcttcagttaaacttctttaggtaagatcttatttacttttcctttcttaattttcctccctaaaagataaactaatactcttaaatggtctttcagtatagtggttcttacgtagtttaacatagctataaattgagtttaacaatttataaactcaagagaataatttttataaaccctgttttccaatctgtcatttacttaaattattttggttgtttttccctttttttccttcttttcccaccccctccccctccatgtgaagatttgggtgcttaacatatcatttttttccctgccggaattttagcattgatatgaaccatggacaagtatattctgctgccacaaagactgtaaagtgcttcatttcaacagctgaggcaagccaagtgatcattaataaagcttttcttggttccttcagtggtgttggtagtaaaatggtaggtaaaagttaggctgcaagttcaataaatcatgagatttcccatcgttacacccttgtgtattcacatttcttggatcaaacattttgagtgaactaggggtttttattaaagacatttgttgtatttatggttgtaactgtacatgcttatcaggatgagactgaaagaaggtagggcaaaaatggttgaatctattttcagatagtagttcatacttgagtgaagtgtcttgtctgcattatgaagcctggtatgtatccagtactaaataggtgggttaaatgtggtaattctagttcagtgtcttaccctgaagagaaagttgtaggttggctgttgaaattcattccttagatatgatcagtttgattgcccggctttattgcctttacaggaatgtgatactcagggcttactctatacaccaatgagtcttctttgatcctaagaccaccactgaagttgtttaggttcttttggacaaacatgataaacttcttcagatactttttttttcctttggcaggaaggtgtcttgctgcaggtaactaatgaagaagtggtcaaccacagagtcttcaagaaataagaaattctgtaccatctgaaagtagttcttgttggtgccttcatttaaaaagcactctttaaaataaaagggaaatgttttctgataaaacaaacatttagttgaggttcttgatataaaacaattacaaaatgagtgttgtttgtaaaacagtaacatcaaattggctagagagataaatgtatcatgttttaaattaggttttgtgagtagacagattacaattctattttaaatataaagtttataaaataaatactttttgtatccaaatacttggtgtaatgtttacacataaaatgtgtgaatcttgttctataaatatttggttgtctaaaagatcaccatcccctaaatttttaaaagcagtttcacaaagctatgcatattttaatattaacaggtaaatgagaagagcattgtggacattattggctgtccccaataaaatgctgttcattatgcactgtatattcagcgtttgagtactcctaaagtttctggctttacttttacgtttagcaatactggtggcattttgaaaatcatggattttaaaggttaaccggctggagtggtccagattaag

SEQ ID NO: 15569 - DNA, 1429 bp, Homo sapiens
gttcctttggagaggaaaaaggtactctgccagcaggtcacctcatatttaagaatttaatttcctgcatacaaagaggaaaatgtaaataaaaattgaaatggtattttcctttgcagagagaaaaggaacagttccgtaagctctttattggtggcttaagctttgaaaccacagaagaaagtttgaggaactactacgaacaatggggaaagcttacagactgtgtggtatgtaaattactgaattgttactggatattagtcttttagctgtatgttaagtgaatcatggaggaaataactatcagcatagtaaaaaattctattatgacttcacttataagctataatgagattaaatgctaaagtttaccctttggtttgaaaggtaatgagggatcctgcaagcaaaagatcaagaggatttggttttgtaactttttcatccatggctgaggttgatgctgccatggctgcaagacctcattcaattgatgggagagtagttgagccaaaacgtgctgtagcaagagaggtaagcaaacaatgactgtcttgtgcattaacatgaagaacgctgccctgctgaaaatcagaaactatttctgaatttagttttaactcaagattttttctcttattaaaggtgtgttgggtttctggaccattttcttaagctagcttatttttcaaaagctaggtccctaaaagctattttatatctggtagttttaaggtggatacaagcgaagtatggtactacggttgggtgctttgaattatgcttgtgtttttttctgtttggatgacttttaccccaccactattttaggaatctggaaaaccaggggctcatgtaactgtgaagaagctgtttgttggcggaattaaagaagatactgaggaacatcaccttagagattactttgaggaatatggaaaaattgataccattgagataattactgataggcagtctggaaagaaaagaggctttggctttgttacttttgatgaccatgatcctgtggataaaatcgtatgtaagtgtctaaccacaaatgtactgtttttttccagtgtattcaattttgtgtatgttaacatctgtaactttattgaaaggtaaacttttgaagctgcttaatattgttgatttaatttaaaaggagtctgaatttttcattccagtgcagaaataccataccatcaatggtcataatgcagaagtaagaaaggctttgtctagacaagaaatgcaggaagttcagagttctaggagtggaagaggaggtaattttaattctgtttcttctttatttttgttcatatataagggcttgcttctaactggggcatttattgtaggcaactttggctttggggattcacgtggtggcggtggaaatttcggaccaggaccagga

SEQ ID NO: 15570 - DNA, 1247 bp, Homo sapiens
ctcctctgttactcaggctttgagtgtgttgtgaaaaccaatttcctctttttattattttccccctctcttcttttccagttcatcctctgggcttggacacagtagtgatgacagcagttcacatggatgtaaagtaaatacagctccgcaggaatcctgaaaaataattctaatgttactatcttaggaatagcaaattatgtccagtcatagagaagaaagcttcataataatacattcttacctaaagctcactgtcatgatgttaggtatttaaattcttaaagatgttgggttgtttattagtggtatttttatgttgtcttattttaggtaagcttctgtgtaaagctaaaaatcctgtgaatacaatactatcctttacaggcagacattattggtaaacaagatcttgccctccaatgaaatgacttacatgttttaaaaaaccgagttggttttattgaatttaaaaagataggtaactaagtagcatttaaaatcaagatagagcattccttcttgtatcagtggggcagtgttaccataaacacggtgtatatgttgttaaaccctatgaagagtaacagtgtagaccagactgcctctctcagatatgtgcctgatattttgtggatacctcccctgcactggcaaaacactatgcttttgggtgttagactgaaatattttaagagtatttaacctttccagtattctgtttcacgcttagatggaaatgtatcttatgaatagagacatattaaaataatgtttacatcttagaaaaaacatagatagtgctagtaatattacttataactgtaatatatagattcagaaatacattttcattatccaaaatcagcttcaacaaatggtttctggagacaaataatttgttttcattatcattgtataatcaggttaatgatttattttttgactaaatgtgcaatttcttatcactagataactttcagtatcagtggtggttacttattacttaaatcagaggaaggattttataaagattaataaatttaattttaccaataaatattcccataatttagaaaaggatgtcgacttgctaatttcagaaataattattcatttttaaaaagccccttttaaagcatctacttgaagattggtataattttcataaaatgtctttttttttagtgtcccaaagatatcttagataaactattttgaagttcagatttcagatgaggcaa

SEQ ID NO: 15571 - DNA, 1224 bp, Homo sapiens
taatttttaaaataagaatttttaaaataaaaactttatggaatttactttggaaatgaatagattatttagagaaagttcttttgatagtaaccagctgttttcccaaacttcctccttttcagtaaaataccactttttatggcctttctgaagagttgaattgacaaaatgttgagtaaaaatacatttttccttggctaaaagtgtaatttttttaagcaggaaaaatcaagtttcagctgaatcaaaaattaaaatgcagctttccctttctcctgcagaaaaggaaaattcttctgcttgtctgcaaatgctttggatttagaagcgtcatgaaagcacgagtgacagctcctaacctctccttgttttattaaacattacttatctttgactgttattttatgcagtcgctcattaaaatattcctctgatgtgaaattaaatgaaggatattaatgtaaattagatgcaaccagttaagttatacctgttgctattttgcaaagaaataattatagtttttatttacccatttgatttgtgtgaagaattcatcactattttatacgtaacatatagtctactatagcatagtatgctactattgctacttctggtgtgatttgtaatgtttcttaatcattggacatcaattatttttagagagtaatgtataatttcatagcattttaaatttagtgtatcatgcgagttttttttggtagatgctgaagaatgtggttgctaaacaaagaatgctaaagaatgttcaaactttatagataactttattgttattatttattttcacacatttaattcctattaagtacagccgcaagaaagaaaaaatgatgaagttgcaaatggcagtgtgctgtcacctgcaacagaagtgcgtaccagaagtatgactcatgcaaagcattttaccgtacaaatatcctggtgcgatgatgggcctggcaacattttctactgtacttttgtttaaatttaatgaaacaaaaaattcctaagaaataccaccctaccactaacaaaatggtataaagaatctcccagccaggccaacatggtgaaaccctgtctctactaaaaattagccaagtgtggtaatgttcacctgcagtcccagctacttgggaggccaaggcacgagaattgcttgaacaaggtaggcagaggttgcagtgagccaagatcgcgccactgcac

SEQ ID NO: 15572 - DNA, 1181 bp, Homo sapiens
cagaatgaaaattcattcccctgaaatatttaggtgtctatattctatattttgatctattaagggattagtatttttccatgtttattgtgttatcagagtgcattagaaagattagtgattcatcttcacagcacatttttaatcaagcagttatttcaaccagcacattcgttttgttcatattcactatagaatgatatcttgtaaataaagacattcagcacactgtgaaaatgtatttgtgcacctgctttttaaatatttctactaaaaatgaaaaaaaaaaacccttagacctgtagatagtgatatcgtaatattaattgttaataaaatagtcactgccattaaaatctgcagaaaatactctttactttcctatgctaaatgtgcactgcacagaaagaaaaggagcaggtttatcttatataaaccaaggaccattctttattattattcagtacttcttttgctaccaaatttttaagaaaagggagaaatccctcataactaaaatcctaaaaaatgataagtgcttcaaggagattaaagtgtcaggtattacaaaagggagagaaaagaaaggaggaagagatagtatgaattcccaggctccctgtggaaaatgaaaaccagttgttttgtagcagcaatgcctaggctgtcgtattttaaaatctgctgttgggtctgcatgtgtctgagagggcaggttttgatatttgttgaaatgacaggactacgaaaggccttaaaccttgaccttgacgaaaaaaaagacaatttgtgaccttgacttttgacagctcatgaattggccttagctggattagtagatcaagggcgccacctcgcgttgacaagcctccttgtaattcttcaaccaagggaatcaagagctcttacctccttgactttagagattcagtactcaattatttggctccagctggagcaaatttgaatatatgtaaattatacatgtccctgtatatatgtaaatatatataatatgtgtacacatgtatacatttgcatattagtgcttgtgtgtgcttgtatatatatttgtagaatctgtacagatatcatatcattaattgctaatgacgcaagatattgtaatttaaggtgatttctagaattgaggtacaaaatgtactttacaagatgaagcc

SEQ ID NO: 15573 - DNA, 1214 bp, Homo sapiens
tatgaaagcgcttatttaaaaatgttaacttaccatagtatttataagtatcttattttttcagattacatttttccttctttcaaaccaaaacataaggaaccacagttccaaagagcctttaccaccagtctcagcgtgttctctcctcctgtttgatttaggatctgggattggcacaagactctgctaccagcacaaagagcccaatccttcttggcagtctggcccatcagatctacaggatgatgtgtgcaaagggctactcaaagaaagacttctcatccgtgttccagttcctacgagaggaggagaccttctgagtgtgccctttggccacggacactgttgggaaccaaactctgtcttggagcctccttttagctcactccacaagtaaatggatttaatcaaaggtcacctatctgcttttgattgtctaggtcacagtaatccctaggatttttcaccgcttattctttttgtctttttaacaaacatattatccgaattttttttctgcaagccactgatagtctctgctaactagcttaattgacctttttacaaagtttgatccccaagcatcctcaactaaatcattgaatacttcaatcaggatattatctgctttactttacaaataaaaccaaatcttttgtcaacaggatgaaacccatcttaaaggaaagaaaaggaattggtgtgaagagagaagttagagaagggaaatgcagtgaattactatctgtgtccatcaggaagtttgtcctgttaaccaaatggttactgcactaccagggttactggtttattttccagggagctgataaagcaggagaactgttgctgcatgttttctatttggactccgtcacaatatggtaggatatccctcaccaactcccgacactcagcagacttgtttttatatttttttctttcttgttcattcttactacgtattttttgacttaagaatgacatctttagatgcatttcagagccaatgatgatatttgctttagataattattatattattataaatatagccatattattttgaattcaaataaatttctatactggtaatactttcttggtgtttttgtttcttccccatcatttggtgaactaatgttctgacaaactgatgttcacactaatggggaaaggatgggaataaagagaaaggaggggaggtcaaaagg

SEQ ID NO: 15574 - DNA, 1205 bp, Homo sapiens
ttttcttaagctcgtttacagctcctggctcatctcttgcatttattctcataaaaactaaaggaataaacatacatataaatgcattcacacagactcccatgatgcatcgtttatctgtcagtatttctttctgaaatatatcatttgtgggtaaagaatgtagaatttaaattatcatattgttttaaggttcttatgtgacatataaatgtagtaatgtccaaagactagaaaacccatgagtgtgataaaccaacaatatttttatgcaattgtatattattttttcttaataataggataacatagaaggttttctccaaatgcaaaatggtcctggctcaaaaatattcttatttaaccagtagtgtttagtactctataattcaaaattggattcttcactctcgtatcaacctgcttagattttagaagacatataataaatggagagagaagatggagcatccccatacataaataagtcacgcacgacgtgtacattttgacacttaacacttcttttctttgacctttgacaggttagggcttgacccaaaactactggctaaaatcctaaatatgagctcaggacggtgttggtcaagtgacacttataatcctgtacctggagtgatggatggcgttccctcggctaataactatcagggtggatttggaacaacactcatggctaaggtatggtaaatgtagacacccaagagagaaggaaaaacgtttcacggtccaataacaccttccttctctttctcttaataaagcatatgtctcaggtaagaggcaaaattactagaatattcactctcactgaaaatgagtaaaaacctaacttagatgaaaatccttatcttgttcatttttattcctggccttttggttgagaagaatgggccagaccatgtgtgtgtgtgtatgtgtgtgcgtgtgtgtgtgtgtgcgcacttgggtttatttatatgagccggtaaaatttcgttcaccattaatttatgttaatttaccaacttcttaaatgagaacagtgagaattttctcattgttaataatacactggcagtgcatatatgcatcacgaagagaggattttcccattgataatagatttccaaatacatcttcctgctttaagattttaatatatggatttatatataaaaactagttaagtcattggaaaagca

SEQ ID NO: 15575 - DNA, 1206 bp, Homo sapiens
ccttcttatatatttacccttcgccccggatctccttctttctctttcttgtctgtttaaatcctgccttggcctcctaaaggatgatttcaggttccacttcctctctgttcctgccttcagtggtcttgttgctctgaactcctatctcttatagcctctaccttacaattcaccacttgtttttgttgccttttcatacagcatattactcccatttccaattagattgtaagttccatcccttaaagagcagttgtgccctatagtgctgagcccgtagtagctatgtggaaaataaattttcacataggcaaatttattacctagtggaggagacccgcaagtctgctctgggatagcatgtgaggttcagagggagccatgctgcatcaggttctcttccgcactcgagaaaatcaacagttgaatgttatttcttttagaaagcagcccctggaattgggcaaggaaaaacgtcctgtgagttttaccttgaaaatacagatatttaatatgtactcaatttattttcaggcggcaaagatctgcaacaacatgctgttagctattagtatgattggaactgctgaagctatgaatcttggaatcaggtttgttgaatagtacgtttttatactaacatttttataggctttcctatttgattttctgatgttaaaaaaatgatattcatgagagataaatgagttgatccaagaacattttgaaagtacttcattattgaactttaatagactttgcttattggacaagcaataggacccaggagagcatgaatactctttgccatagccataaaatgtattgcctgtgcatttgaagttgtgcatttgaagctatattatcctttttatgtgggacccccatttcttctattatgttgaaatacaagaaacacttttctgtaaaatttaaacatactttggcaatgttgggacaaatttgtataagacatggttttagtgtgtagtgaattcaagtggtatgctaccatgtgactagtttatgtaccttttaaaaatatagtcccccaaatctgcactaaaagtgttcttggtggttcattctcaggctaaaaactggatagcattcataaagatgcaattcatatgcataactctttcattttattttgcctgtggtttagttactttgcattcgtatgtatctttctattaaagt

SEQ ID NO: 15576 - DNA, 1203 bp, Homo sapiens
gcttgatattttattttgtcattaaagttacaattataaaataatatgccatcccaacacaaatggctagattttaattgcttatgtttattcttcattgtggaaataacacggatatatgaaatttgcagtatggcttgttaaagacaaataaattactttttaaagatccagctactttacagacaaaaatttaagtcctatctaatacccttttaaagttaataggtgttttaaattgcttacatcttagcttcatgtttattattatggttagtgtgtagttcatctgaaatcagaatttataccatgtagtatattaggttttattaggttttttttggatcttttgaaagagtttgggtttacttttgaagtacaattggtctcaaaaagaatgagatttttaaacgtgttctaattaataatgtttttaatactaaactaaaatcctccttgatatatggcagcttttcagcagattctaattctgtaggtagttgcatgaaatttttactcagagttgtaaactacaaatatttttatttatttacttagaaaagtgaagaagggctcattattaatagattccagcactattgatcctgcagtttcaaaagaattggccaaagaagttgagaaaatgggagcagttttcatggatgcccctgtttctggtggtaagtggtagctaaaatatatgcaaacctatttatgtttgtcaaaagtagcaattatggttttgttgtaccatatggttttgtagtagttatttttagacttgttacaggattctcattaaaaataaagccaaactgatacgttatttagtactctcaagtctaaataactaacattgttagtcttaaattcagataaaaaagtgtcataactttgaagtgttgtgaatttttggtccatttactgtggataggaatacatcagtttttagaaaattttttttggaactattgaaaaaaaaatcagcttaaataatcctgtaactgttaaagaaattgaacaagtgggaaaaaaagaaaaacaattgtttcacaagggaagcattggctcagatcattttacagatgaatattaccaaaatttcaaggagcagatcatctaaattttatacgaacttttccagagaacaggaaaagaggaaatacttcccaattcattctgtaagacctttataactctgat

SEQ ID NO: 15577 - DNA, 1126 bp, Homo sapiens
ataatgtgcctttgcaattttttttaaaggtagtatcttccccagcagatgttgctgaaaaagctgacagaattattacaatgctgcccaccagtatcaatgcaatagaagcttattccggagcaaatgggattctaaagtatgtatttctcacctgtggatattttcttgttatgatagttcatgaatttcacatgttagaactattaggaaattacaattgtgtttgttaaacctttctatactgtttttatttcataaagtgaatagtgtggtggttttctcattgtaaaaggcttattttttcactgaagtcaagtatgtgacaatgtgtataaaattttttggttccgtttctttcctttaactcttgcgttaaacttaccctttcactagtaacatgtttaagagacttttaaagcttacatttgaaactgcaactgttaataatataattttcttacagcttatagaaattcaggaaaagggttttatgaaaaatatagccaaacattggaaagaacaccatcgtttaacattttattatacgaaaaaaagttatgtcctgtgggttagtacgtttgtagtaagaactttgggaagttggaattaaaggttagcagtagctctttaacccatttatgtcagaggttgcaaatttttttgtgaaaaatcagaccttggcaatgaccttgagtagtaggatgtactgcttgagcagtaggatgtaaataactcccacaaacttagcataaatggaacactaggcataaatgggttaagtaaaatacagtttaggtcagtttcctaatcagtgcctgtcttccctggctctgagaaaccttttggttaattgctgcttattgccaaacccttgcggttatgttaggatgatagtgattgaattcccagcttagttttgtcatgtcactgtttctattcctaacttattttgttgttgaatttcagcaaagagctagagcaaactggtagacactgtagtcacaagaagggctaaaagaaagggtgtaatttcaggaaactgtaatatgtgaaatttgaagtttctggtaattgaattgtgttggaaaactaaccaacttggaaggaagcaaaagacacttgg

SEQ ID NO: 15578 - DNA, 1172 bp, Homo sapiens
ataatatggaatacttcacattataagtaaattacatattaggtgttttataaatgataacattatttagtttattgttaaaaatggtaaaagaatgttatacaggtacaaaacaggaaaaatgcttaaaattttgtgaatgtgccccagaaaactaaataattagaagttagtctgcctgcacattgttgataactttaaatgtggttaggtccattagtttaaaatttgccttttaaaagttagtgggttttttttttaataaatattattatttatttttgagatgggatctcactgtgttgcctaggctgttctaaaactcctgggctcgagcagtcctcctacctcagcctcccaagtagctgggattataggtgtgcaccactgcacctggttcctgaaagtttcttttattaaaaaaaaaaaatctaacaattgacttgctaatattaaatgaatgtttacaataaaaaatgttatttgcccctattgaaaataatgtattgaaatcagtgtgttctaggtcagtggcttcaaagactccagttggattcattggactgggcaacatggggaatccaatggcaaaaaatctcatgaaacatggctatccacttattatttatgatgtgttccctgatgcctgcaaagagtttcaagatgcaggtgaacaggtaagaccttttctttagatttgttttagattttgagaatgaaaaatgaatatacattcaaataagtgacagcttcttagaagtatacccaatggagttgtaaacctaattcagtgttaattttatatatatgtaatcattcatccaacatccagatttgcagtaaaggagagttctcgttagacattcaggggtatctattctttggcaggtgacttggaacattttgcacatttggtcagagggccttgttttagctctgtatcagttttctgagatagtaactttactgattgtgctgttaaagtagttagtttggtggaaataacctcctgtgttattaaaagcacatatgtctttaaaacaagagtaggcttagagatataaagcttagtttgagttgaagctcagatacatgctttcttactgggggcaagttacatcacttctgctgatttcctcattcttaaaatgtgaacgatgacaacctatgcc

SEQ ID NO: 15579 - DNA, 1100 bp, Homo sapiens
ggagaaagaggaaaaggaaaaagtattccaatatagtttctaagctttagtcacagtgtagtctgagattgaattctgttaacagaagtacgaaagtaggcttgggacattaaccatcaatttaaaaggcagatttggaacttgggaaagagaaagtggtacacgagttaatatttgtgatttattcccgggggcgtgatatttgaaggtttggaagaaggtgagttttcagagagaatattgagagaagaggccaaagaagaaactttggagaatactcatatttggactgggaagaaaaaaaacacaaaaaaagggcatgggatgatgaaaatattcatgcaatttcacataaaccaaaggaatagttttaagaataaggcaagttggtcaataaatgacaagtaattcagagaagtcaaagaattagctgaggaaaatacgtggatttagtaataggaattattttcgtaaaacagtataaaccagatctcaaagttgcaaggagggagtaggtaaatgaaaaaaaataaagaaatttctttctttattcagcttcaattggcagagaaagacaaagaaataagtggtctgatttcacatttggaaaacctctccagggagaaggtattgagcaatgtagttaaacaaatgtgtatcacatgaaactgaataataatagagctttatgaagagacacattttgaagttcatgtgacagtacaatgttcaaatttaggaaaacagtgaaatttctaaaaattacgtgaaatgtttatctggttttcttttgtaataggaaacatttttgaagttgtttaatgacttacagcaaaacctcacattcacatagagcaatacatttgtaatgtaaaagatactatagtgcagcatttctgaaagtgtggtctgtggtccttttggtggttcccaatcccctttcaggggcctgcaaagaaacaattttcataataatactacaacattatttgattttctccctgctgtgacatttgcactgtgtgaaagcagtgtggaaaactgcttgtgtattattatgaattaaggcagtggcaccaaactgcattagtagttattgt

SEQ ID NO: 15580 - DNA, 1177 bp, Homo sapiens
agaaatgtttctggagtaaagacttttaaggtaggttgtttagtatgaatatcagctaactagataaatggaaccttgtcatatatggacaagttgttgttctacatttattagaaacatgtaattctttcatttttctctttaagctttgatgttcacaagaagtgtcccctctgtgagttaatgtttcctcctaactatgatcagagcaaatttgaagaacatgttgaaagtcactggaaggtgtgcccgatgtgcagcgagcagttccctcctgactatgaccagcaggtgtttgaaaggcatgtgcagacccattttgatcagaatgttctaaattttgactagttactttttattatgagttaatatagtttagcagtaaaaaaaaaaaaaaaaaccacacctaaaatagaccactgaggagaccatagagcggatgctttcatgcaccctttactgcactttctgaccaggagctactttgagtttggtgttactaggatcagggtcagtctttggcttatcaataaattttaatctctgttaatcttacctgctttaaaaaaaagttcttgtgtgttcgtatctttatttattccctagtttgcagaactgtctgaataaaggatacaaggattatttcaatgttactgcactgaaaaacgtgtatgtattagtgtgctagattatttagcagaatattcacaagtttctgttgaccttgttgattgagcatgactactaaatattatgtaataaaaagcatttgtcataacagtcttatgaagtagttcttcgaatatagaaagttctataatttagcccatgaaatgataggtttttaattttcagaaatggagctgcatgtagaatgagatcacatgcttttatatgtgaaatattggttttagcaattaacagaaggcatactttgctaattttatggcaaaattttagaataacctgaatgattatttttaaactatcttgaagttgtatgtatatatctaatgggaaaatggaacaagagatgtcagtataattgttttcctattaaatgatctcataacaggggtgtttgtggcataaaaatcatagaatatatatcagtatcttttttacattttcctgatgagaatataaatttgaaatattctcagtaagtgattaaaag

SEQ ID NO: 15581 - DNA, 1197 bp, Homo sapiens
tactaactccattatgtaaggcatggtaaccagtttgataatgaaggtattattttggttttgaacatatgtgagttgatgtgttgaaaacttcaatcacattacaatcttgaaaaaaaaatctcagtgccagcccctcctccccccaggttgataccaccgcaatacaattcaacaatatgcaacatgccctcaattttattttgttttgggggaaatgtgctgaagaacctagagctttttttgtttagcaccttatatcaaagtaatgaaaatgggtatgatgattacatgtgcaaatgtacaaaatcattaactctacaaagatacatcattccaaaattacagaaaaaatttaaagcatgcatttaattctttttctttaaagggttgctgaatgcttcccctgaaaaaaggtggctgttttcaaaatcagcaactgctggtgaggatttcttggcacagttatgaccagcatgttattgctgcatcttcctgataatctcagccgacaccgggggatggaaattgattgtgtggtgccgcaggccctgagctgtcttgtaactcttcccacagcgacacttgaatggtttgcggacacgaatctgtgttctgtgaccattcttagcgtgatactttatgccattcacattctgtggagaagacaaaaatatttattacatggattcacaggatacctgtcaaacttcggaaacctcaatttgggtctggattgcagttcctggatggcagctgtttagagtgtagtcttttgcaaggactccagttgggacccttcaaggacattctggtgtgtcggtcatgggctgtacggatggtcacacacacagctgactcaaaatttcagatgtgcctcaattactctgaaaatgaaagtactgatttcttccaattttatataaaatatatatttaggacttacagactgtataaagaaaatcctctgaatcttttccactctaaagaaagttaacagtgaacaatcctacacaaatatcctcagcatgaccaacaaaatatctttctaaagaaaaacatcagggcatatcccaaaagtttaacatatagaaatttttgatttggaaactcaatttacagcttgcttctagataactgtgttaacagttccctaccatgccttaaccagagtttttgtcagttttctgctctgca

SEQ ID NO: 15582 - DNA, 1110 bp, Homo sapiens
attatgaccatatttatgatctgatgtcactgtggtcaagataaccagtgtcaaattaagtttcaaatgaatcaaggacttagcaagcccatttctagaattccaccctaaaaatagtgcacagcctttttttttaatagcaaaaaatgggattcacctaaatatccattaatatggggagtgcttaagtaaagtatattcactataggaaacactatgcagccattaaaaagaataatactgtctgttttatgttgttaagtaaagtaagtcacttatagaacagtttatagagcatgatgtggtttttggggaaaaccaaccaattacaatatacatttataggtagacagagaaggtttggaagaaagtatactaaattgtttatggtaaaaatcaggaaaagtggagatggagggaggtaaagtttttttactctctgtatgtgtgtattttaaaattattttctcatatttacttaatacatactttttatattctagggatagtttagctcactatcaggtaaatgccctgttgtaagtaaataaatgagcttctgtggtccaggaggagtggggagaagcttctggtattaagggatgctggggcatagtaatgatgagaggggttatcactgagggagaactttacattcttcattttggaaaatgctgccaacagccctgtggggtagatgctgttacacttactttatacccgaggatgcacaggtttggagagatgtgttgatttgccgggtcataaatttgcagtgagtgtagtaaggctttgaacccaggtcagcttggctctagcgacatgcccataacctcttcccttttgcctgcttggtttctgaggacagttctttaaaagtggatttgatttcctgggacgtgtgtcctttacctcttcatttctttcaagaaaatgaggacacaattcaggagtagttgttattgtcgttaatggttgacattttttataaatgcttagactagtcattaagaagtctcattctgtgctcatgggattcacagtggattctccagtgagtggaagtctttgtcctaaaatgaggcagtgtataataatgtcagttaattt

SEQ ID NO: 15583 - DNA, 1180 bp, Homo sapiens
tgagaccctgtatctacaaaaaaaaacaaaaaccaaaaaccaaaaaacaaaacaaaaaacccacaaaaattagccggtagtcccagctactagggagactgacatgggaggattgcttgagcctgggaggtagaggttgcagtgagccaaaaccgtgccactgcactctagcctgggcaacagagcaagaacctatctcaataaataaataaataagaaatcacgtatataaagcacacagcaaagcataggataaacacgcaataagcctttatctgagagtgaaatgtattttaaagtttgatactgaaagttatgtgtgtgtctctttgcatttgtctcatcccttcccttcccttcactgttgactacaagagacattggaaatcattgaaaaatccattccctagttaatgttccccggcttgccttttatactatctgtcggatccaatccatcatgtatgtaatcatattttacattggctgctctatgaataagaaatgagtggagggtgttttgttttctacctcttccctatcatgagggactaggtacaggatgcagatttcagctctacagctgaagggcgcagatagtaaatcattttacatgcctaggatggaagacaagctccttggggattctgtgatggtggtggaagaggggccttcttcctgatcagcactttgggtgccagcctgctctggtcaatgggaaagaatggaaaccttagaattcaaccatatctgcctgggcctggggtgggatgaactaaaaaaccagagcctcaaggtggcttgggtaaagtgcctactggaatttacactttctcacaagcatcagagagatgttaggacacaaaaaactcttttgtgctgcagaagattttgcaatctttgggtgccaggaaaggtttcagtttccttagctgtaaaatagagatcaaagcccccttgcttgcttcactggatcatgtggagaacaaaatataagcatgaaagtgaaaacacctcgcacatctagggagagcttgcagtattgctatgaaaagtggtagcataaattaacagcatgaagcatttatgtatcatttctccaacaacccacttttcagcaatgatttcctcacatttgcattttggtgctgttttgttgtttagatacgaattaatgcta

SEQ ID NO: 15584 - DNA, 1147 bp, Homo sapiens
tgacaattcttgcctgtttttccaagccattctgtttcctcaaacccaatcctccccttggactctggctttttagaagacaaaagccagaaatgctcccagggtccttctgcatctcatcctgccgctcacctccctaaagcaagtacacgggtcagctatacctgctcaaaagggcaatgaagaaggaaaacgtcagtaactctgactaaaggcagaaacgtgctttcttggagtgagacagagaatgcacagaagaacatgattataagcagggagtgggtaaagagaacagggaaggagggaggcttactggccctcttatgcttttgagctgggtctcaaaggctgggcgggatttcatttgacagagcacaccgaacagaaaggcaggagcagaaagaaaatagaagtggtgtttgcatgaaggtaaatcatctcatctgactagacacatttgagcagtgagaaaataaaccaaaaaaagtaggctggagtcagtttgtggcaggccttcagagcccagggtgttttgacatcaacttaagtagttggcagccattgagtcagagagtgagttgattagactgctgtgttagaaaatgaaatagcaacgctgtctaggatggattaatggctgggactgttgaaagactagagcagggagacctttcagtaggttgtgcaatcatctagaaactggaaggaaaaggaggaacgagctgcaaaagatactgctgaagaagagtaaacagactttggccactgggtgaatataaaagaaggacaagagaaagctgttgatggtaagaatgtggatgttctcacagaccagggaaaacgaagggaagctgctggtttgcgggaggatgaacaggctggtcatgttgaatctgagtttccatcaggacagctggagctatgggcagggagctcagaagagaaggcaggactttccctgtgataggaagagaacagggtcatgatgctgtgggagtatgtggtggtaaaagaggaaaattgagggatatggtgttggttgctttgatcttctcagtaaggtaggagacaaggccattcgctgagataagggaagccacactgtgtcatcttggagtttgagagtggacatggtttgaaacagctg

SEQ ID NO: 15585 - DNA, 1194 bp, Homo sapiens
ttttaggtggggcggctattctaaaagtgtctttctatcactgttaagggggggggaaagtgaggttcgaggatgacgtaggtaactctcccctcccaagtccatgttccaagtggctatgtaaagcaagatgatacagaaagctgctctaaaatctcactgagtgatttcaccttcgcctactatgaaatgtctcatcagacctgacatgtctgagataaccaaggtgattcaggatttgatcaaaagaagtctagtaagaattaattacacagaagcctcctttcatttctatgggccaaacaaaggccatggataaccctacccgctttatgtcattacccattgggaaacacaatggctacttctgttagggtacattgaccttggtcaagcatcttaaagaaggcaaccctaattgagagctgtcttggctaatactctgcaccacaattgtgatgtcctagtcctaccactagagggcatggtacagcctggcaaaagttaaaaggggtgtggcagctcccatcaggtctggaggtggtctataagcacagttgacagttgtgcattgggatgggtggagaaagacgacaagagagcagagaatctgctgatgtggctgcgcttacttttagtgactttatgtacttatattaacagctggaaataggttgttgggttttgagcaggctgttatagtgaggaatgttcatttttaaatgttcctaacagattttgcttttgaaaaatgcttgttacatgaataatttgtggaccagggattgcttttctgaaggcagtatagggaacatgaatattcaagatgaaatacaaaaattatgtttaagggtcatagtgtataagtagcttcctaggaaaccctttgtgtatcttttcagactggggtgggggctgagcatgcttgtgcagaaagaagccatagccagaaaggacagaatctctcccccactcccttgccccataaccaaacataagctagctagtcttgtctaatagatgggatttactataggtgaagatagccctcatattcaaggacagaagctctggcaggagtaaattagcaaagcagaaatagtaccctttcattcttggaggtgctttgaaattttaggtagaatataatcgaaattatggaggttccttagtgctcaataatataagacctgg

SEQ ID NO: 15586 - DNA, 1061 bp, Homo sapiens
aaggaaagctgctcagcatggccattttgcatttgtataggtagtgactagatgtacacaacttaatttgctgggaatgaggggcttaatattatctgagatcattgagaacccagatcagacagaatagcttgaataagttacattttccaattaccctttttccacatctgtagaaagagggtaatattttttaataggtattttccccactggagcatattacgtttgcctaagatgtataaaagtttgtttaagatgtgtaaaagtttgcttaaggaactgaggatccttaaataaaaatattagaaattagaaattgaacctaatactaaacagtaaattcagcttaacctgaaccttggcatagtcagagcttcctcctacatctaaagtatttgctctctgttttagttaaagtcataatttgcgctgatgtgtaatcactttccaagaagagggcaatgagaaaagatatttaaagctttctctccatagccctccaagacttctgggacaactaaatttactttcaccattactgtgagaggaggtgagaaaactctagtattttgttggcagagtaatcactttgttctcatcgctcaaagcatttttaggattatttttctagcgtaacctttagagagaactggaagaaaaaggaaattggtctactaggtattgtagacacaaataagtaacattaggctaaccccttatgagacatttccacacaatttcatcgtgcctgtacttttctctatggtaaaagccagtgtttacactttgtagggatcagggtgtatttgttgaattaaacaaaatattttcaatgatggcaagtctcttgacttttgaaagcaagtcagattccttatagctaatgctggtgaaaaatgttaaattggagagatcccttttgggagtgaaaccaaattgtaactatgaggagaagatggtcttctcattggctcttgatgtagctctgaagggagttccagaagaggagctctcacagaatgttgagcctgtgggcccaagacattgacttcgaaggg

SEQ ID NO: 15587 - DNA, 2178 bp, Homo sapiens
tactttccaaatatattaacaaaaagttgatgcttttaactttatattttcagaaaagtgtttttaattaaaaatatgtgatagggaccaaataagtaaagtacatttttctccactaaatttgaagtgagggaaagaggagccaaagtaagagatttttttttaaggaaacttaatctgattgtgaaaatcatacatatggagaaacatcagatcaggcaatagagtcagagggtcatgagcaatagacgatgatgcgaggcatttggggagcttcctggaggaaaattaagtttttttcctagcaaactaccatgtcctacaagaacttggttatataatggtgcgtctctgaatcactgattaaaaccagttgcttctgattttagtcacaggttttacaagtattcagctctccctcatgtttcatttctttttttaagataatctatcaaccttttttaaattttaaaatttttagatgtagagtttataagtaaaatatatttttagccattgttctgttagctgagctgatgtgtttggtcttagagggcctgacttcagatactctttgtgatcttgtaagggctctacacaaacttcattatgtatggtaaatttgtattcttatggattgtatatagaatgctttcgttagaagtacattctacttctgtatgtccctttgtaatccgcagttgcttactcaggggtttcatagtcatttcataaaaaataattcactagctgtctaatggtattttaagactgtttatctgtatcacaacgtcattaggagttctttcaacaattccataaatatactgtttactagaccttccctgtaaatgttcccaattcccatcctgtctcagacagtcaatagtcctgtgtacagtgactatttgcatgatttctcattgcactgctgcattcaggcactccagggcatgattaaacagtcattaacagtgcctctctggtacagttgatgcatgcattgatctttcttctctgctgtttttatatagcctttaattaaaaggaaaaaaataccactactctgcaatgcaaaagtcttcaaaattctttgtttcctgtattaatcacttctgttccagagtgaacaaatgttttcagctaagctatgtgagaatgtaagaataatatcctgcttgttctaaatagttcatatatttaaagtgtggtcagtatttcctccctgtaccttacaaacagaaaccaccctgggatggttgataccccttacaaagtcgatcttacccacacagactcctgtgtatgcgtgtctgtttataggtgtatatggagtcagtgttgataggaaggatgctctagaagtacttctgttgtttcctagaaggctatgagccagttccatggcatgtttaatgtataattcccatgtatcatgagaatttcactagaatgtcattaaacagcccaactacctcatgtgaaattggctgtggacaatctgtgtcagatgagaaatgtgttcagataaatttaatctggttaatagacttaacaaattaatgtctacataaagaagaaacatgatagaccagatgccaaaggctaaaatgtacatagatttccttggattaatttttaagtcactgtttaattccatgcctagtattcttatgaatgtttgtggtttcatagatttatgcactttgaatatctgtcacgtgcagtgttaatgttacctgttcttgtctctcagcattttgaatgagcatcataatcagagtagaaggcaagttaaactataaaagtgtcaagtggcttgttaacttcttaatttaatggacctttacttagaatataatatgttggagcctcttgggaccaaccgatgagcgacagtttcatgtttagatttgtattgtttctctgtccaagtccttattctctatcttgtggggaggggtgacaggggagggttttactttttttgcaaaaatgtttgaaaatatctgtcagattttatattcgttagttataataaacttatttttaaagtattaagttcttaaaggtttttgtgtggttttctgcctaattgaatatgtcaataaaaagtctcgtttatggaacacacatgacttgctgggcatcagtctaagccgtttacaaatataagaa

SEQ ID NO: 15588 - DNA, 1212 bp, Homo sapiens
tggctgctctaagcagggctgtgcatggtgcaaagctgcagtcagtgagcctggcagcctgtggtttctgttatggaaatggttccatggtgaaacacatccctgacccttcacagacttacacatttactcaccaggaggtggcagcggtgtgggaggaggagtgttgaccttggacgcaggagagacacctgggttctagttcaagtcggccaaggactgtgtgaccttgacaagtctaactggtctgtgaacaaggggcatttgcccttccagctgtaaacactgcccttctgtgcctgccttatgtgtgtgtgtgagtaaggagcaacagtcaaggaaacttttagggattcgagaagaaaatacatgtgggatcttgccaaggtgctgcctttaggatgctgacccctgcactaccttagaacatgttgatctgtgagtgcccaagcccctgagggctcgatctcatggggcagatgaaattctcttccttagaggaaagggaaaggtgaggccccagaggacttatctcagctgtacatgctctgcctgtggagacatggcttttctttgtgctgtggcagactggggctttggaagtggtgtatgtttaacttacctgagagtgagagatgtgtaggaagaatagctggaagaaagtgaaagatgagtgccagtacttttggcctgttatccagtagagagaaagtgacagtgaaagtaacgtgagagagaaagagtgtgtgtgtatatgtgagagagagaaagaaagagaaaggaatgcttgattgcttgttgttcactgggccagctctgaaatccaaaatcatgccttgataacattacaaaaccgtgatcctgggtttgagtgaatcctagagacattgttcttatggccgcctggtttccgcagcctgatcaccatatcgagcagacgtcaaggaatcagagtgaagtacggagccagggagggaggtgaggccccgtgtagtgcctgtcaccactgtggattcacctgcactcaggtgtccactcctgtctcccaggcccaaagcagcacatggtgcaatggaaaagtctcttatgtagggatcctccttgtgtcctggtgccagaattagatttccagtgtacttcaacgaaaacctctctcctttatagttgctgtcatctttcatgtataaacagaaaccgtctctagcacaatat

SEQ ID NO: 15589 - DNA, 1277 bp, Homo sapiens
tgtctgttatacaaattgttgtatactgatgttttataggttcatcaaggattgctttggaggatttatcagaggattaattagacatttagctatttagcctggtaaaacgcttgttgaacaaggttaaaacgtttcctgctaacttgtttcagaatgtattctgctatattgtgttattggaacatttgctgtcctgctattttaattttatttcagatatttttgtcctttattaagtcgctgtcatttttaagtgtatagattttacttaggtgtttcctctttggcctcttgagcaacttttcctttatagcagaaagtttacctattagaaaaccgtgataatttagagagaagttaggtcatctgcaactgatcctgcctgtggttatagaagttagttagcttgcattttctgggaaatttttcataacagataattctgtatttgccagactcagaacagatcctaccagtaaatgagataagttcatcttttcagtttagactccaggccttttgctgcgcttatgttttatatagtctaaagttctttgcttatggaagttgatttatttgcccccccttttttttactggcatgtttaaaacaattttacctttgaacggaatttgaaaaaaaatgcagtgcattcctgcaagcagtgcttataattgtggttataatcaccagtaattagaatttcctaatctgcctttaattgtgccattcttgcctctagaactgaggccaactgtatagttcatttccgtatttatttggatatttattaagtgttgactgtaggtctagctgggtgcttggacagagtgatcagatgtaacacgcagaataatatgcaatttctgccccacaggtatcaaatttgggagataagatctacacagaagtagtattacacatgatatgtcaaatgagtgttatcagtaaaaggaattcagtaggacagagaaggacattttgcttttgagttctctaaaagatttcattgagatggtgagacttgatctgggcttgaagggatgggagtaaatttttagtaaagtaggatgaaaatattggcttaatcaagagcaaaggcatggagatgtaatgggtatgttctattggaggaaaataattaaatggcaacaccaaatttgtattaggctcatagtgggaaatagtgggaaagccttgtacagggaatggtggcatggggttgcttgcatgcattcagtaatgcaaaagagggccaacagccaggatgctgt

SEQ ID NO: 15590 - DNA, 1171 bp, Homo sapiens
aagaattgctgcatccagttctgaaatcctcagatttccaaaagtctctttcagaatctatacaaaagttttgatattcctttgcattttcttgagttaagcaactttttaaaagtcccacatttggggtgatttcttgaacttacccaattttattattttataatttttaaaattataattttattttcatgtctttttagccacattacactgtaaaattctttgaactatcttggtcacactaaaggaaaataaattcatggtacaaataactagcttattgataaagttatagagcaaaatctgcccaatttgggtgattctgtactgtttttgcttactgtaatgcttcaataaaatagaaatgaaaacgtgagacaatggaagtaaaggtaaacattattcagtcatttatgaatagtatttcaaatacacgtgctgagttttatgtatttctggcgaaaagatatgccaagtaaggtggaatcacaactttttatcagttagcattcacgtaattcttttttcaatttgatggataattttattgtcctgaattcattttctctttcttcagaggatgtactgagtaaagatgctggggaatgtgcaatatgccttgaagaattgcagcagggagatactatagcacgactgccttgtctatgcatatatcataaagggtaagttcaccaagttggtattagagtaaaagattgttctcacagtttcagacattgtaattagggctgaaaaggaatcttcgttgaaaccaccccctccctgtctcacacacacttcttaaaacttaatgatcttttttctctatttgaactaagacttgaacccacatctgtttgtatccaaaaggctactatttttaaagcatttgctatgacccagctgttgtccatagcttcttgaataaattatctcatgtaagccttgtaaccattgcattttacaattgagaaaataagctaagggacagtatggaattgccccaaggttacaaggctagtaaatggcagagttgagattccagtagatttggaatctgcttgactccaaaacctgtctgctttctcatatggtcttcttgcttttagagtgatacaggaaaaatttggggttaaaaaaaaaaaagtttaaggtaaccacaaaaaga

SEQ ID NO: 15591 - DNA, 2739 bp, Homo sapiens
ataaattcttgtataccttttaatagtcctagattaaaggtatatgggtttgaggaggattcagtgttgttaaaacattttgtaaggcactgtgtagccataaagctcaacgtttctgatatccttcagcataagaatttaataatcaacccaaaatagagagacatgaatatttgtggtcttgattagttagaaaattgctgtacttattttggggtttttagttatttgggagaaatattttaaatctccgtgtgtgtgcattctttacttgcgtgtagtccttattgtgaaagggggatgactttgttatgtattttttgtgactaaactttaattgatccttctgtttcttaatctgttcttctccagatcactgattttatgagttttcagaatagtaagtaagggtatgaagacttacagtaactaaagcaatgttcatggggaaatctatttttacacaggttttcttgtcttgacaagatgcttgaaaaaccaagaggatatgaaaatctgtctctggagaaacaaagacgcaggcatactcagccagaaatctgagttttgtgagacttggtaatacagagatggacaatcgtactggggtaaaaaaaccctgctgaagagaggacagtgaccacagaactcagtgtaccaaacatgcatacaaaggacacacagggattttgaaaatgctgcacatcccttaatagtcatctacataggtaatactgataaacattttgtattcagacgccaaagttaactgatttaaaagttgatttactttttattaagttctccagagctgcacaactagttatgttttgatttgttttgttttttaatttggggtctctttgttttccccaacataatgttcataatgtttctgcattcatctgttcttaaattgaaaaacatataatttacttcttataaattgaagtcttaaatgtgaaaccaagaaatgtaatcaagcagtaaaaacatctgaatgtagaccatgatctcaagttcttccattttctcccccacgagtggaaaatagacttctacataggaaagctaaaatatgttaatatttttaaattaaaggtttaatatcagaatgcagtccaaagagcaaatcatattacataattacattttaattaaatatagaatattctactgaattgcaatttattaaatattcttatcctcttaaataaaactgctcaacagttaatcagcagtgaatcatcttgcagctatgcaatttaaaaaaaatacagattaccaatttcaagtgctgccagctaaaataactgttttaacgggtatcttttgtttgttcttttcacttaattattttattgtgctttgcatctccaggcagttctctcacatttgggtaaaatgtttagcaggctgtaaacttaagaaaagggtaaaataaaattttctggagaggaacttggaatttgagggagattttatatacctttaaaaactgtaatttaattgggatgccaggtttatagcaatttgcaactttaattttccagataatctggaggttagcatttgataaatgattttttaaagtagatatgaagattttgttaatttataatttattcatgtgttattactgtaattgaaaatgttatagacacttttaaattcagtttgtgtagaaagaaatgtgttaaacaaaattatgttaataaatattcccacataatacatctgaatggttaaaaatactggaagagttgtcagggctacaatagtgaatgtccttttttttaatatcaaaaatatcgataagtaggttttgtgttttcaacgtagggaaaatgttatcagtgaataggtggtgtactttacttggtataatttaaagttgcacagtaagtactgtttccttattttaatctttctttactcataatgtatttaagaatttgctgttttatttaacgctgctactcttaatcttctctaaatttttccccctactttcttgcttctgtttcacattttttaaaagggcaagtacaggagcaactgctgctacccagaaaaatgtgtgtattataaataattaaagagtttttaattgctttctgtatgattccagctcagataacattttccctgaagttatgctgtgaaatgccttttgttatgctgcaattgctaaaggaatccaaaacctccattgtgacagctgaaggcacagtttaataggtgcttttttactagttatgaaaaatattcgtcccttaaggaaacgattctttttctgtttttttctgttaccatgaagtcttaatttgatttcattttatttcacatttttgattttgtaagctttcataccctcctgctcaaccccctcaagtaaaacctcttagaatgtgaataattggttcattttctattgctggtatactcttgtgatgagaattattttgttgtcttccattcttaaaggaagagatttattacagctgtggggattaactgtattctcctggaagttgattttctgataggttaatgcaaaagtcattgcaaaaactgctattacttttgcgccaatttaatagttcacttgtttactttttaacctatattggcttaaattcactttttagcccctctttgtcataaggttctgtgctgcatttgctacaatagaagctcctatggttttaaagaaagttcagtgttttgtcagtgtca

SEQ ID NO: 15592 - DNA, 1703 bp, Homo sapiens
tagattgtgttttagagcaatgttgtgattgaaatataaataatggtataactttttttgtgttagcaaaaacaacattaaaaaggttatgttacataatatgtaggttttggtttcttagtgcaagacttatatttctcttaaatgttgtataattatttcagttttcactcactagctactttactaaaatgtagccccaaaatgacgggccagcctcagcgtatctgccatatgtatttcaaagattacagtcagaatgagttaatgaaaatggcaggttccttttcaaagtttatttgactcacagccatattgctaagtttgggtatagtgaagttaacaacaatcacttaaattaatatcttacagcaagatatactgatactgttttaaatgaaaaagactgtaaattcaatgtaaatattacctaactttatgtaccaagttaggagagtggaagaggggaatttttcaaaaaataagctgtatttgaacaaagcatgaaacttgttgttttaaaatttaagaataattgaatttaccatctaattggcatccgtactgtgcattgatagtaatatccaaatcatcttattcttccatagaggaagcgctcatataaatcacattgctgagaactatataaaactacatagaggtaaatggtgcttattaaatatgagtatagtttgttacttgctggaagtcttctagttcatttggaccattttcttaccctgaggtgaactcaatatctgttggcaatgggtggttaaatgtgaagtgcccttgttcagtgtcccttgttcttgtacaggtattttcttagtttaaaaaaaaaattctagcatgccaacatttgtctttggcctattcctttttttctgaagtgtgtaacttctgattttttctttgctatgttgtaaataacagtagctaaattctctgttttactatctacttttcttttcttcccagatcatttcattctaaaattaaattgcttggttttctttagaggaaattgctacatggtatacttgtagtagtgattcatattaaaaaaatagctggtaaatctttctaggtagtaacttatccaaacaatactttgagtatcatattttgtgaatgacttgcttaaactgggaaactgaatattctttttaaatcatataattcctgtattaaatgtgaaacacacagtctccaaagtcacctgattctctgtggaaaatgaaaggcattgaaggaaaccagatacattaatacttagttttggttgaaagtgcaacattactgtacttagaaggggcttggtttatttttagatatttaagctatcattaattttagaccaatggctaataataagagagatttttggttgctcatttatggagagacaaagaacagcatggcataaacaaacatcccagaaataaatgaaaagttttaagtgataaaattgtgttttctatgaaccagtgttgtacatgaaccaacattgtgtttcttagctctgacctgtacagtgaggtacctgtcaggacccctagtcttggcactggaaatgacaaagttctcctattactaaattctcatgccttccttttctgacttagtagattgaaattggtaggtactaatgatttatgtttgataaacttaagttctgctgatatcctgttactggtaat

SEQ ID NO: 15593 - DNA, 1229 bp, Homo sapiens
tatacccaaaggaaaaaattcaccatgtgagcagttatttgttaacttgcccgtgtgttcttctagattattaaatgaagagggcagagaccttgattcataatgatcactcacataataaacatttgaattgcatcattctttttttttttttttttttttttcattttgagacggagtctcactttgtcacccaggctggagtgtagtagcatgatcttagctcagtgcaacctccgccttccgggttcaagtgattctcctgcctcagcctcccaagtggctgggattacaggtgcccaccaccacggccggctaatttttgtattttcagtagcgatggtgtatcaccatgttggccaggatggtctgaaactcctgatctcagatggtgaggagggcctttcaaagtgctggtattacaggcgtgagccaccacgcttggcctgaattgcatcattcttacatagactttttaaaaggcacgcttaaaaacacattcctaacatttcttaacttctgaaaccaatcctgaatataaattctctttcttggctagggagatcttgtgcgaaaactcaaagaagataaagcaccccaagtagacgtagacaaagcagtggctgagctcaaagcccgcaagagggttctggaagcaaaggtgagtcctgggatgctaaaataggaacataagtaggtataggattgttcatctttaatttctttggatgggagagacctagaaaagtttctgaacaagtatcatttggtttatctgtttatccataatgccgccttctcctttccctctacctggtagactcctcatcctttcaaaatgcaactcaaaatgtcaactttttaataaagccttcctgaccctgcaaatgctggactcaatacgctatatgaatttccatggaaaggattgtgctcttctttacgacttctcttatgcctgaaaataatgatttttgtttgtttgtttgttttaaggaaaaggtctgtttatttgatacctgctcccagacctttcaaacaatagatctcccatcaccaaacttaagttgttttggggttttaaagtaaccattttgctatagcaatccactgacaattcaaatattgctttatattgcttatcagtatctacatcaaagtaaacttagtcttgttttttttttgagatggagtctcgccctgttgcccaggctggagtgcaatggtgc

SEQ ID NO: 15594 - DNA, 1211 bp, Homo sapiens
aatgtatagaatgtgcaatacactggaaaatgctgaggtgaataagatacagcttctgtcttctaggcgcttaatatctaatgggaaaggaaagttcaatgcacatttaattactccattgaggagagggtggtggctattaatagtatatttgcttgactggatctttaaaatacagagaaatgcagaaatgcaccttaaatatgttcagagtagtaaaattcagctttgaaaacttatttaggtaatttcagattcttgccaaccaataactattataattgaataagaggtattttgctttatctttcactttgaaacagtgactatatgagttttaggtcccagaaggatatttttttctctcttgataaatggaaagtgaataaattggttatggttttaatgtgggtgtcctgaaggttaggttaattgtgatgttcctgaattttgtgtgattgtagcagtggatggctagggttatatataatactttatatcttatgccttgttttctctgtcttttacactaatttctttatatgtcttttagcttgataactatggacagcaagaacttgcggatctttttgtgaactataatgtaaaatctcccattactggaaatgatctatcccctccagtgtcttttaacttaatgttcaagactttcattgggcctggaggaaacatgcctgggtatgtatcacttattgtttacctgtttatgtaatgaagtttttaaaattgcttatattaaaaggtaaatatcaatgttatgaaggaaaaatttttaaaaagtgatatacagaagtacagatgaatgtattatggagaaataatggcagaaataaatcttttaaaaaattctttctgaatataatttcttttttggcatatatgtatttttttggcataaaataaagtctctgatcactatatcttctagttatagctgcatagggtagaagggacagttgaagaatggttttaaaagccgttgaacttattgctgaaggatattttagaaaccatttagtttagcatgctactgtccaacggaactttctgcagtgatggaaatgttctgtaatgtgtgttgtccagtatgattagctaccagccacatttggctcttgagcactcataatgggtccagttcttctgaggcactgaattttaaaatttatttcatcttaattgaaatttaa

SEQ ID NO: 15595 - DNA, 1200 bp, Homo sapiens
ctgcatgtcactattcaatatcttatttcttatttttcatgtgatttttgcgtatgttttcctaatttaaaaaactatattaatctgcctttaacaagttattttcagttaaaagtaataatctttttggatgtagctggagggaaggaattaatacttcagagaagttagatcatgtttattttaaatagtgagtaataaaattttcattaatgtgtttaaaaataaccttcacatgtaccccataaatttgtacaaatataatacatcaaaaaaataaaaataacaactacccagacaaatttaattcaaaatttttttggccattcccttaggaaaccaactttctgtttagtgaaaaagaccactatagtatggagcctttatcactagaatgcagttgaaaatagaggccttgttttttgtttgtttgttttttgtagttaaatatgcaggtttatcgcttacgtttttgctttcagagaattcacaatggcagaaattgagcactttgtagatcccagtgagaaagaccaccccaagttccagaatgtggcagaccttcacctttatttgtattcagcaaaagcccaggtcagcggacagtccgctcggaaaatgcgcctgggagatgctgttgaacaggtaggattctggaggtaacttaacttagattgtgcctgttcagggtttgcagcaattagcaaattctatgtgttctgggtgacaagatattttattttggcagtcatttgcttttttacagtacttggttttgtacagaatttgttatacagtattattatagtaagagaaaaatcacctgaacatctcaatttgtgggccttggggctagcatgaaaaaaaatgtttagcagagcacttggaaaatagatcttggtttgcattgtgcctcaccaatctgactcaacagtatgtactactttgggggagacagcattggacccacagaaagcaagccatctgggtttcagactcttctgtattacccatagcagtggaataaggccttgcatataagcactttgtaaatatttgcctggagaagtgagtgcgtgaaaacttgccaacagtagctgctgtccactagtggaatgagttgcctcagggagcagtgagcttcctggccctgaaaatactcctggcaaggttggacgatagcttgtcagccactttgca

SEQ ID NO: 15596 - DNA, 1119 bp, Homo sapiens
gggtacctggtgaaagctttttccattaaaagatgagtgccatttgatagtagctgaaataataatttagctcacttggtctgaaaatcagcaaaatagaaattttctttctttagtaggcagtgaagttatgagctgatttcttaggggtaggtcagtgacaggaaatagatcttgttttgagcattttagaaatacttatcagaagttcttatgctatgggttgggtcattgctgattagataatatctcttttttctcactgtaactggaaaagtttctattgatggtgttaattttggatgagagttgtctgaatgattttgtggacaggtgtttcatcttgccttaaaatcagcataaacaggatctggagtactgatagagagctggcatggttttaagttgatgattgattgttctcaggctcattttctgaaatactgaggcagtgctgtagttttggattccttgactacttcatacaaaacagtcaatgttgttcagtttgaacccagtaagggagcaattggtaaggcatataagaaggatgcaaaactggtgatggagtatcttgccatttgtgatgagtgctacattacagaaatggagatgctgctgaatgagaaagggtaagatatcagatgtttactcttccatgggctccagtcagttgtgtcatctgccaggttctgaaaggatgagattaatttcttaagattttttgcaggtaagtactgtatcttggctgcatttaaaagactgtctttgccgagattttggcattatagcctgaaaaaagatttgaaatagaatatactttttttttttcctagtaactgtcttaaacaaagagacttgtccagccaggctgaggaaggaagggttagaaactacatctactatctctcaggtcacttctctctcctttttggaggtttagaatactctctgtaattgtttaagcatgaatataaacaatagagaaggccgggcacagtggctcatggctgtaatcccagcactttgggaggctgaggtgggcagatcacgaggtcaggagatcgagaccatcctggctaacacagtgaaaccccgtctctactaaaaatacaaaaa

SEQ ID NO: 15597 - DNA, 1056 bp, Homo sapiens
ttaaacttttctgtttcacttggtcactgaggttcataggtttttctcttaaaagacagaatgggctttggtttgggtcactgccacttgtttgaatatttaggtagtctccacagaaagtcttttatgtggaaccaaaaaattaccgtcttttatatacagtagctttcagaatgctttcacatcatttgacttttttagtaacgggcttgtgaagcaagcagagcaggtggtagagacctgctttttaggtggagaaactaaggttcagaaagagttcatgacttggcctaaattcggagctgaaaccaggtgtttctgatgctggttctgcttctcttttgccatactgcttttcatgtcatgttttctggcattttggtaatgacgttatgcttgaacacttgctgaatattaacctcttttggtttgggatattagcatttagatatttacaaattaacatatttggatttttttctttttaaatcatccagttcttcagtttccctgctgtagttgctccattcaaatgttccgtcctcccactgagccaaaaccaggagttcatgccatttgtcaaggaattatgtaagcaaattcaattgggtaaactccatgggaacaccatcaaggagactgaattttaggaaatgtatcatttatttcaataaaaatatagactgaataaagaatataaatgattttataaagagtacatgattttagcctgtactcttatttctaagcgagaggatatgcttgctcagatgttttattctggcatttgagtgaggcaaggtaggacccaagagtcagatttaaaaattatttacttctcatactgaccttggtgccaagttcatcgagggaacctgagtggagtgtagcaaccataatggatctacagccacagaatccacagccctgaaaggaatcctggtggtcatctggcacatccacttatttcagagctgggaaatggggagagtccattgacctgcttagagccataaaaatagaggtggtggagtcaggactcaccttctggccttg

SEQ ID NO: 15598 - DNA, 1158 bp, Homo sapiens
ctgggggtggagaggcagagggggcaggcagaactttcttagttttagcaagacctccagatgattctgacgtgcactcaagtttgagaaccattgctgtgtggcagccagtgtttggttttggctgaggaacagtagccttggtcagagctctccagtttgccagtcttatgtaattccctcacacgagttacttgactgagtcctgtttgttctaatagttaaatttaatacacatgaagtaacttcaagggacatggagatttagaaaagttaggaaaggctttgtggcagaattgagttgtctgggggaactggtgggcgttttgggctagaagagcatgaacccatgcctggcatgacattgtttggctctgtgtaaggtttcctgagttcaggatgaatcttcttcttaaaaatctgaacaagttggttgatacttggcttctctttccttgtctctagatctctgagctgcccagcatagtccaagacctagccaatggcaacatcacatgggctgatgtggaggccaggtatcctctgtttgaagggcaagagactggtaaaaaagagacaatcgaggaatgaggacaattttgacaacttttgaccacttgcgctaataaaaaaaaaaaaaaactactcttatgtccactttacaaaagaaaacagcattgtgattactcccagggaccgtattttatcttcagtggctgcctgattttacccccacaattaaagttgaaggaatcctgaacaaacttgtgatctatttgcttgtgtttttacattttcagcaaggctgtttctcccacgtttgggtagacatgctcatggcttaatgttaaacacagttaacactttttaaaaaattaacagctttattggggtataatttacataccataaaaatagcctgtcttaagtgtacagttcaatgatgtttagtatatttacagagttgtgcaaccaccaccacaaaccaattttagaacattttcatcactccaaaataagtctcatgctcatttacctcactcccattctaacctcagcccaggcaaccactcctctactttctgtctattgatttaccttttctattctttatcttattctgagaaaatgacgcagtgtgcaggtactgtgacagca

SEQ ID NO: 15599 - DNA, 2276 bp, Homo sapiens
taggcacatacatgcatgtgtgtgccatctactgatgatttgtacacagctggacctcgtgtgtttgccatgctcagctctcatttgcttttcaaggatacctgggatggctgttctcagagagtacttacggggaacagactgccttttagtaacaagggatacttgggaaatacattgtgagtatgatctatcccagattgctggggaaataaaggagggccctgattatatttggtttattcctcactaaatgtttaagaagtaaatgctcccaaggcatttgaaatgaacatagaaacataatctaaatgtctctaaattttccactttgtgttttctaaacacaaattgtattactcatttgagcataactcaagaattcagcgatgataaattgaagggctgaatgtgagaactccattaattccacttcttccaagaaagttaacctcaggaaatgctgtttgaagagaagaaagtagtaccaaacaaaaaccttaaacagtacttgaatcttttttgcgctgagactataaagaattcattctaacatcttgtttcataagggccacatcattcgttggagcatgatagtgtgatttgtgtacaattgttacctctcagctgctgaagttcacacttcaaggatctaggagctctgtgaggggtcgtccagcaagatgctgatttgtctttcagttggtatggtttctgtgatcggggtaaactcccgtctcccactattcaaaagcagcccaactcatgctttggaatccactgaaataaaaatagttacatgaagtttaactttgctttaatatcacttgttcctcattgaatatacactttgatcggactttctattaacatttctagctaagagtttgactcttagtggtcactttactgactttccaacataaaacaagtatctcagaagatacaactttcatcatagaaatggtcaaaagaccatagctatatttccttcaggttctgggaggtggagtttttcaaggaacactggctgttgtattgttggcaggggccccaaggcagctcgcacaatcaaaggcaggaagcctcacccctggtcctgtgaccccccccccccacacacacacatacttcaggcttggattctaggctccaagtggccagcatagaagcagcagcctctctccaaaccctggctctgtgagccataggaaccagcactaggtcatcttctgacatagccctggtgaaggtgtgtgtgtgttggtggccacacttgctaaggcttttgtgtctaagaattgagtatttgtacctaggtgtgagggaaccagggtcagccagcctttttcagatggcgccaggcacacacactacatcaatggcttgctggtggcttcaccactatccaggtgacttaaaagagtgtttggaaaatgtccctggtatacttcaattcctactagacattgtaatgacaatggtgtaggtaaggaagagagagttaaaactaccagttgtggaatagaaatagttgcatgtccaaagaaggcttagaatgattgtgcatatgcagttggctcacataaccagcatgaacagtctctccccaaatccattagtgattcactaccccccgccaagcacagccctaaaacaattctcgtccactttcctgttaagaaacacagcagcaatatactttggcagcaaaccagagcatatgatgtaacttgctcaaccttatcttcctttccaaattctatactaagcatctgatgttttttagaataatttcctttggaaagccaacgagaaaacaaattaggaagagagagaagtgagaaattgttgcatggctgaggaacaagatgcttaaaatctgaatggaagtattttgagagcagtatttcatgtgctaagggttataagaattcttttagaaagggattagaattttactctgctagttacaagttttaaagtcacgctacggcattatcaccctggcaggtaggttttgttattgttttacattttgtgaaaaaaagttttgtagaagttacagctagtggtcttttccctccagagccagtgatgagtgtgggagcacttcagctctgtaaggggccagcgttctgacctttaaccacatgaactaacctgcgtcagcagttgcagaaagtagcctgttaggacagcagctgctaagcgttgcctggtattttagtggggagaaggctgggactcttcatggcatcaacacttgcatgctc

SEQ ID NO: 15600 - DNA, 1436 bp, Homo sapiens
tagtggggaagttcagggagtgcacgcctgagttatgtgctttgtcattttctttgctaaacaaaagaggctatgaaagaactaaatatgagtacataaaattctatctttgataaattttatttttatgccctacttaatatttgcatcagtataatatatatcagtgagtcttacagaaagatatgcttccataatatgaaatagattattcaataattgagaaactttatgtgtaatcatgagagtataagaatctggattatctaacattgttagccctgtgtatgtacagttcaaaaagttcatttataaaagtagtttcctgttcctagtgtgatgtatcacaaattgtgctgaggttattttagtatgtgtgtttcattcccgtgcttctgttctgaagtcctggaatacagttttcagtgtaattaattcaactgcacttaacactaatgtccgtgttggtatagaaatgtctaaatcctatactctagttgaggaagatcttccataattttatggtattacacagggaaagctatgactgcaggatcagtctaactatactattaggtgcatgtattctcttttcactaacttatacttgtctatctagaatacaggtcttccagtcagctggtcatttaccaggtgtggacttaagttgctaggcttgcagtaagaattgccagccactcattgtgcgggtctgcgtggagctttaatcagaaaaagcctccactttctgtattatgttaacattggctcatgcatataactatctgctgctgatgtagttctccatcttcaagatttagagtgggttaaccaggtcattacatcttaatttaataacaagcattactgtagagtgattgtgtatagatctgttagctgtcagggtgtgttttttttaacctgttgtgtgcgtgtgggggttaggattagtaaggtgaactgttcaggaattctctgcactagctgtgcagaagagcagataactagcgctgctctggcattaatcccaggaaccactagcagtagtggggcgccgccaatctaacatgagcacaggtgcttcatgacaaacattactagcatgttcaactgcaccatgttctggcactgtattttgaatgacattaatttattaaataaattgtatatattcaatatctatttttcttttgttatgggaatggtctgctttttaaattttgattttgctaggtcaaacttagctagtaataggtggtttcttccaaattttgtttgatgaagattgagagatatgcataggctttccttaggctagtgtctttctaccctgctggcatgttagaatcatctgattctgatcatcatctttagaagcttgagatgatgcctgaacctcaccccaaacaaaatggtttctttttagagcacatcat

SEQ ID NO: 15601 - DNA, 1191 bp, Homo sapiens
tttgtgaacgtgtttaaaatatattcggagaacgagaaatctctgtgtaggagagcaggttttttgtttttttaaaaaaatattttttcttaaatattatgatcatttgttgctaccagacaaataactaagagatctggctttggtaatttaagttgtctattttgaaagagctttaaaaatgtgtacttattcatgtgttcgttattttctgtgacagttatattttgtatagaaggcaaaagttaacttgaaattacaactggtaattttcttgttttttaattttaaatgtagactaagaatcttcatttttgtcatgtttcacttttatggtaatgtctaaagttgaacttgaaataaatatgatttctatttaaggctgccattttaaacgttatattctaaaaccgtactggcctagatactacaactgaactttttttctttttagttactccacaggatccgctgaacataggatgttgccacaaaatctacctcgtgtatttttctctttcactcatgagctgcacaattgcagatttgagcacaatgtctgcagactgtgttgaaaaactctgaagaacctaattaacacaggatgacctaggagtgattctaagtctgtgtaacaagatattactcattagtgaatgtgtcagtcttggtactgaatgctgcagataacagcaagtaggttctcctttatttctgaagtattcacttgaccttccatcagtaagacggacttttctaatctgttcctggagatattaatggaatacagtcatgtccactcaagacgagaggcagatcaatactgaatatgctgtgtcattgttggaacagttgaaactgttttatgaacagcagttgtttactgacatagtgttaattgttgagggcactgaattcccttgtcataagatggttcttgcaacatgtagctcttatttcaggtaagtacttttaatgttttaaatagaaattctttgaaatgttatttaattttttaaaaagccacatctcaatttttgtttttaagttttgcttaaggtttctattcagatgatgtagtacttggcaaatctcattcttgcatgtgtaagagacacatgaaagaagttttataaaggttgaaatacaagaaatgtgttgcaattaactaaggtaaagttttaatgttgg

SEQ ID NO: 15602 - DNA, 1152 bp, Homo sapiens
cctcatgatctgcctgccttggcctcccaaagtgctgggattacaggcgtgagccactgcacccggccgtgtaagtctctatttctaaggaggcttatgcacgttttggttcctttttatagttttcccatggaagcaagagggaaaagatgaatgtatgtgaagctatggagaggcatggggctacacgggagatcagggaacccttcgcaatttcttctcattagagcgtgtttgattagtggaatagctggcctgtttttgtctatcactagtataaatgcatgctttttatttctttctaaacttgaggacatctgccctgtgtttgggggaaaagatccataaatgtctatctctaggatgggtatgggatcatcgtttagctgatatttgggtaagaaaaaccgtacggagagatgagttggaaatatcctcatggtgtggaactttttccctttctcattacctttcagtcacaatcgcatgaaaacatatgacacgtatgtgggaattggctggctgattcctggaatggataaagggctgctggggatgtgtgtgggtgagaagcgcatcatcaccattcctccttttctggcctatggagaggatggagatggtaagtccgtctccttcttggagccactctttcctacccttatttttattgcagtggttaattcagttgtcaccacatgaaacccactagacctttcggtctagacctacactggccaatatggtaaccactagctacatgtggctattaattagctaaaatttaaaattcagttccttggtcacactgctacattttaggtacccaatagcctcacgttgctgaggaccaccatagtggacagtgcagatacagacccagatcatttccatcactcagaaagttctatttgacagtgctagtctggattgtctgctgtctgatgattgagttgcagaaatttccacttacttatagtcattggcattcataagtaaccccctctgcccctgttgtacctgccatggccttggccaccaacctctctggctttaacatttgtgaaatgagacttgaattagacactataaaagttgcagatatccaggtagaaatttagccatacaatgtcagaattgccagatttcccc

SEQ ID NO: 15603 - DNA, 1157 bp, Homo sapiens
gtacagttctccagaaccagaccagagatttggaattttctcctttaaatgtctgtggtttgcatttattcacaaacagaaacccacagaggtatgtatttgggtttgcctgtgggtgcctgcccacctacataaagccttgattttccagcatgagtccagaaaatatggtcatggtagtctcttatgtcattaataccaattttctccttttgctgagtcaggttttagattataccatcagcccatggttggacaccatgggggcccattcaagacctggaagaacatttgtttccttggcttcaaaacctcaagaaatgaataacaccaaccccaagcctgttgagttgtaaagtacttcctaaatcctgtgtcccgtttaatcatcttctcccattccattctagggaaagacattcccggtcaggcatctctggtgtttgatgttgcattattggacctccataaccccaaggacagcatttccattgagaacaaggtagtacctgaaaactgtgagcggataagtcaaagtggggactttctcaggtatcattacaatggcacgcttctggatggcaccctctttgattccaggtaaggaaatgattaaagtcttcaattgccagaacattgtattaaataaagtctgccattggctggaccatgatttaaatactctgtccatgctgatttgtagttggcattttcatctctaatacaagtttctgttttctgatacttagttctttcctcccttccttccttcctttctttctttctttttttttgagacggggtctcgttctgtcatccagtgtggagtgcagtgcagctgcatgatcgtggctttctgcagccttgaactcctgggctcaagcaattctctcatctcagcctccttagtagctaggacgataggcgtgtgccaccatgcttggctaatgttttattttttgtagagatgggcttaagtttcttcataggctcttgtaaccatttctttcttgggggctgttttagatggttctgcaggaagacaggagagactcaccctcgactcccaccatccccctatactgtgcttagttatccagttataaacctcattatggggcccaagatgaggagtggccagaagtgatgtcaaggag

SEQ ID NO: 15604 - DNA, 1114 bp, Homo sapiens
atccaggagctcaagaccaggctgagcaacatagtgggaccccatctctacaaaaaaaaaaaagtattagctaggtgtggtagcatgtgcttgtagtctcagctacttgggaggctgaggtgggaggattgcttgagcctgggaggttgaggctgcagtgagctgtctatgatggtgccactgcacaccagcctgggtgacagagtgagaccttgcctcagaaaaagaaagtatagtgttcaatttacattagctccatttctgtgtggtgcttctcataacccacactgcattcataacctgatgaaactggagggccacatggcgtgtccctacaggtggctgttcacatgctgtgtgggggttcttatttacccttccaggggagcatgtttcctggctgtgtcgtcagatactgtggtttacgctgttccggagtctggaggcctctgtgtgcctttgcatctctttcccaactaatttgcacagctgctgtggaggccctcatgaatgacctctttctttcctttcttcttttctagctactctcggaaccgcacgtttgacacgtacattgggcagggctacgtgattcctgggatggatgaaggtctacttggtgtttgcattggagaaaagcgaaggattgtggtcccgcctcacctggggtatggagaggaaggaagaggtgagcatcagcatcacctgccttcctcactagctgtggctgcttccacattgcttgaaacagggcttctttttctttttcttctttctttttgagatagggtctccctctgttgaacaggctggaaagtgtagtgtgtgatcatcgtgtactatggcctggaactcttggcctcaagtgatcctcttgcctcagccttcagagtagctggcactacaggcacgcaccaccacaccctgcacagaacttcttgagagccaaaatattgaagctaaagtccagcttaagactggaattcccaaatagatttagtttctagagttgtcctgttatttctccttgtttctctgcccattttcctttaccttttgaaaatgttaaatcctacaccaaagtcaaaagcacgttatggtgaattccactttg

SEQ ID NO: 15605 - DNA, 2685 bp, Homo sapiens
ttacctatttttatgttcatgtctaattgtctgtttccactagaatgcaagcatcacaggggcagggtgtttgtgtattgatgtatttcaagatctagaacagtgtgctcagcacatagtagaccatatgttttgatcatatgaatgaatgcctgcatccaagaatgttcttacagtcttgggtggtcttgggggtcagcctttggtggggaaccaacttgggagaaggaatagctctgacggctgctgggtattggctacctgaataataagggctcttggagtcatttagcacaagggtttttcacctgcatttagagaaaaaaaacaaaacacagatcataggtcatatagctgccaaaaagatcttgtctgtgttggtagcccagactcaagttccagccctgtcacccccagactgctctgtttctggccccaggcctggcgttcatggcggctgaactcatggtctttcctgtccccttcttttccagttctcagagtacattcacgcccaggtggcatctggcaaagggaaactcgctcctggctttgatgctgagctgattgtgaagaatatgttcaccaaccaggaccggaatggagatgggaaggtcacagccgaggaatttaaactcaaagaccaggaagccaaacacgatgaactctaaacctggcatgaaccagatggtgccagggagtacgtgacaccaagccacctgtgtggcaagacgtgcagtgagggtgcaagggtctctcagaagttgcatcattagccagtagtaggtgggtcacatagtacctggtgtacacatcggggtgggttgatatatggggtgagaagtttgggctgatcgccagtgatagtaaacaaaatctgtgcagagggccttagcatgggatgtgtccagtattgaaaaggctgcactgccaaccatgatttgtgagccttctgggaaattttgttattaaaggaatatatagtgtcagacggaagttataatcatcttggaggaaccataagaaaaggtgtccagggtatctatataaagagggttaaatttttttttaacttgctggttaaaacattttagaaatattctagagatgggcaggagagtcaaagggcttgcttgccccagcagagttcccagcagacagccatggctcttcccagcagcctgtgcaaattctgatgatggccccacccccgcacacgcacacgcacatcatgcttttccagctcatcacaccccgccccactatgggcctaccattaatagtgtataacttggaggttaaaagagccttttggacagaaaactgggccaggaaaaggcatctcagaccacaaatagagaatttgattcctcatttgccacataagtcatctgcttagcttttcctttcctttttttttttttttttttttctggaggcagagtctccctttgtcgccaggctggagtgcagtggtgccatctcggctcactgcagcactgtctcggctcactgcagcctccgcctcccgtattcaagcgattctcctgtctcagcctcctgagtagctgggactacaggtgtgcaccaccacgcccggctaatttttgtatttttagtagagacggggtttcactgtgttggccaggatggtctcaatctcgacctcgtgatccgcccaccttggcctcccaaagtgttgggattacaggcgtgactcaccatgcccagccacttagttttttcttattcccacctttctatcccatagaacactcttttttatcttccctgaaccatattgatgagataaatagggctgggggctgggccccgctggtcactcaacagagtatttcccttggccgagatggaagttttgtcccaatagatgagctgctgagcatcaacaaggtgacatttttctgctgcccatttgtgtcctggagacggtggtaccctgaaggcagaggccagctgccgcaagacagcaatgacagtccacctgccgacctgattcctgcatcatggaataaccacatggctaccttctatcctctgttcccaaatggtggtggcacttatcctgaagtcgtcaatgatttccctttgaaactactttattttactaatttaaactattttgtactgatgtagccctgaggtagttcatgaaaatgctgtgcactcattccatggaataaatgttggaaagctgatcttttctgatataaaatgttgaatgatattatctggttttctgatattttattggaaggctgaagacctatgagaatgcaccatgcagtcagaatccccttgatgaaaacagcaggacttcactgcatttactgagggagcgcactctacttatagggagtgtcagtcagggtcctggccctcctctgggactcctgaagagaagctaaggaaaggactgtttagaggggtgtgggcgaggctgggggaactgaggctgttgagtgccagtgacagcagtgttggccaccgcaggaggctgctaccaccagggcctgagagctcaagaggaggcagtgggagcagcacaggaagggctacctggaggcgtaacagagggatgcagccagctgcatctgacagtgcggctgacactgcagcagagcgagggacaaacgccccatcccctctgtgcccccattctct

SEQ ID NO: 15606 - DNA, 1157 bp, Homo sapiens
ttgtatttttagtagagactgagtcctgccatgttgcccaggctggtcttgaactccgccttggcctcccagaatgctgggattacagatgtgagccactgcacctggcctcattatttttatgcttttttgagataagttcttgctctgttgaccagcctggagtgcagtggtgcaatcacagctcactgcagcctcaacctccccaggctcaggtgattctcccacctcagcctcctgtgtagctgggactacaggtgcatcaccatgcctggctaattttttgtagagactggggtctccctatgttgcccaggctgatctcaaacatctaggctcaagcgatccactcgccttggcctcccaaagtgctgggattacaggtgtgagcctccgtgcctggcctgcttcattgcttatgatgatgaaaaggagtggtgggggaggataaggatgggcattcccaggacaaaaaggtttcctaacatgtgaccttgccttccagccacatctgactgaactagagactgctgctcacactggatggccagaatgaatcagatcatgctttgtgtgtatcatagctcaggtgcttatataagcaaaccaattaggtgttcataggatctggaattaagggtaagaatcacggtcaaattgatcacaatggcaggtctaaatcctgaagatgaatgatgaggcagagccagagatgtggagtgggtagctggactgtacagagagatgctggctcctaatgtcgcagtgctgctcagattcagtcaccacgagacccagctccactgcttcctgtctcggcttctgaaacttgcagacttgtaccttttactgatgttttaaatgggagaaaataattttcagaggtctcagtattttctgaagggcagacaaaattttccctgaaatatctttagacttaaataatttctgaaaatattcaatctaaatagccactatgacaaggactttagaatttatatatcacaaaagacaggcagacggagagaaagaaacaagaagaaaacaaaaaaccatggtaggtgctcaataaatatttgttgactcagtaaagatagttttgaccatagaattaaaaaggttttgcatttcatatttattatcagtgcttcaatata

SEQ ID NO: 15607 - DNA, 1198 bp, Homo sapiens
gtccctagacgttactaaatgttccgtggacaaaaatcaccccatttgaaagccactggactggagagagagcattttggggagaaaagctaccatgtggaaaaatgtctgtcagtgggtcttaaggatttgaaaatatttcttcatttcaaagattttttgaaagtgaatttaatttattgcattttgcccaagagatctaacaacgagattcatactgaaattatttgtttctttgccctgcatgttaattttcttttgttcatctcttgattaggtggatgagcttttagaaaagtacatggactcttatgatattgttttagtacaagatgaatcattagaagtagccaactctattttacagaagattctataaacaagcattctccaagaagacctctctcctgtgggtgcaattgaactgttcatccgttcatcttgctgagagacttatttataatatatccttactctcgaagtgttccctttgtataactgaagtattttcagatatggtgaatgcattgactggaagctccttttctccacctctctcaacacactcctcaccgtatcttttaacccatttaaaaaaaaaaaaaagctaaaattagaaaaataactccctacttttccaaagtgaattttgtagtttaatgttatcatgcagcttttgaggagtcttttacactgggaaagtttgtagaaattttaaaataagttttatgaaatggtgaaataatatgcatgattttaagtattgccatttttgtaatttgggttattatgctgatggtatcaccatctcttgaaattgtgttaggtttggttattttgtctggggaaaaaatatttactggaaaagactagcagttagtgttggaaaaacctggtggtgtttacaatgttgctaatcattacaaaacattctatattgaagcactgataataaatatgaaatgcaaaacctttttaattctatggtcaaaactatctttactgagtcaacaaatatttattgagcacctaccatggttttttgttttcttcttgtttctttctctccgtctgcctgtcttttgtgatatataaattctaaagtccttgtcatagtggctatttagattgaatattttcagaaattatttaagtctaaagatatttcagggaaaattttgtctgcccttcagaaaat

SEQ ID NO: 15608 - DNA, 1206 bp, Homo sapiens
atacttgtaataaaatttcagatatggaagtgatatatgctacttgtaataatgattggtgttttgtgatgttttaacctttccaagatggtttcacattattttatttcatttcattgaacctcttatttttcatgagaaataggctcagggagattttagtgacttgcccaaagtcacggatgaattagtcagaaagccaggactagaacttggatttctttattgaaagaaatagcacttagggaaggacctcagatctgactttttcttggaagctctgttggcttcaatctgaaggcagtgccttgaggcagagtacttgagcctctggggttgtcacattggctgtttattgttatatttatttttcagtttagaatgttatctaatgaattgttttgtttactcacagtggctgtggttatgagatctttttgaaattattttacaactttttggttacgtctaaagctaatattggaaaactttaaaaactttctctgtttttcagaggtaccgaaatgctacatttggctgtgttacattctagaaaactttgtgtctactctgtctcaggtaagaaatatttttaccaatgtagaatttatattacaaattgggcttaatgttatatgagaatagatattccctagtgctgacttggtagagaacacaaaacatttagttgaatgttttcttgtcttggttaacattttcccatttttcatttattctttcagatacttaggctattacattttcatggtctactatttctgtgtatatgtatctttctagcagaggattcctcttaatcacctgcctctccagaattgtttccgggattgcctgtgactaatagaggccaattctgggtacttaagacacttgagtcttaagaaatgttctacaataacaaaattgattagatgctaagtcatagtggtttgaagtacattttctttggtgaacctcaagtattttctctttaccgttccaatttcttggtttttggttgtcttcactcagtcaggcttcatcaggtttcattctctgacatggttctgtgggtacaagtatagtgtgcggtttggtttttattaaaattatagtatgtggtttggtttttattatattttattttggcctttattaaatgtaagatataacttaaaaatttttatttcaattattagataagtt

SEQ ID NO: 15609 - DNA, 1142 bp, Homo sapiens
atgaggactcaccatgttgcccaggctggtcttgaacttatggcctcaagtgatcctcccaccttggcctccccaagtgctgggattatgggtatgagccacagtgctcagcccacatatttatattaggaagttatttgaaattgacagtactgaaataatttttctcttgctttttattacctttagggttaaagctttttgatagaagcttccttggctgaatgtgttgatttatgaaggaagttgctgctttttaaatacgtttcttttcagtgaataagaaatgttggatttagatcaagttgatgcaattatacttaataacagcattttgctcagagtctaagatgttttttttctttccactcccacctacttggcagctttagtcctctctaccttgtttattacataccagttccaattctgtctgtgttttcttcttccttttcagattaaatctcattctcaattaaattgttttttatttaattattttcaatttttgtaggtcagactatgggaaaatgaaatcaatacacaggttacagaatcagaagagcccagcatcttacttctgctgtggtcagtttctcaagtggcaaataaagatcatcatttatcagtaatgttactttctctggagatatcaaataaatatatctacaagtgtggaagtccatttgaatgaaacttcacaaagatgagaaccattctaaactttgctggcagctcacagcaagctttaaaatcttattgcagtacttattgcagctcattttttagtttgagcaatttggtctagtacttcaatgtttttcttcctaggctaggtccacaatagtcacttattttaaatttgttacttaacagtttcttctttttaaaaaatttcctagcttatttaaatttttttaaacatttattttagatacagcaggtacaagtgcaagtttgttacatgggtatattgtgtgatgctgaggtttggggtacagattctgtcacccgggtagtcagcatagtacccaataagtaggtgttccacccacagccactccctccctccccactcttgtagtcgacagtgtctgttgttcccatgtttatgtccatgtgtgctcaataatactttgttc

SEQ ID NO: 15610 - DNA, 1167 bp, Homo sapiens
ctttataattttttaaaatcatgtggaattaaatgtttttgttttttttagttagtaatttatcaggggtgtgtttgtgtgtttgtttgtgggtgtggcttttagcttttgacttacactaataaaggcctttcctataccaagatcattttaaaaattctgatttttctggtgcttttattgtgtctaaacttttaatctctgcattgattttgctgtaaagaatgagaaaagatttctattttttcccatgtaaccaattattgaaaaacacttattaaatgatctgtttttcctccagtgatactggttaacttttacaattttccatttgatctgttccactgtattatctgtgaattagtgattcatgtaccaaataccacattgttttaattcccttaactctataatgcatttaaatttcttcattactcttttacttttattatcattgtgtgtattttttctttaaagatgttttttgtgtccatttaatctcaatttaagaaattattcattgcagctacggataaatggtgaaaaattagaagaactcttatctgagagagctgtacaatttcgggccattcaacgccggctactagcaagattcaaagataaaactcctgcccctcttcaacacctggacaccttgttagatggaacctacaagcaggtcagtataatatcagtaacagttttctattactggctatacttttttttgtcaccctagagtcatgtaccagaatatccaagataaggtactcatttccagtgctttaaggaacagtgaacagtgcacaagctttagagtcagaaaaacctaggttcaaagtcaaactctgctgctttctaattgtgtgaccttgggtaaattacatgagcgccctcagtttccacatattacctcccggagttgttgtgaggatttttaatcttttatgtaaagcaacaagaacaatgccaggcacgtaatatgtgcttgataaatagtagctattatgattagtattatgagacaattcttggtgcattccataattattaccataattctccaattgtcttaccaagcaactggctcatacttctagtattatgtcagttgatattttgagatggaattcttaagcatcatagttcaaaaagttctagttcaaa

SEQ ID NO: 15611 - DNA, 1143 bp, Homo sapiens
aagcctggtggaaaagctgtgtcagcggttccacacagcctaaactgagcaggtgcagcaggacctggcctactgtgtgtcacagctgcccctcacagagcaaggcccttgcaagatgcttggcaattttgactgttttggagataaactgtcagatgagtccatcttcagttcttttttgtcagttatgggcaagctacaacatggggccaagcctgagggcaaggctataatagatgaatttgagcaaaagcttcaggcctgtcatgccagaggtttggatgggattgaggagcttgagattaaccaagcaggtagccagagagccccaacagccaagaaaccatccactgtttgtaggcaccagcctctggcttctgcagcctcagacaatgacttcgtcacaccagagccccgtcgtactacccatcggcatccgaacacccagcagcgagcttccgaaaagaaaccaaaagttgtcttctcaagtgatgagtcaagtgaggaagattttttagcctagatgacagaagacaggacacccaagaaaataacccccattctcagagcatcagctcgcaggcacagatcctgagaagtcatcttgcctgttcctttcctccctgtgcagggtaacttgtagggtgacctagaattctaattctgttccccttgtagaatatttgcctgtctccttttttgaaaaaaaaaaaaaatacatacacgatctttaaaatgcaaggcctttctcttaaattagcctaactgaactgcattgagctgctttcactttggaatatatgtttgccagtctccttgttttctaatgaataaatgtttttatatacttaaaaaaaaaactctcttcctccccagttcatctgcatctcattattgggctacaagaaacagcagcccgaccctatttggtccaggaacaatattggatagaaataaaagactaagggcaaacacagaaagagtcatcttaaaagatttaattaagtgcctgaatttaaaacattcaacagatccccattcttagaatggaaatttctcatcagccttggaatatgacggaaaccttctaaggatacgaaattgaactttaattgtgtcagttattacaataatcagggccaa

SEQ ID NO: 15612 - DNA, 1958 bp, Homo sapiens
gtttttttcttcctatttatttttattttgaaaaatttctacaccttctttgaattccttgtatgaatttttgtttcttagaagttaatttgtgtgaaatgagattcttcaaaacgatgaaacctcatagctctgagaaaaggttttagggttttaaattctaagcaaagcgtgactatggctgacagactacacatttaattatacagcttctctttcttaaccacaggcagattaacctcattgtggattgtccttcagaccttagtcctcaggcatggtttctggtgcccactcctggaagccgctgttccctttctaccttcttaccagagcccaagggcaggcctggtcccggggaagcagcagcttgctgacataagtcagctgcaaaggctgaggagtgtgccctcagagaagcaccgccccccagtcttgtgccagcgcctagagccgcagctcccagggatgctccttccctggaggcagcccaggagagggactctggcagcgttcttcagatttgtggccactgtttctcatttgctggttgactgtttttatttcttaggcttttgctagttttagaaaatagggaagcagcccttgatttgtggattaaaagcaacatttgagcgatgatgcacaacagtccaggaaaatgggcggtggacacttgaggctgaggatgggagttgacatgagcagggagagggaggtgcgcgctgcttatctgtgattgttgctcacctgagtgtggctgattgtgtacatccagcagttacaatttttaaaaattatacttttacatttattttatatttttctcacccccagtaatttccttccaaagaagttcacatgtaataagtagaaattctgtataggaaaaaagcattaaaaatactattataactgcttcatttgctgggaaccattaaaagtaatataaattagctttttccagaaggatccttttgtagcagtgtttatgaatgtaacccccagcaaaatatggctatatattaggggagccagtttggagcagaggcctgaaggtccctgctatgcagccgtggccacagctcgcagcccaagcactgtggagcatccacacctttgatggcaatgcagattggtagcaggttccataggcgtacaaaacagtattaaagctcagtgttttgcatattgttagcatttacaaatatttttgctttagtatgaggaaagtaaggatgggcaaagaagcgatcaaaatagctattgctacaacattttcgaaaacaaagttggggctgtatttctttaaaaagataagcctctaaaaatgcttggcaaaaaaaatatagtgttaaaataggccagtgatattaatgagaaaatgaaagtatgtatcaggaataaagtgatattgcataggagtattgtatttttatgaattttatgccagttgtttacatgtactatatatgttaaattaaaaaaaatcatgagtaatgagggaagtgtttttcttgattgttattttcattttcaccttgattgtgatcaagttcagcctcgttttgtagtcagatagccatgaactggtttgagtcagatggcagtcctgagaagagagggagggatcataaacagtgggggtagactctttggtcttgttgttggtagtggtaggtactgaggttatccaaacttttcctgtatttgtggtagagtcacttacattccttttttatccttttcatcaagggacacagtaattcattcaaactatatattgggaataattaaagggttgctaaaagctgttttaatgtatttaaaacatacattggtatcaacattttctaaattgtaactcaatgtgtttacttgatacaaacatcaactcttggttctttctctatgtaggaaagacatttcagctctgttcattcctgtataatttctta

SEQ ID NO: 15613 - DNA, 1344 bp, Homo sapiens
taaagtaatttaaggggaaaaaaggaattgaggtcaggaatgtaagaagtgctctgctttctctgcagttatataatgcatattgatttttaacatgtacattcatttttctaggcctggttgcagtatgcctgaaatttgggatgtagaagatcctgccaatgctgggaaaactcccttatgtaacctcttggtgaaggattccaaacctcacttcaccactgtattccagaacagtgtttacaaagtcctagaagttgtaaaagaatgactgctacatgacctgctgcctacggagaactacatctgtaatggttttaatgttttgctaagtcatgtgttgttcatatcccaaaaacttttataggtaactgttttcaaatagaaaacgttttatttggtcaatttgaatgtcattctaattataaaaatgacttacacctttatcaattggttactatttcaatgcaccctttaaaatttgctatgcaaatgagtatatgcttgtacttgactttaatatttgtgctaaagtgagcaaagctacctgtataaagaaaacacagtgggttgtgacaaggatgacatgaaaatacaggacaattctgacaatgtaggggctgattttatagtgtaagaactattaatgccccttgcttcttttttctgcctcttgctcttgtcttttggacatttcagtgattgtaagttcttcggtcatgtcagcccctgtcatcaacttgagttacagtagatggggcagacatggagtgtttgctatatagaactatctgtttgttttacttccttgtgcgctttttgttctctgttctcttgttaatgaagcttttcctgcccattattaatccaaactcttggaccttgtggttaggaaattcccttaacttccagccatatggcattatcgtgtctctttctctctctctcttgctctctctcttctcctcttccccatattttctgtcaaataagtactgtttactcatttagttgcttatcaagtacttattcttggttttaaaaaaaattaatggtaactgtatttttctcatttttagcattattcaaatgtttatattttaatacctttaaaccactttaaagttttttcatgtttaattatagttttaagaaaaactattttgaacaaccccaaatatagtgcatctagaaactaatgtatatttgattagacatcatttatagtggaacagtagactgtagtacatggtaatttttcttttactattaagatacaataaaacatgactaattttgctgtcaaaaatgtaaagaataatgataaatggagtttttatattt

SEQ ID NO: 15614 - DNA, 1220 bp, Homo sapiens
tatcacactattttaattattaaaagtggtaagacttaatatctgttaaaacattccctttaattttcttgttagttttctagatacattttagacacttggaattttgactggaattattttatgtttatgaattaatttgagggagaattcatatcttaaataattcggtctattccagtagacccagtatcttttacttgtgcaaatcttcttttgtgtctcttagtagagttgtagagcttttgaaaaacataaatttagcacttttttttggcccatattttgtccttacccatggatgaacaattgaaaactgaccagtgaagaatctgcctaggagattctgagccttgttttactacatttaaagggagccaagtggatggtatggaaagggaaaatatggtaattgtcaaagtatctcaaaagtattctagtaatgaaaattgtttagtatattttcttaagatgcctctgtattttttaaaataggtaattttggccagttggtaccggatttataccaaaataatggacttgattggtattcaaaccaagatatgttggacggttaccagaggagaaggactcagtcctattgaaagctgtgaaggtaagtttctttctgtaatattgtccagttatctgttgtaacataataaacttatctagcataataaacttacactgtaaacttagtggtataaacaacacccattttattatgcatatatagattctgcaagtccagaatttgggcaggctttagcggggctggtttatgtccatgatttcagggacctctgctactaagactcaaatgtctgggaaggctggaattaactgagaggctacattgctcacattttggctcctgggcatggaggactgtgaggctgagctcagctggaactctcagctgggacacctacatgtggcctttcggggtgacttgggctttttgaaagcaaagtacctcagagtagtagtaaggcttttcctatggcagctgaaggctccaagctggacactgtatgacctcttatgacctagcctcagaagtcacatagtgttgcttctgccatactctgttgaaagagtcacaagcccaatgaaactcaaaaatgggggctatagaccccatacctccagaggaggcgtatcagtgaatttgcagccctgttttaaaaccatcattgctaattaccctggtctca

SEQ ID NO: 15615 - DNA, 1199 bp, Homo sapiens
acttgataggagggaaaataatctgtaaaattaggtggcacccgagtgaaattcatatgtaataatacatcagtgtgtagccttctcaacacatttgcatttttgcatgtaaatccggaggaaaaatgactgatagtgtcattttggggattaaaataagcagttagaggagtatttttggcttgagatttcttggttcatgataaattttagttccataataaaccactcactctattcataagatagcattttctaagagtgatattagtataagtaataggattttctaagttgaagtatgctgagtcgtattattttttaaatgctgaaactttttgaagctattttgcattcagttatttcaattaagatgcatttatgtgaaaatacatagttttttcacaactttaggatttatcagtgatcagaaacctgtgaaattcattgtattaatagctattacttaattgctttgtttttcaaaaacagtgtatttacttagaagtggcatcataattatgtaccttttgttattttaattgagcatatctttatttcagggactatattattcctatttcaagactattgtggaagcaccctcatttttgaatggagtatggatgattatgaatgataaactgactgaatacccccttgtcattaatacattaaaaagattcaatctttaccctgaggtaaggtactttttccaattgtgatttttcacttttgtaaaaacttttttgtattaaacgctgattctaaatctaagatataattcaatatattaaattgtatttaattttttaaaagaaaatatgtatcttgtggaggaatatgtaaaaaagatcattactgattttgaggagagggctttaattctgtggggaactgttgatttgattgcattgtttagaaaatataaaaactagatttggtgtgcttacagggattataccaagggagcgctgttacttttacatgtcatttgttaaatgttttcttccctttcctcatttaattgagtgcactttcttgagtgggagtggagggaaggtgagcccaatccagcaagtggagatgacatttggcctctcctttatcctccttgcaaaactataaatttgttgatgtggaactctagttcaatagaatatatattttaatgattttgtcagaaggctttccagata

SEQ ID NO: 15616 - DNA, 1229 bp, Homo sapiens
gttgcactggtaagattgtttttttctcctatggtattttatgcagacgtttataacttgctaaagctatttcccatacatttaaaggaataatttcagcatgatcagtatgaatatatattacatgtaacacaatagtctgaaaaactagtttaattgataaatcagggtcagaataatataattgtttaataaaaaagagattcattattaaagaggctatatttgagactccactcaacattaatatgttcatggtgagagagagattaatttatttaatcttctagatagaaatatgaatttcattagatgtttctaaaatggtaacccaatgacatttacagtttaatctatacttttattgtacttcacttaaaatattctggttcattttaattttaaaatctaatttgattttttagagagggaaattttagtataaatgcaatacatactgagtgaaaaaaatatagatactattgtatttgagtgttattacaaaattatctgcaagttaactgatacttttatttttgcttttagcttactttaaaaaataatacttagagtgtaagttttaacactattgctttgttttgtttttccaggagccatataacacacctctttgaaaatgaccgtcatttttctcacctctcaacattggaaagggagatggcttttcgcactgaaatggttagtttttatttgggatttcatcatagtactttaggaatttaaaaacatttaatattttttattatggaaaatttcaagatgttccaaagtagaaagagtagatgctccaccttctacagctgacagccacagccagttttccttcatctacacccccactcactatgtcttttttattttttatttttatttattaatttttttttcgagacggagtctcgctctgtcgcccaggctggagtgcagtggctccatctcggctcactgcaagctgcacctcccaggttcacgccattctcctgcctcagcctcctgagtagctgggactacaggtgcctgccaccatgcccggctaatttttttttttttttttttttgagacggagtctcgctctgtcgcccaggccggactgcggactgcagtggcacaatctcggctcactgcaagctccgcttcccgggttcacgccattctcctgcctcagcctccccagtagctgggactacaggcgcccgccaccgcgccc

SEQ ID NO: 15617 - DNA, 1555 bp, Homo sapiens
aatcttttaatttttttcagtgaaaaagtagtatctgaaaatcccaacattgttgtaattgggttagctgttgttatcatgttgtctatcatgtttataaaatggttactcatcttgcttattttccttttatcctttagaaccttggaaaagaacaagaagaaagggaagatcttttaaactctctattgaccaccagttaacgtattagttgccaatatgccagcttggacatcagtgtttgttggatccgtttgaccaatttgcaccagttttatccataatgatggatttaacagcatgacaaaaattatttttttttttgttcttgatggagattaagatgccttgaattgtctagggtgttctgtacttagaaagtaagagctctaagtacctttcctacattttctttttttattaaacagatatcttcagtttaatgcaagagaacattttactgttgtacaatcatgttctggtggtttgattgtttacaggatattccaaaataaaaggactctggaagattttcattgaggataaattgccataatatgatgcaaactgtgcttctctatgataattacaatacaaaggttccattcagtgcagcatatacaataatgtaatttagtctaacacagttgaccctattttttgacacttccattgtttaaaaatacacatggaaaaaaaaaaaaccctatatgcttactgtgcacctagagcttttttataacaacgtctttttgtttgtttgttttggattctttaaatatatattattctcatttagtgccctctttagccagaatctcattactgcttcatttttgtaataacatttaatttagatattttccatatattggcactgctaaaatagaatatagcatctttcatatggtaggaaccaacaaggaaactttcctttaactccctttttacactttatggtaagtagcagggggggaaatgcatttatagatcatttctaggcaaaattgtgaagctaatgaccaacctgtttctacctatatgcagtctctttattttactagaaatgggaatcatggcctcttgaagagaaaaaagtcaccattctgcatttagctgtattcatatattgcatttctgtattttttgtttgtattgtaaaaaattcacataataaacgatgttgtgatgtaatattgtgtgaggtcttaaatatcctacagtcgatgtacaagagtagagtatgtttgggaagaaacttttcagcttaagtttgcctcctctacaatgacatcttttatatgcttgtctcatttagaatgcatatgtgctgattttctaatttaagagataccatatctctctattcatttctatctctcatttgtatgcttatttttctgagaacattttttttttcccccagacagggtcttgcttcattgcccaggctggagtgcggtggcacaaacacgacttgactgcagcctcaaccctctgggctcaagcagtcctcctgcctcagccccctgagtatctgggattgcaggcgtgc

SEQ ID NO: 15618 - DNA, 1170 bp, Homo sapiens
ttatctggagctggatggtctaaggtggccttattcatatgtttggtagttgatactgaccatcacctgggccatgtgtctcctctagtagacttaacctgggcatgttcacttagtggcagagagagagagagaccccaaactgtaaaatctcttgatgcctaaaagtctcacaatatcacttgtaccatattttattggtcaaagcagatcacaaggccagcccagattcaagggtgaagaaatagattctgtcttttgatgaaagcagaaaaaatttgtggccgttaaaaatcttatataactaactttacatattttattccttctgtaatattcctgtaatagttatgacattggggtactcatttagtgaatcttgacataattgcttaggatttcacttttgaaatgtgtttaactgtcatcctgtatggcaattggtgattttagaagatactgcaattttatgaacctttgattaaacttgtgttttaacactgatatatttatttatgtagaaactgctggagcgaacccgtgccaggcgagagaatcttcagagaaaaatggctgagaggcccacagcagctccaaggtctatgactcatgctaagcgagctagacagccactttcagaagcaagtaaccagcagcccctctctggtggtgaaggtaaaagactttgtggggaaaaataacatttactttttttttcttttgaaggagacaagccccaaacatttcattagcatatagaagaaccaagctctttgggagacaaatgtaacagcctctgggggaaataacagccttctattctatttcagagttattatattaggcctagaacctatagggttggaacggtttcttctaaaaaatattttaaattaattgattgaactttattttcttcattctgaagttatccttaaaacctcaagggaagaaaaataaaggagtagggtaacatttatacttacagtagtgtgtagtttttttatcccaggggtggcagaacagctggccactgagtttgggtggtgtctccggtaccagcaaggcaatggaaggcacactgcccatgcttgacatttaatgaacccttttcactctctatttgctgaaccaactctctaaagtttaggttgttaatctccagaagtg

SEQ ID NO: 15619 - DNA, 1164 bp, Homo sapiens
tttatttactattgtcttaacactatataaagtgttatgcatatattttgaaaatatgatttaaatatctttatttttatttttccataagttattggggtagaggtggtatttggttacatgagtaagttcttcagtggtgatttgtgagattttggtgcacacatcacccgagcagtatacactgcaccatatttgtagtcttttatccctcgccccccttccgctcttccccccaagtccccagagtccattgcatccttcttatgcctttccatccccacagcttagctctaaatatcttttcattaaggtttttataatataaattgtgtctgcttgaaaagatctttcatatcagatttctaagttgctgaaagagaatggggttttacatacttctggttgtaactaaaatcatttaaaagaatagggaggggtgatgttttattaatttgttgagtatctaccctcaagtttttcatgtgagaaattacaaatttgaatgtcttttttcatcgtttttaatgtagagaaatcttgtacaaaaccatcgccatcaaaaaaacgctgttctgacaacactgaagtagaagtttctaacttggaaaataaacaaccagttgagtcgacatctgcaaaatcttgttctccaagtcctgtgtctcctcaggtgcagccacaagcagcagataccatcagtgattctgttgctgtcccggcatcactgctgggcatgaggagagggctgaactcaagattggaagcaactgcagcctcctcagttaaaacacgtatgcaaaaacttgcagagcaacggcgccgttgggataatgatgatatgacaggtatgaattgtatagatggtatggcccatacatctgttccaataagattcagtttggtatgttgaacattttatcagttaactcatgaaaaataaatgcttttgttttatctatatgttgagtatcctttgcttgcatatggtttgtctaccagtagtataagttggttatgtttagactgaagtagatcacgatgtggttcttggactagttcatagaaacctgatcttataactgtattaccttaatatctgcaatgaaaaacacttgagaacaaactatacgtgttgttagcattgctgaccctcagctccat

SEQ ID NO: 15620 - DNA, 1164 bp, Homo sapiens
aacagaactgatgaggacaatctcctgtgtgacgaaaaggaaggaggaaagtagcatgtaggggtgatggtagtcttagagttaggatagcaaaaactgatggactttcttctgaaagctcctgttttattcatccttaggaaagggaaggtgacaggggaaatactgtatggaggaaagaagagagagctgactcagacataggaagaatagggggtagtattgaggcttagatgagatatgagaccgtagattttatagtggaaccatttgatcgtttactttgctttttgtgtttttaaaaaatttttatgtattttttaatccactcatctgcatgctaattacattgtttttacacaaccaaagctgcttctaacttgagagacaataaagtctggaactagacctggaacaagagtacctgggtttgtatactggctctgccagtcactaactgtgtgcaagatacttaacttttttgtgtctcagttctctcatctgtaaaatggagatactagtacctaacatagagggttattgagaagattaggtgaggcaatagatataaggtgcttagaaaggtggctggcacatattgagctctgtataagtattagctgcctttattttactcttatttgattatttctactatgacttcattcataaagtcttcttttatttctttgctgaaataatctgtacaacaatataaagtctttaaacatacaaaatagtgaatgttcctcttaaataaccttgctaatgaataaaaagactcagacgagggaatgttttcttctcttctcttctttccttaccttctgatctgttttgtccttgttttctcttgctcttaccctccgggtaactgataattaaatggaatcctgatgtgtaggagctgtcaccagatgttataggtgtgggttgagataagtgacataggggtgggtgtttttccctttgtgtggctttcactttgtttttttattgttattttattttattttattttattttattctaccaaatacccagacttcaaggagaggctttcactttgattggcttatctaaaactgagccctgatatgaattttcattctttcttgccacctcctctccaaaaaaatttttacatactgagaattaccaaga

SEQ ID NO: 15621 - DNA, 1808 bp, Homo sapiens
gctgtggattagcatccataaaaggtggttaaaggtaattcatttactggtttatttagtcatttttttccctagcaagagtacatgggggtatggaatggagggagaagaattctgacctctttggttgtttgttcctgtaggaactggctgtctgcagatactaaagaagagcgggatctctggatgcaaaaactcaatcaagttcttgttgatattcgcctctggcaacctgatgcttgctacaaacctattggaaagccttaaaccgggaaatttccatgctatctagaggtttttgatgtcatcttaagaaacacacttaagagcatcagatttactgattgcattttatgctttaagtacgaaagggtttgtgccaatattcactacgtattatgcagtatttatatcttttgtatgtaaaactttaactgatttctgtcattcatcaatgagtagaagtaaatacattatagttgattttgctaaatcttaatttaaaagcctcattttcctagaaatctaattattcagttattcatgacaatatttttttaaaagtaagaaattctgagttgtcttcttggagctgtaggtcttgaagcagcaacgtctttcaggggttggagacagaaacccattctccaatctcagtagttttttcgaaaggctgtgatcatttattgatcgtgatatgacttgttactagggtactgaaaaaaatgtctaaggcctttacagaaacatttttagtaatgaggatgagaactttttcaaatagcaaatatatattggcttaaagcatgaggctgtcttcagaaaagtgatgtggacataggaggcaatgtgtgagacttgggggttcaatattttatatagaagagttaataagcacatggtttacatttactcagctactatatatgcagtgtggtgcacattttcacagaattctggcttcattaagatcattatttttgctgcgtagcttacagacttagcatattagttttttctactcctacaagtgtaaattgaaaaatctttatattaaaaaagtaaactgttatgaagctgctatgtactaataatactttgcttgccaaagtgtttgggttttgttgttgtttgtttgtttgtttgtttttggttcatgaacaacagtgtctagaaacccattttgaaagtggaaaattattaagtcacctatcacctttaaacgcctttttttaaaattataaaatattgtaaagcagggtctcaacttttaaatacactttgaacttcttctctgaattattaaagttctttatgacctcatttataaacactaaattctgtcacctcctgtcattttattttttattcattcaaatgtattttttcttgtgcatattataaaaatatattttatgagctcttactcaaataaatacctgtaaatgtctaaaggaatcagttgtttaggaagcactgtttcaatgtgtggcatggttgctctgcatccctgggctgggagcttcttgagggtactgtgctgacaatgtctcatccatctttttctctctacccagtttggcttattgtgtgttcttagggctgctattgaatgcataagtgaatgaaggatctatttctgaggcatttcaactgaatatggtaattggatgtgcatttgaggatagggagtataattcccaagtctttagcagatactgaatggatgagtgatatcatcagccaaacagggaataggtttgatgggactgataagaaggtcccttgtatttatttatagacttgca

SEQ ID NO: 15622 - DNA, 1102 bp, Homo sapiens
agtgtttaatgtgataggacttaaacattctctttttgctagggtctataaaacatttgctattaatagccactacttttcatttttatctaccaaatttactaaggaaaaaaaatatgccaaggcttctattagtgtgctcaaaccttttctattatctggcaaataaatgtcactcctcttaaacctgggacagttcacttggaaagggacactaggtggtctgccctaaacatgatgcttcacatagtagggctctgacttgtcaacctgcttctgactgtgtcttttggtcttcctcacagttttgctgaagtaaataaggtgatatttctatagtcattggagatactgaaactgaaatacatcttccccaagtttgcacactaataacagtaaagccttggcttaacaccagaagtgaagtctaaaacattcaaccaggaaagcacaggtttgctatattttgaagttcatcgagtgacctggtctgcctgggccttccagggctcccgctgaggaatacaaactcaccctggccccagttgtgattcagcaccagccactgtccactccagctgaaatcctaatggggatgattccaagactaactagtttctgagatatcagcaaggattccaggaatctcccaggtagctgagtcccatttcttcagattaatccacagagaactgagcttggagagtgttagcaacatggagatcccacttcccaagacaggattgcctgccgttttcccacctaccctacccctcctctcgacatcccctcttccgccactgaagacaagaagttcatcacccacccctgaccgagaatgagggttgccgggggtatggaacttatttccagtggtgtcagatccaatcatggagttttcttgatttgtgtttcttctttgtatttgtagagccagacgcagaagacagatcatccgatttctagagcaaagccctttctctactttgctggcacacttcagaattatttacccctcccttagtgtgccaggctacagagggtatgcctatgcctgcgtagttcttgtctaactccttcctgtgaaagggagagcagtccc

SEQ ID NO: 15623 - DNA, 1168 bp, Homo sapiens
aacttagcaagatgctcagcagagaaaataatgaatcatcttttgctaagcctgtgagaaggatagaaaatattatacgggaggtcccaggagtagagtgaaaatcatgtgggctttgaaatcaagcagactttagtttgaatcgtgcactccttcgtgtgagctggtggactttggtcaagtttgagtctctttgaatctcaacttctccattttaaaaatacagatggtgataattggattctcaggattgtcgtgcccaagaagcagcctagtgtcaggtggcaagcagggattctggagccacattgccaagttcagattcctgctctgacatttactagctgagtcatctgcagcaaattacttagcctttctatgttcatgtccttatgtttaaaatagggaaagttgccatgaggaatagttaatctatgtaacgttctaagatcactgtgaagcacataagagctgcatgtgttcttgtggcaataccaggtggcattgagcagagatgccccacctgtggtactccccacctccatcttgctctcttactctccctgttcttttcttgatcatttttatgtttcctgatcattttttaaatgtgaaaccagccctattgttgtgattttcctaaaggattgtgcagaccctgtctagtgtatatccaccctcagagcagaagttagcatgactttcatggaaagccaggaagggagctctcgaggaaaaagatgagtgttgttattcagaactggggttaaggtttcatttcctttttgttatgaaaatatgttctgcaattgaaaacaaaagtgcaaagcgttctgaaaactaaaagtaatatacatgtttcttgagtaaggagtgaatgaactatttagaggcatataatacacttcacttattcgaagcattaaatattccagttactcattcattcaaactttcttacgtagcagttgtacatggttctatgccagattctggggatagaaataggaacaggacagtccttatcccccaaaactccaatcaaattgtctatgaatgaaattggtgatcaagcagttgaacaaagagcctctcatgactgaagatctaaaatgccaacagagagcacagagacaaggagaggccagtggcccttttgttaggatga

SEQ ID NO: 15624 - DNA, 1126 bp, Homo sapiens
acttctttgtttaaaactgccaagtggcacattcattcaattcattgatgctaatcatacatggaggaaaaagaagacagttcatattaatatcaacacattcctcaaatcatttatcacttacacgtaaagttgtagagaacagatttgtcagaattattgattgagaaaggaaagagccctttgttgtggaaccgtagattggtgttttctcttcattgctgcttctgcttcgagaaggagtataaccttgtcacgtgaaacagcattatttggggagcagtagatacaggccaagtttttaggagtctcagttaaaaacccgtggtcttaatattcagtgttacacaaaggattccaaatataaataaccttcacgctgacccatagattcaggtctgattcccatttcacaaatgggaatacggccaaggtatacagttaggtcatataaaagtgacattaaactcatattggcagaattccattgtggtgtgacttctgcaataatgaatggctgaaagtaggcaagataatgtaagacttgaatggggttgcattctgaaaggaaggcagccagaggtcctcagaattaaatggaggacctgcagtaaaaatatggctctattacaccaagcattttcctcttttcctttccattgcctgtctgagatgatttggcagagtttaaaaataaatgaagtatattcatttttccttcagagtttttctttgaaggcatttggtaaggggacaaaatgaaatatgaacacaggcaggatgggggatcaagacatcaaaatgttagcattatatccaacatatatatccttatgtgaggaggtatgcttgcttccaattaagatgacatcatacaggcggatgtgatgcttccaagcagtgttaatgatctgctaggtaatgcagaggaaatgatgtgtttggaatgggtttttttttcccatttgtacctttccacttctttatggactgcaacatgtaatgattgggattaggttttttatagaaacttgatttcaattttcagtactgattagagacaggattcttttgcaggcatatcagttatgttgatcattgcttttcacattttattgtagctgcc

SEQ ID NO: 15625 - DNA, 1259 bp, Homo sapiens
tctcacaagagtgtgactttcacatttccatttgtgtgtgaataaccagcagagggaagagcattggccaacttagagcagaagcactatccatgctttcatagagaagcaaaatctttgtccttagataaaggcctgattagcaataataactattgcagcctttagtacttttaatttgctgctatatacagctgtgactgtggtcaggcccatcacccatgaccactctcacccagcactaagggctgtgactgtaagagtcgaagggtctggccctcagtcatactgtggggctttcatgggcgtgcttggtgcataacataatctctgaatttcacctgcacttaatatacttgttggtcattgcctccctgtcaccttctccctggatatacatctcatccttgtttcccactatatttctcatttgtggcatcttgaaccaacaccaattgaaaagaaagaaaatcaggaaaaggacctaagcttcagtcaggtcctaacctgagtttcttcctcagcacagtgatctcacttgccatatcatctctgtcatcccaacgatctgtcctttgcatcttggtcatcgattgaattccttgaaatagaccccagtaatgcccttctgtggagagcactggtctggaagctgcaatccagagctgtcatgtgtctgagcagctatgccggaggacaggcttgattcaagaagggaagtggagaaaagaagcccattaatttccttaggattataactgcagcctcctaagtgtacttcgcttgattgtgagagactttgcatttcaggtgcaaatcatccctgggaaagagggaaggaggagcagggaggcctttgttcaatcaaaccaaaaaagagaattaaatcagtagtctttgaaattggctaagggactaaggccactttgccctggatcatttcagctctttcatgtgctgctgtgtgaaagccatccagtcctcagctttgcgagctggggacacctgttcctccaggagaaggagacctcaccagttgttacggatttgggcatcagatgtctgctttctgagagatctcatttatcctgcttttcctaaattataaattctgcattttgcagaataatatctgcaaataataatgtttcagatattattgttgttgatctaggcacagataagctgtgtagaaaatattatgaaagttctgcagaggactgactctggggatgagcattcagacacttaaatcctat

SEQ ID NO: 15626 - DNA, 1104 bp, Homo sapiens
agagcataaaagtcatttgaaggtgattgttttaaataattaaaaaactaatagtgggatttataatggtattctccaaggcaggagagaacttcatgtaaaattcttgcattcaggatcagaagcccttgtgataggcatagttgatacgaggacttttgccatgatggttaaccttcatcttgccccttactgtccccatctgtaacatagggatatcatcatcagtcatcatcagtcatgatcgtcatcattctcatctgagaatcaggtgaggaaatgttagttaaagtgctttgttaactgtaaaatgcactatttgtggaagaaataaattaacttgaatatgcacaagcttagagataccaagatgcatcttgcagcaaagccaactgtttctgtgcattttgtggatatcctaagaatctgaagttctgtggtgctttgtttgtgtttcagaaagcagtacttggagatacttctgaaattgcaggaaaatgttcatccccataggaagtggttacagagagcaactaaacttggcagtttaaaaggagactatactaagcacatctcaattataaatggatgaaaataatatttatcatagactttttaaggacttattcctttttacattatttctgaaaagatatagctggccccaatcagcatccattcctgttgtctcttagaggtcatggctaagaggtgagcctggtagatttgcccaagctggtaatgagagatacagacctgttgaaaggcacaggctcccattgtcttcttaacgccttatagaaacacttctggttcatctcaagcatcgtttgggtgactgttctgattcctcgcctcatcttcactgtgggagggcattacagctccctcagaactcctgtagcactttatctgtgtctctttgttatgctttctactgtttattaatacatacccttttctttttctttcattcctggcctcacttcccctaaaaattggggtggtttataggaaaccttgaagataataaaaaataatgataaatggtaaaaaccacggcaaataaaaagtaaaatgaaaaaatggatgatgaaaagtaca

SEQ ID NO: 15627 - DNA, 1357 bp, Homo sapiens
atattacattatttcattttattctcatattcagagaaagccacattatttctgttttataagtaaggaaattgagcctcaaagggagtaaagaacttgaccaggttactgagcgggtaagaatcagagttcgagtctcaaccttatccctgcttttacctgcaaagcatcccatccaacgcctgtcagagatgtcactcatagaattctcctgtatttgccaagtaaacaactccccgaagcctggatagcaccaagcccattttctcactccaattagattgaaatataatctaaacatgtatttactggatttgcaggaacactattttttgtttgttttttgttgtatctgtttaaagccttagaaccattgctttgtttggagtagcctgattccacttcagtcaaatacttttttaaaatttcatctttttttgacttggggccagacacattcacaggactccattatctggggtttctttgaatttggaatgcttttaaacacttataccttatttctgctgttactgaaaaaaatgccaccatggtcagaaggacctgtgctgttttttcctttgcatctgtgaggtaggccttactgagagaggcctgtgctggggcctagggtaaagcttcctcctctgggaactcccttcccttctagggttcccccaggggtggaggccttgctttcccatgcctctgggatgtaggagattctcagtttcctggcacaaacggagggaagggctgggctagttttgtcggggaggaggttgctgttaggcgggcaaatggatccttttgcttacaacttttaccattattcagttcactatttcaatggcaaatatgttggtgagatcccttccaaatttctctacaaatacttatacttttgataagcactatttaaaaaacttgttagttaaaagatttggtagaaaaatcagaaaatactgactcaaaaggaagaagtttgaaagattcctgtaattatattcccagaggcagaaccacggcaattatttacaactcttgtgactttcatggtgctacttccctgtttgttctgtgcaaatattctcctaatacatcattttttttcaccaaatgtgagcatactacatgcattgtagtttttctaaacttcttttaaaactaaacaatattttgtggacatctttccatgtcagtatatctggattcatatttgtagctatctatacttttacataattttaatgctataaaatattccccatggattctcacatttactccaataattccttactattagaccaaaaaatggaggcatggatatttctattttctctttgaccaagct

SEQ ID NO: 15628 - DNA, 1099 bp, Homo sapiens
aaagaaacattttgagcaaggcagtttagagaatcctaatgtctacactggcatagcacgagccatgtaagcttcttttttttctatgcaagagtattgatgtatgtgctgaatcttcacagacttgtcaatacacaggcagtattctaaaatagcactgaacagggagtcaggagactattgtctcctaaacccaggactagagttccctcgtactgtcactcctttggtcattaaatgcactgggcttgcccgcactttggccttcctagaacactgcttcataacctctctgtctgacttctgcatctccttccaggtcagctcattcacaagagttgctcccaagcctggatgagttgcaccttgcatcttgagcatgcatttctcacaataattattaagctgtgtgataatttctgctttcaggacactcatccattatcttggctgtgagctccttgggtacgggtaccttgtatgtttacttttatatccctagcacaaagcaagtgcctggcacatagtcagtgccctaagtattcgtagagtgaagaatgccagcctctcttgtccctggtttccttatgtgttgaatgtggttgagtttgtccattgctagggagagacttccagtaataaaatttactattctagatgcttctactgttatgttttatctgcccatttatctttcttagttaccaggagaaatgtgtgacacctatattataatgaaaacaatctcattacttatagtttatctatattaaacaaatttaattgcattttaaagcattctttgatactgttgcttttgcaataaatatggataatcttggttataagggagttaaaacaatgctgtaataaataaagtgcttcatgtgatcaaaatcaaatttgttatcctctctcaaaagcctgctctccctcttaccttccctaaactccagtgtccatttgccaaggccagaagcttccaagtcattcttgatccatttgtctccctcagtcctcactggcagtcaatatcccgagtcctatcaaaatagctcttaaaacttctgcctcttctccactccctcagccaccaccc

SEQ ID NO: 15629 - DNA, 1242 bp, Homo sapiens
atgaaagctgctgtacatccaaagcagtcatgcttaatgggctccaaagtggaacacattgttaaatccctttaagtcatcaaagaaaatcattttaacctcataaatagaaggcaattgaagtaaattgtagtagcagcaaatctgcctgacagtttaaccacagaaggaaaaagctgccagattgtgagtcattgggaagctgggatagaagctgactgggtgggagaggtagccaaggtcacggcgcatggagccccagtgcctgcctcctcagcccccagcacacctcagccgcatctctccaccacagtcatgtagacgcgaagcaaaaatgtgggcatgctcgtagttgagccttttctaaaatgttttaacatgaattctaatgtgaccacacgcatggtccttcgtgtgtctgtcacagcccctcttcagcacacagacttttatgtacatgtaaggtgaccgtggcattttgccttttaatgctatttattaaatacttttgtcttctctctttttctaagtgtgaaaaaccctcacagaaagtcatcgaggcaaaaagaggcaggcagtggagtctccctgtcgacagtaaagttgaaatggtgacgtccactgctggctttattgaacagctaataaagatttatttattgtaatacctcacagacgttgtaccatatccatgcacatttagttgcctgcctgtggctggtaaggtaatgtcatgattcatcctctcttcagtgagactgagcctgatgtgttaacaaataggtgaagaaagtcttgtgctgtattcctaatcaaaagacttaatatattgaagtaacacttttttagtaagcaagatacctttttatttcaattcacagaatggaatttttttgtttcatgtctcagatttattttgtatttcttttttaacactctacatttcccttgttttttaactcatgcacatgtgctctttgtacagttttaaaaagtgtaataaaatctgacatgtcaatgtggctagttttatttttcttgttttgcattatgtgtatggcctgaagtgttggacttgcaaaaggggaagaaaggaattgcgaatacatgtaaaatgtcaccagacatttgtattatttttatcatgaaatcatgtttttctctgattgttctgaaatgttctaaatactcttattttgaatgcacaaaatgacttaaaccattcatatcatgtttcctttg

SEQ ID NO: 15630 - DNA, 1354 bp, Homo sapiens
gagcatgtgtgcaaaaaaatgtaagaggaaaaaaagtaaattaaggaaaaaatcctcactcattcccatgttgtcaataacaggtttgtttgtgctttgtccaagctgtggagactcttgtacttgatcccctcccaccaattctaaagtagctttctccagatcagactttaatttctctgcatcaggtgtatcgtattgagtggctgccctgcagaagatgtgatgaattatcctgtagtacaagattatcttattcccctgcccaggtgtgagcacgtgctctcgctccctttcaggtttactatgtttaaaactaaactgctgcaaaagttctcaatgttcttttccaacacatctatatatatatggacacacagtcacgcaagctagttcccatgactcctggatctatgtgtatgcagaaggctacatatacatagttgcttctttcctttccattgtagctctttgcctctcaattgtcattgatacatgcattgctcttattctgtctggcattacaattgcagttttgcctaatggcaaaaccagccatcccattggcaaaagagtcaacagtatctgtgtttgtactgtgcagttttcaggatgagatgacagatagcacgactacactgaggcaccctcagagaaggcagggcctgatttatctagctgtccagccgctgtggctggaggtaggctagttgggatgggcagctaagcagtcttctcttctgcctttatgagattgggtagaaagatggggcatattcatctacccccaaaagaacactataaaaacagctcctctatatttccacctctttctatttatgcaactcatcttcacagattgttctaaagtaaaatagatggtgtatgctgtatccacaaatcatctgtaacaattatgttttcagtgctgtgtcattccaaataaacctttggtaatcttcaacgattaccctaattccttttgatgagtctttttttttttttttttggaaattttgttccagtcggatactctgcttgaaacagttggtattggagttgttatttgtgcagaaatatgcttgttcttccactaggttgcactccacgcccccaccgcacctccccacttctttcattccagtcattgctggtcactcggtgttccctgacatccagcaattactgcagcaccaataacagctgccaacggagagcccttaaaggtgccggctgtagactcccagtccgtgaatcactgataatcttacgaccttcataatcagcaatttcttctcacaccagcttcattttctggtcactttcctttttggcatgtttatgttcgtaggta

SEQ ID NO: 15631 - DNA, 1325 bp, Homo sapiens
tgtcatattcctccaggtcacattagacgtattctgctgttgggtgtccttggagtcacagagtaacagctgatctagactaaatcctatgttaaccagaaataaactccagagaaaggagtgccatcctattacttcctctccaccccctgactaacgctaccttagtgtttctgaatatgagagtagaaaaagaagatcattttttaaatatgtgtttttaaattgcatttttagaactctgctgcacagttctgcaacatctgcagtgctaagaaccgtggaccaggaagtgcaattttggagatgaaaaaatagctcatttctccttgtcagtctccttgtcaccactctttttgagactgtttttgcaacaacaaaagcatttgttgacactcgtgctgttaagagatttgtttatgtttatattatactcaaaaacaatttcttcatctattcctgtactaatggtttctctttgcagttcacagagaatttggggctctcttcatgccttgaaattttggggtccatagtgaatattttgttatttatttgtttggctcattctttatatagtaatggaaacataagtctaggagttagaaatgaattttttagaccttagtaaaaccatttaaccataaaatggacaactgagaattctcccagctgcctgaaagcgtcgccaactgtggttatcctgcaagctgctacctgcaacttggacgttgtttccacgtgctctgctggctacgattcttgcattctgggtttggcttttttctgtgtcatcaactatggttatcctctaaataggcatttaatgaaacattgtacaaattgtcactcatttgatgacacctgggaataacattagcaggctgatgtcctgcaccattatgtttactaatcacatgttctgtgtgctgtgacgactgtcaaagagtatctggccatggcggacactcagcatttgttgattgaataaatgttagctcttctcattgtgaaggactcacttttactgggataaacaaatgcagttaagaattctggcacccttgtaaggaagaaaagagagttcaacaccttcgagtctgagcgcttgtggctagagtttgccaggagggaggaaaccagtgaccctgaaaactgagggtgcctcaggagcagtgggaccacctgatgctgaaggacggactaatgatgtttcctcttgccttctctggtgcctccattgccctcatggaacagagcatatcatagagggagaaaagtcaaacttgtaattgtgtcttacagttactggcttcatcttcctt

SEQ ID NO: 15632 - DNA, 1107 bp, Homo sapiens
caaagtttagcaatttgtaatttctccacagatctgatagatttttcttcactagttgatcttttatagttgctattttatttttggaatgttttctgattgtaagtttcctgaggcctttcccaccatgcagaactgtgagtcagttaaacctctttcctttataaattacccagtcttgggtatttcttcataggagtgtgagaagaaactaatatgtatggctaactagaattaatttgtatgatatatagaaatgtaatttaaattaatgtttctctcttttcccccactaggaaagagaatactgtgccaggcctagactggacatcatccagccactttctgagacttgtgaagagatctcttctgatgctttgacagtcagaggctttcaggagaatgaatgtagagattatcatttaggtaggagatatgaaagatctggctgatatgcttttttaatgtttttttctcccccttcctacttgcaataaatggaatttaaattaaggtgctgaaagaatcttaagagaatacctgcgtagactgtgtgtgctgaaaacaaggacatttggatgcagagatgttgcaaaacttgcataagctcctatagtaaaagggaaggctagagttcagaccaggacccgggggaggattgggccccttgttttttgttcttgtattttttctattgtcctaactatttaatgtgacacataatttaatgtcaagctgcatggctccatggttgtcatatcactcccattttatgtgtcaggaaagttcgctctggggtggcagagaagttgtctttcttgtttgtaactgagtgctcagagcctgaaagacttctggcacattttaggtgttcagtgaatatttgttgagtggacggagaaatacacttagtcactgctcataaatacagggagaaccattaatatttagtcataccagagacatctgtgtttggctgttatcatacccttgtaaaatatattaatgaaaatagaacagttcagctttgtaggaatgctgtactactttaaacacaattgacatttgttgagaatattttcagttctcattgtggccaaaggaaat

SEQ ID NO: 15633 - DNA, 1188 bp, Homo sapiens
gctactggggaggctgaggcacaaggattgcttgagcctaggaagcggaggttgcagtgagccaagattgtgccactactctccagcctgggtgacagagcaagactctgtctccaaaaaaaaaaaaaaaaaaaaaatccgacagccatggtgttaagtccctgtagtcttcgctacttgggaagctgagctgggaggatcacttgagtgcagaaggttgaggctgcagtgagataagatcaccccactctacttcagcctgagtaacagagcaataccctgtctctaaaaacatgaaatacagaagttcctggactgcagaggaatgttaatggcatgctgattctacctgtgttccatgaacatgagcctctgtactagaaccaagaatgaagggaaagagcttactggccttgggtctcttgccttgcctcacatgttgtaggtctgccaggtcttcccatgagaataccctgcatgagcataaatgaaaaatggtaaagcaagattgccccagagctggcacagccagagtttcaaggcccagaacccagacattagactgagtggtgtggcttccttagaaacaaatttcatctaaaataagttacttctgggtgctaatatatctgaggtttttaaaaagggtgataaggaagcccacagaaccacacttttctgacattttagttactagaactgctgaggccaccaaaaatgttgtgatatgtaaagggagtgggcagctgaatgcatatacctgcgtccttacctaatatatatcctttacactacttattaactgctttgtgggaaaccaaaataaaagccttcagcccagtctaagttgtgattctaccctcttccaactaaggttagagcttagttcttagaactaagtttccagtctaagatacaggagagagagagagagagagagagagagagagagagagagagtgagtgtgtgtgtgtgtatagagagtgattcaccaatcaggcttcttgttctacagaaattctcaaatctctgtcatgaagatactttaccgcaacagttgcctttcttgattttgcccctacgtaatgccttttctgaacaaacatgctggagcacgagtctgccatcactgtctcaaattcttaatttctcatgcactctccacctttaaactactttttgctaaa

SEQ ID NO: 15634 - DNA, 1873 bp, Homo sapiens
gcaaagttcaacttatttcataattgcctacatttatcatggtcctgaatgtagcgtgtaagcttgtgtttcttgggcagtctttcttgaaattgaagaggtgaaatgggggtggggagtgggaggaaaggtgacttcctctggtgtttattataaagcttaaattttatatcattttaaaatgtcttggtcttctactgccttgaaaaatgacaattgtgaacatgatagttaaactaccactttttttaaccattattatgcaaaatttagaagaaaagttattggcatggttgttgcatatagttaaactgagagtaattcatctgtgaatctgctttaattacctggtgagtaacttagaaaagtggtgtaaacttgtacatggaattttttgaatatgccttaatttagaaactgaaaaatatctggttatatcattctgggtgtgttcttactgacaccaggggtccgctgccccatgtgtcctggtgagaaaatatatgcctggcacagcttttgtatagaaaattcttgagaagtaactgtccgctagaagtctgtccaaatttaaaatgtgtgccatattctggttcttgaaaataagattccagagctctttgatcgcttttaataaactgcaagttcattttaaatgaagggccagcatatatacttgcaagataattttcagctgcaaggattcagcaccagttatgtttgaatgaaccctccttttctctgagattctggtccctggaaatccctttctgctagtggtgagcatgtaagtgttaagtttttaatctgggagcagggcataggaagaaaatgtcagtagtgctaatgcattttgcactagaacgcttcgggaaaatattcatgcttgccatctgttcatttctaaatttatattcataaagttacagtttgatacaggaattattaggagtaattcttttctgtttctgtttataatgaagaacactgtagctacattttcagaagttaacatcaagccatcaaacctgggtatagtgcagaaaacgtggcacacactgaccacacattaggctgtgtcaccattgtgtggtgtacctgctggaagaattctagcatgctacttggggacataatttcagtgggaaatatgccactgaccgattttttttttttcctctttgcagtggggctaggacagttgattcaacaaagtatttttttcttttttctcagtcctaatttgaacaggtcaaagatgtgttcaggcattccaggtaacaggtgtgtatgtaaagttaaaaataggctttttaggaactcactctttagatatttacatccagcttctcatgttaaatatttgtccttaaagggtttgagatgtacatctttcatttcgtatttctcataggctatgccatgtgcggaattcaagttaccaatgtaacactggccagcgggcccagcaatctccatgtgtacttattacagtcttatttaaccaggggtcctaaccactaacattgtgactttgctttgagacctttcctctcctgggtactgaggtgctatgaagccaactgacaaagatgcatcacgtgtcttaggctgatgccactacccgatttgtttatttgcaatttgagccatttaaagaccaataaacttccttttttaaaatgtttgtggtgttacttgatgtttacaatgtaacatgtaacattcaaatgtatcaaatgaggcatctttaccaaacaactaaatcttttgagctctcagtttggagacttcttttgtgtaatgccagatttcctaaataacagtgtcagcattgctcagatttaatcaaggctcagaaatggaaggactc

SEQ ID NO: 15635 - DNA, 1113 bp, Homo sapiens
acagttgaggaaggtacttttgagatgtggcaactgtctcctggtaaaagatttgtcagactttaccctgctgctactactaccattgatgtagccttattgcctacttcttttttctgagacagcagtgatgccttgtcacatttttcgtcctaatttttacatttgtagaccagagcgagatcagggcaatccattttgaagaaaactatgatcaccaaataatactctactttaaagaaatttttatttttcaaaacttcaaaaatgtaactttgaaattaagtaaatttctattttatttcataaacttgaattagcactgtctttgtaaattccaaactgaacctttctcaattactgattaaatcttaattatttctcaccagacggtctggaaaatcccgaagcagaagcccgtattcatctaggcattcaagatctcgtagcaggcacagattgtctagatccagaagtcgtcattctagtatttctcctagcacactaactctgaagagtagcctggcagctgaattgaacaagaataaaaaagcacgagcagcagaggcagcaagagccgcagaagcagcgaaagctgcagaagcaactaaggctgctgaggctgctgccaaggctgcaaaagcttcaaacacttctacacctaccaaggggaacacggaaactagtgccagtgcatcacaaacaaaccatgtgaaggatgtgaagaaaattaaaattgaacatgcaccttctccctcaagtggtggaactttaaaaaatgacaaagcaaaaacaaagccacctcttcaggtaacgaaggtggaaaataatttgattgtagataaagccaccaagaaagcagtcatagttggaaaggagagtaaatctgctgctacaaaggaggaatcagtatctcttaaagagaaaaccaaaccacttacaccaagcataggagccaaggagaaggagcaacatgtagctttagtcacctctacattaccaccgttacctttgcctcccatgctgcctgaagataaagaagctgataggtaagtgcaaaaagtatttgtcaataactgttcaaagaaaaaatgtaagtctgaagtgagaaat

SEQ ID NO: 15636 - DNA, 1789 bp, Homo sapiens
agcagtgacccttccacggggccagagagtactcatcctttgccagcaaagatgcacaactataactatggtggtaacttacaggaaaatccgagtggccccagcctcatgcatggacagacctggacttctcctgcccaaggacctggatattcacaaggatacaggggacatattagcacatcaactggcagaggcagaggcagagggttaccatactgagtatctgtttttcctcaggcacatcatttttatctggaaagacttttctagctgcaatttaaggcagcaatccaagagacttgaataataataattcaacaacagctttatttttatgtggagaagggtcttgcatacaatagtttaaaaaagacaaaaaaaacctttgcttaaattcatgctgttctaaaaactagatcgattgtacatcttcacaaattctagttaacaattttattttgtattcttgcagttttaagtggatgctaattttaggggcataagccttttatggccctcttgcagatcttctgaactatgcacatttgtgctttttttgtaagtttggaccaacttttatgtaacaaacagcccctccccacctccagttttacaacaatcagaaagggcactgatttatttggtatttttctttttacaaagctacctttagtcaaaggtcactgtcagtctttgcacctgctttcagtgttattgtgaaaggtgtactttgtgctcatttcagaaaataaaacacaacctttctcttgatgcaacagttttataaaaaaaaaaatggtcaacgttatttttgttttgttttgcagattatcaaagcctagcaaaatgcatttaaatgaaatagtgggttttatatgaaaactatgggtggggtggggagggaaagtaagtgccttaacaggtaagcttaaggtctgaaaaaaatagttaacttttacccccatttgtcttttaaagggaatcaatgcattaaaaaggcaagaaactctgaagtttcaggggctgcctgttcagttcctgttaggtccattccctctgcttgtcacactttctccttttctgcctgtctttgggctgtgttgcctttcactaccaccttctcttgataggggagtgagagcaaagaaagggagtagaactgcaatcagtacatattgtttgagaagttctacaaagttttgtcatttaaatggttgaaagtaatagctccaggagaattttagagtaccattttctttcaggctgccatattatccctgtttccatttgccatggataattggagggtcatggtatagaagcaagagttaataacagaacttgcctaaatgtgttaaagttcatgggggaggggtggcaaataccgtattttaagttatgcaattgcccttttaagaaagtcaattctattcacttgttaactagaaacattgcttagattgaatttattgaagcaaaaagaaaaggcaatgagagagaacttttatcttccttcctgtcacattctgtaaagttgattatgacttctgccagacttagagcaacaactttagttcattttaacatttttttttaatgaagagcatcaaagaatggagtagtccttatttaaactgtaatggtgtcaagtctcactgtgtgcacactctcacacatacacacacaattatactaattctagaaaggaaccaaaggtaaataaccagtgtttccattatcactaaatggaaaaattgactggaagttagagttgtgccaattaatc

SEQ ID NO: 15637 - DNA, 1214 bp, Homo sapiens
gcctccaagcctctctccatttctctaacctatgcattttagagcgagaggaccgcctcactagtgtcaccatcctgccttttctaaaacatgcaggctcacacattctactcctgcttaatgtctgtgttaaacgttttctaaccatttttgttttatttttctgaaaaagttaacccctcccaactcctcacacattggctcttcctcttgagccacaaagttttgattcttgcgatgtatgtgccttattttatgttaatcttgtcaatgagagggaccagttggtgttgcccaatcagcactccaaggctgtgtgtgcaccagccagagagcgcacggtggtagcagagtcgaggctgtcttgtatcctggtttcatgtgttgttttgaactgataggaggatgttctcttctgacaagttacccttgtgtatcctgcagacatgtaaaataaaatacaagttcatttttttcaccttttttagatttttttaaaaaataaaatgtgtaatcctttttttaaaagaaacacatgtaaatacatttaagtattgtaggcatagcgttcagatgtgactggcccaggcgttcctcggacaagcctgcattccccgtgatcacgcccacctcaagcccaggggctgcagcccagccacagatgaactctacctttgctttcagaaccacttagtccttttgtaacaaagaaaaaaaaatgtttcttacaatgtcaataaaaaattctttgtatggaaatttttattgggttgtttattaaatgcatagttgaatggaaagattgctttctttgaaaacatccagagcctgtagctggatccagacccctcacgtagaagatgaatggacttttgctgtgagatccagattccttagccctaaactggagaataagatgcaaatacatacatgctcatggtgttttgaggatgtgtacccggggggcacaccagttgcaacaattattgtgtttctttatattattgctttctaaattcagtgaggaaggatggtgatggggtttaacgtctaacaacttaatttgtccctcttttgtatgttatcctctcatttcagagatgccctaccacatgtcaacagaaaatctgacacgatagaagcctactttatgtggcttttagtaactgacctcagccagaataaattgtctcccatgtttttcttgtgtcagt

SEQ ID NO: 15638 - DNA, 1507 bp, Homo sapiens
ttccatctctttcccattttaactgagaattgattatatatagctctaagtatataggtatttaaacaaccccacaagcggctgtatcagtaacatttattaattccactatagtgagggaggatttccattctaaataccttattttgagggatttataaaacttagttgtaaaagagaaagcccacatagtgggaataaattgcttcagccatttttagtatttgagagcactagggaagatgtttagtagctgtgtggatgccttttttcacaccctgtctattgaatgctgcatccattcacgaagttaaatgttacatgcagttagtccttaatgtggactggatctgtacttttgttttggattaaaacatttaaagatttttgaagtgcagctactccccacgtgcatttgatacacataaaagtcatactgtgtgtgcacaaagagtacatggattttccagcatattgctttaaaaaattatataaactgttaaaatattaacacctcaggctacctgctgtattctgtcccattgacccctggaattggatttactgcaagtgattgataattcaattatgtggcttttcccctttaatcttgccatttaaattacagtagaaagacaaaatcaagtaaaataaagtgttagataatagaaagagtgttaagaccagcccacttttctcatgtttatgttctttcatttggaccaagaatctccgcatggaggttgatttgccactggggactttggctaagactattaggtttgctttcaactagatgttcctgagacaagcagagggacactgcaattccccttccatgcctgctgttctcccccatgtaagtcttctttgaaattaacggatgtgtctcctttggaacagccccataacaaaagagaactactgatctgagcataggaaagtagaggctctaccacttttcagttgaaaaagcaagactttctctgtgtttctgaaacaaggcataatgttgtcacagaatcagagatccagtctcacttttccacaaatctccaaatctccagtcttatcttgtgtgctctaatggtttggttcaatccctttccaactcttgttttcaaagcatggggcctgagtgttctccactcctcctaagaaaggagcttgggtggaagggaccatgctgacctcctccatcagagggctcttccagtagtattctcggatgcaacctccatttctcagttaccattatttcctgtatcagctttgtccttcctggagggatgcacagtgatccggcccaccactgttgttgtcttgtgcttctgctctttcctatggtttcaggttattttctgggtttcccctattcttcttttatttctttttttttttatatttgctttcctttctactgcttttagatttgcaggagatgcaagtttcagctcaatgtttggcttctctcaatatggaaatttcagaaggacagaggagagga

SEQ ID NO: 15639 - DNA, 1097 bp, Homo sapiens
caacttctcatctccccagtgcagactgccgggtagattctggccttgggtacagtgctcatggccctctgccagtttatatgtacatatatttatgtaaaacattttctcccagctctttgccagctgttccacattttccagctgccacttcagtttgaaatgatggactgtctgcgtctccaagtcaaagaaccctttagtcaaaggtatggagggccggccgctgtgcaaatacatggcagtgccattagccgggctggtattattagttctaaaaaatacctcctgctccccttttcctctcctccctcttctctccagttaggctttccagagcacagtatatacactttgctgaaaattcgagtaattaggcctttccctcttaaatgtgatttttgtacagaatttggatgaggccgtttttttagatccctgaaatatgtgtctggtggaaataaattaacttttaaaaataaaagagtttcagcttgagcgcattgggcatggcgggtggggggcctgcaccctggccgtctgaaatgagctcttttcagtctatttaaggcaggaaccattcatcctccccatgctacactttttgtgttgtttgatgtcttagcatattatagaccgaaatctacaagaattgacctaaagtattaattttgagtatttatgtaattgctcggtaattttgaataggtgccttattgattgattcctgtaattatttcatttaggttttagattaaaaattaatagtagtctgacagtttcttaattacatgtgtcaagattcttttgaaggaggaaaatgctatgttttaaaatagtgaaatagcctcaaaatctcttaatttttctaaagcagaacagtatttcagttgaggggatatattaaagctgccgggactggttttaacaatgtaaactctgtgaagtatctgaagaatttgtttatgttaggaaatattggtcttaacgacctggtacacaaacactttggccagttaaactatattcaaacctaaaacaaacatgaaataacatttaaattagttgtaatagcatgcttatacagagtagagagt

SEQ ID NO: 15640 - DNA, 1177 bp, Homo sapiens
gggggaggaggagcgcggggaggaggaggaagaggaggagagaagggaaggagggagcgcgcgggaggggagcgcggagccgagggacaacttttccaccccgtgagtagtgcaggcggtgccaggtcggggcggggggcttctccacccagcacggggcaccaggccgggatgggacctttttccagaaagtcgattggatgccaggagaggcgtacggctgggggtttctttctttctctttcccctccctcccgcggttgaaccaaatcagaactgtcactcagggcttgtgagtcagaagggatcggattacacgatccccgaaactgatgccggagctgcacgagcgggagggagcgggcaggggcagcgccaccggcgcgctcgcacactcgcactcgcgcacacccgccgctcccactcacccgcgccgctctcccgccttccccgcgcgccccgcggccgcccgcgccgcaccatgcccgcggcgggcgcaccccgcgcccagcccggccgctcgcggtagccgtagccgcccgcggccgcgcggagcggggagccgccagcctgcgccccgtccgcgggtctatgggaagttcggggacttgacagccgctgccgccgcaggtacgtcccgctcgaagttctttgtttcgcggaccccgcagcccgctcctgcggccgcgcccgcgcctccggggccagaggtggtccccagcgtggggacgggatggagtgaaaatggctgtcaaaaggcgcccagatttagagagccgccggtgaggcgtccgagcaaggcttgcattcgctccctcctcctggaaggtcctttccgaagagtccgacccgcggaccggccggagacggattggagaatttcacctcccggaggggggacgaagtttgccgcagtggtggcggcgcccctcgcctccgcccccatccaaagggttcagaagaactccgcgagccccgcacgcgcctggctccttcctttgcgcggtggcgctctacggctcgggcttcgggcgcgcacggcgctcgggatgggcggaaggaggcgggaggcatggtgggtgcgcgcggggacctccgccgcgggggccgccgccgctggggcttctccagcccgggctatgcttcggagggcgggggtgtggtgtgagcggatgga

SEQ ID NO: 15641 - DNA, 1161 bp, Homo sapiens
aacttctgggtgatcactcactcccatatcccattagagtttgggagtgggggtctggcttagcctgcactgtggggccaggtatgcagcacactccaggtactgcccagcagcagctgcttctgctttacttggttcatttcccacacgtccctgtggtttgtctgattggggatctcttgtctttgcaggttgctttcacaaccaaaatttatcaccctaatatcaacagcaatggcagcatctgccttgatatcctgcggtctcagtggtctccagcgttgactgtgtcaaaaggtagagatgctgatggcatgctctgtgtgctcttttacacatgtttttaccccagcactgactgagtggaaatggaagctcagagaaagaagtcacctttcccaggtcacatagccctgtccactgctgtgcccttaagtggatatccttacacgcctacgaggcagcaccagcagaactttgtgccccgctccctggcgcttctcagcagtcaattgccctggtgtgctcaagactgtcacatgggtgcaagaagaaaatactgattctacttatatttttttatccaaaaataagaaaggcaaatattacattaccttctctgttccctcatttattcatctaataagcacaaaacggactgtgagtcagccctgaaggaagatacagggcatgcctccgggggcctcgaagttggtggagaaatcctcccttcccaaaataaatgatgttgagcacatgtctttggttgaagttgaagaaaccagtctaaactgagcttagaaatgcagatattccttctgaattaagatgggctgtgcatgggctatgtatgcacgagagacctgaatgtagatggtgcagtatcctggcaggtggagcgtgggaggatggtgaaaaatcaacccaagagaaacagagcctggcctaaattttaaatttttctgtagaggagacagggtctcactttgttgcccaggccattctcaaactcctggcctcaagcagtcctcccattgtggcctcccaaagcactgggattataggcgtgagccactgtgcccagccaagtatcttaagaaaggcaaacctgcccctgtcatttgtagctttatgtgtggggacctgtggtcagaactttga

SEQ ID NO: 15642 - DNA, 1144 bp, Homo sapiens
ggattacaagcatgcaccactatgcctggctaattttgtatttttttagtagagacagggtttctccatgttggtcaggctggtcttgaactcccgacctcaggtgatctgcctgcctcggcctcccaaagtgctgggattacaggcaagagccaccgcacctggtccagaatctcattttaatccatttattgggtgttccaagtctgtgaccttggacaagttacttgaatgctctgaattcttgtttccttaacagtaaacaggactcctaggactaaatgccagaggttcatgatgtagggtacagacaaggatgggagggcagttggagactaagatggggtgcttcagtggagaaggggaatgagaaccaggatgcacccaggagggaagtatcctagcacagcatgcctcaggccacacagtgaggaccacctcggctgatacatgggacggggcaagtggtgcatcaagcaatttagattgggctgttgaagggaagacaactgcttggtcaaaatacagagtgcaagttcagggaagtttacccaggggtgacccagcagcttcgtggctacagctgaccaaccttttcttttcttcccagttctcttgtccatctgctcgctgctctgcgaccccaaccccgatgaccccctggtgccagagatagcacacacctacaaggccgacagagagaagtacgtgtcctctttgggttgcctttgcaccatggctgccccaggcagctccatgcagtacctgtgctctgagctggtgcttctaggctgcaggttcccacagacatcttcctgcccatgctgagccatgtgcacagagggtgtgccctgggcttggactcctggctctctcactaacatgtcctttgagtctaaggagggaaaaggagataaaagcagttcccctcctggataactcattagctgctgctactgtatatgaaaacattgccaagccctgccctcaagaccagcaaaatcagtggtcagccaagaacagactcagaagaatctgacaacaagaaaaattctgatttaaattctagggtttatagcctaagacaaggggatgtctgcttggctataccgaaggtgaggctgagggcagtcaaggtgggaaa

SEQ ID NO: 15643 - DNA, 1214 bp, Homo sapiens
cctctgtccctgctatccccatctcccctggcccagacttctgcccttcacgcccatccctgaccagcagccccactcagtctgggctctgggtgccagctggttatagacatgccacctgaacccaggccaggagctggtggatgcgtggggctattttaagcacagcctcttggcctgcacactcccctggcccccagcccccagcagctcagctactggtcacctgccaccgcctggaatgctgattggcagttggctggggtgggtgggggctgggaagacactattataaagctgggagtgttgggaagcagccgtccccgtccagagtcctctgtggtccctgctgccaccatggccactcaccgcctcgtgatggtccggcacggcgagagcacatggaaccaggagaaccgtttctgtggctggttcgatgcagagctgagtgaaaaggggaccgaggaggccaagcggggagccaaggccatcaaggatgccaagatggagtttgacatctgctacacgtcagtgctgaagcgggccatccgcaccctctgggccatcctggacggcacggaccagatgtggctgcctgtggtgcgcacttggcgcctcaatgagcggcattacgggggcctcacaggcctcaacaaggcagaaacggccgccaagcacggggaggagcaggtgaagatctggaggcgctccttcgacatcccgccgcccccgatggacgagaagcacccctactacaactccattagcaaggtgggctgcctttgctgggaaggcctctgggaagctgcagagtggggagtcgggtgggggcccactggcttgggagggaaagcagcgtgcctgtgtcccccaggagcgtcggtacgcaggcctgaagcccggggaactccccacctgcgagagcctcaaggacaccattgcccgggccctgcccttctggaacgaggagattgttccccagatcaaggccggcaagcgagtgctcattgcagcccacgggaacagcctgcggggcattgtcaagcacctggaaggtgaggccaccttcaggagcctgggcagggtgggtgggcagcagccccagctggcttctcatctcagcaaagtctctcgcccatggaccaggctttctaggcgtggggctccacatcattcactgaaaaaggagggctgagaagccattttttagtttt

SEQ ID NO: 15644 - DNA, 1245 bp, Homo sapiens
gctgccacaggctacagcttctgccactgtgtgggcctgccctcagtctcagatccagaattcctagggagggactctagtggctgacctgaagcaggtgacttgcttgggctggggcccaccctctgtgggaagatatgtgagcaccccagccagccctgccaactctgctcctaaatccacccttttgattgttaactcctcattgttttttgctgttggctaaggaggagaaccacagaaatttgttccaccttctgttaggtgggagaggcatggtttttccagtgacttaggagcccctcgtgctgatgtgttagggtgactgttttgattatgttggaatcacaggctagagctgtgtaagtccctttcatagaggagaggagaggggtgtgcgtgggtttgttcccagagacggcaggctgggtagtcaggctccaggtttgaatccttgccctgtggtctacggcaggttgcgagtggggacggcgcctgcctggtgcatggtgctccatgggccacaccgtcccggagcgggtgatcatccgagtctagccatgagagctctgcccaaccgggctacgctccttccccacagctcttcacccagatcttcggggtcggtgtgaagactgctgaccggtggtaccgggaaggactgcgaaccttagatgacctccgagagcagccccagaaactaacccaacagcagaaagcgggtgagccctccagagaggctgggccctgggcttccctaaactgcaccctggatccctcagcatcaactccctagagggaagggagcagtctggtgcagagggtttggtggcagctttgtgtggtgggcttcctggggtctccacccagtgcagtcaggatctatcaaagccttttctcagtggacgatgctgaccacagcaacttccatgatatgccaggggcttgtgtctgcctactggttagactttgaccagtgaccagggacagcctgggccttgggcacactgcccagtgtggtgcttggtacatggaggcctgcagaggtggcactgagcagcagaaagaacatcagctttcaagtttgttaggcctgggtttgagtcttatctaccatttgccaggtaggtgaccattgcccaagaaataacctctctgagtctgttacattttctgtaaaatggagaaggaaggctgggcatggtgactcacacctgtaatcccagcactttgggaggtcaaggt

SEQ ID NO: 15645 - DNA, 2161 bp, Homo sapiens
cgaatgttcaaattcatatgtgtggtagtgattcttggaaagaatttgaggtccccaaaggtgtatttttgggcaaatgaaaccataaactccgactggcttctgtagatgccaaagggctctttttcagctaaccctgggaaggctctgtgggagggaggtcggagccagctgtttctcgatctttggtatatctttggatcttatttgtacattaatgatattaacactccagtggggggtggggagtccctgatgctagggctggggtgggtggagtttgaagactcttgggaaagcctctcctggggccactgttgggggtgggagtgagcccaccacagaggccacaggcaggcccccacttcaggcccaaggcctggggcggggggaacagtcactgggtctcagattctgagactgttgtttagcttacctttctgctaggattggcttcccgcagagggcagggcccatcctaagcagcttccaagtcccacaaaggtggcttgtgggaggatttggaaggagctgcattgtgggcggggagtgtgtgggttgggttcgtaccagcaagtagactaggaactgagcccaggaaagggggatgttttcctggtgtttggatggtcagctgggagtgtccatcatcaggggaagatcaaacacaggtgcactcagctgcccagggcctctgggacacttgccttgacttgcaacttgccttgaacatcacgatcaaagcagcaggtgctgtggtctctcaaaattgatttttatttgactctgtggctctaagactgccttgaaccgcctgaggcctatgcatctgaacaagtgggtctctcccttgagcaccaggagtgggtgccagccggccccgaggattcccagcaccccacctatggtcttgccagcataggcttgctagttccttcttggtcagaggtagctgcagaggggggaggccaagggtttggtctaagctgtgccctgccacctggcaggaggcccactcactgcccaagtcatggcaacaggctggagcagcccaggagatgggcctaaaatgttctggatcccttgggtcctagtgttatgttccagtctgcccacctgtgctcaggatgcagccctgggatccagcacccatggaagcttctgctgggatggtgtcacctatgggttttgaaccagtgtggtatggtccttgggagctctgctctgagcttgccacactgctgagagcacccactgtcctgaccagagtctcagtggtcctgacccccaatgtgggcaggggctgggcaggagggtggggtctgctgtgggttcagaggactccacctcctggctggtttacctgctgctgcccattttctctgggtactgctggccagaggactttagcctacccctgaagagcctgtccatgtcattttcctactgccatagataccctaagcccagggccccttgaggcccagactcagcctgcccactggtgccggagacggagtggagtgggcctggatccgagggatgctacctctccctttcccacttgaggaccctggggagagatgggggcggggaaaatggaggtatgaatttggggtaagaggaagtgagatctccgcttgcaggtcagcccctgccttgcagggcgggctggcttgactcaggccctgtgagatagagggcccagcccagccccacccacagatcccctgctcctgttgtgttctgttgtaaatcatttggcgagactgtattttagtaactgctgcctaacttccctgtgttctatttgagaggcgcctgtctggataaagttgtcttgaaatttcacagtggtcctgtgctttctttgtgcttcaggggaatcctttcttcaccaagcccttcccccgggggagagagtggcctcatgctgtgtgcctgtgggcctgccgcatgcaagggtccaagttatcctgaccagctcctgtccaggagaggtagctgcaggcctgactccttcacctcctttctatagaccttgctagcaggaactgtattttcttttttgctgttaaccaggtgagggagccctggagtagaagaagccctgtcattgctgaatcctgttgcctggtcttagctgcagccaggagaccca

SEQ ID NO: 15646 - DNA, 2008 bp, Homo sapiens
tgggcaccatgccctgtttgtgaggactgttagagccccagatgggcgttccccaggtggtgggtgcagcgggcccagagcccagttttacagggatagtagtaattgggttgggcaccttgaacctctctcccgagtgggcccttttctggactttaaccctctctgcagtgccgcatggcagacagcagagcctgggggtggatgggagagggggctgctgaggagctgacccacccgccccatttcagagctgcgccctggtttcgccggacagagttggtgtttggagcccgactgccctcgggcacacggcctgcctgtcgcatgtttgtgtctgcctcgttccctcccctggtgcctgtgtctgcagaaaaacaagaccagatgtgatttgttaaaaaaaaacaaaaaaaaaaaaaaaaaaaacaagatgacgacgacaaccacaaaaaaaattgacatcagatgaaatgaaaaaaaaaaaaaacaaaaaaaactaaaggaaggaaaaagctgtaaaaatcactggcattcgtggggccactccccacccaagctccacgtgtgtccgtctgtgctcctggcctctgggggaccagctgggacatgaacttgtctgccaggcccccgtcgcgtgctgaacggtgttagtttgtaggtaacgcacacaccccacacctaaggtgtctgcatcctcctgccaacgcatgggctccacgtggtgtgctcgctggctgtcgtgactgtcagctgtctcttgggaggggctgtgggggcccgctgggctgcctcctttcccgctagttgtgcctgagagttgctgttgttcctgctttcccttcccttcctttcatcccctgaagggctaggtgtgggttttccgtgcccggtatccccacacacccagcacggacaacccttcggcagagcccaggccggcccctcaccccctggagtattgaaactggagtcccgtccccaaggccttcagagatgcccctacacacccagggctccagctctggtccttctgggggagtaaagtgcaaagaggggcacagcttagttttgggcctctcgccgagcaagagacagcactgctggctacagctccaacacagccagctgtggcaagaggactctgcctgggctggcccccctcctgtgtgaggtgtctgtcccttctctgctggccagcagcagatgcactggcagctcccaaccctgtttccgcccctcggccctcccccagcctgttcggcttctctgcagcccgcaagggggagcagacttttgacaaaggactgcgggcctcgctcaagtccctgagcccccagctgaagctgggaggggaggccaggctttgtgtctgggcatattcgtctgctgatggggtttggggaagcctggggcttggggtttggtcgggtggtgcagctagtggcagagcgggatcagaggtggtggctgcccagcttctgggctgagacaagggtctgtgcaggggtttactgaagtgggagtgcctttggaatctgggccgggagcagaagggagcaaaagctacagtgggagccagcctagggcacatgggaggcgtgagggcagtgctgcccgtgcagtgtcaggtgtgccagtgccttggcgggctgcagtgcgtgtgagggcaccttctaggtgggccagggatgcagctatggagataaggcgggctggggacagaaacaggtgggcacagggcccaggacaccagcggatggagggcagggtctagccctgtgctcctgagcgtcggctgcctgggttcgaggcggtgggtccccggccccttgtgatggtgtgtaccatgggggagctcggggacagggcaagcccgagcatggtggggctgcagggtgggtctgaagccaggttgggtgggggtggtcacaagccctgactgcagagggtcaggggctcctgccccagtgcctgcccactttcaattcacattgttttcaacaag

SEQ ID NO: 15647 - DNA, 1193 bp, Homo sapiens
tctggtttacagtggtggctgacaccccttgtaagaaagcattcctgggaagtcttctgtgggtccaaacatgttgctccgatcatcacaggagagcaaaaggccctagataccccctttggaatgtgagagtcttgttgtctgatatttgccactgagctggtgaagcccctctaaagagatctcgaccctggggagcagaattcttgtcatctatgaggggtcctgagaaagacttgtcattttttttcctggagttcttcccattgaggtcctaggatttgcacaccactgtcccacaagagctttcctgcctaatgaaaggaggtcttgtggtgtgtgtctcctctcttctctatagttcccgagttggcccccattgcagcccccaccctgtgggtagtcttccagaagtgatgcagtggtgtgagatgccctacaccttgttatttgggagactttgagagtcattcacttccatggtgactagtgtttgttttgcctgattttatattctgtgttgcatttctccccactccctgccctgctttaataaacagcaaaccaatatctaggaagaatgactgagggatagtattgggtattggccccatggcaggaacagccacttgcatctggtcccggtgccacactgcggtgcttggtgtggttgtggagcctgtccctgcgcgccttgctcccgttgagccacgctgtctggtgggtgattctctgccctgagccaccaccctggactggcccagtctccagagctggcacaccctgcctgttttctctttttagacacaacagccgcagtttggccagccactaagtcccaccagctgaggtccgaggaaagcggggtgactcatttcccttgtccagggcccgaggagagtgaggtgtccagcctgcaaagctattccagctccttggtgttggtttgcaataaattggtatttaagcagttctgggtctgcgtgtgacatttgctgctgagacagttctgtctgtgcatggtcattattgttgcattctagccttgaggtcccaggccaacgtacacagcaaacaccagcatggggaattcttaggggttgtttcccatctggtctgaatgcactgggcaagatctcaatacagctttagaaatcctgtaagattttgaccagtggggagaaaaagaatgt

SEQ ID NO: 15648 - DNA, 1149 bp, Homo sapiens
tcctttctttcaagggtgaaccaggccttccaccctgaccttgcatctccagactgttccagagaaggtgcggggccagctgctatgtggtggccgctgtggctgacactgagtgaaggtgtttgaaatgcaggagaggatatcccagcaaattgggatcacatgcttttgtctccacagcaaccagccactgcaggcagcatgtctttcctcccctgctctctgcttgctgttgttttgacgctattctgcttgcatgtcttctggttgggatgtggagttgttgctggactctcaggcgaagctgaagtcattgaagtgtgtgaagctctgtgcttgcatgagggcaagcaaggaatggctgtgcctgaggctgctctgggaaactccttgccccttgacctcttttgagagcattcacgtggtcttcttgctcatccccttataaatgtgctttgcctgcctcagcctcatggtcagagcagtggagactggagccctgtttgcacgttctagttgttcggagaaagcctaggttctgggctcaggtccagatgcagcggggattctgttctctgactgtggcgaccttgctttggttcttgttgaagtgaaccaagcccggccaccacgcatggcatgctgtgcttggctccccataagacgtcctctttgggtgcacggtgtcaaagtgtgggcaggagtggagagctggtgccctcaggaggagaccacagcatgtccatcagctcagcagagctcgacagccacaagtcctgagaagctttgaccttgaagggcttctgggagaggaggaatttctgcatggggcgtgaaggcacactgtcccaccacaactgaaccagaagagagtgaagactcccctcttcccatcctctgtgccaggtgccagactgtgctccttggaacttatggcccaatcttacctgttctccagggactggtcactgcctcaggacccccaagcctatgccctgagccatggctgctgactgactccagccaaggtgcaaagacgagattatgagacaggtcctcaggcctgtgttccaagtactcacaggggctctgggtgcccatcgccgggagtatggttcagctgccaccggcactgtccatttgcctgtc

SEQ ID NO: 15649 - DNA, 1449 bp, Homo sapiens
agacttctgctagtgggtggccagaaagaagccatcctctctcccttcctgactcaaattgtacaactgctcaaaggaagaaaaagaagccagaggttcctctgcatcagccagaggccaatcaccctgatccaggctgccaagttagaacccaagctcccagatcaagggacaagtcagaggtggagctctttgatcaaggggcaggtcagagatcaaggtccccattgaggcccggcagggacgaggcaaaagactggggcaggctggcaatcttaaaccccatttgccccaagcccctaaaaaaaaaaagtattccataaatacttgctgaatccaagaaccaaacctagtacttagcttatactgaaagctttaattatactatctcatttaatccttacaacagccctttaattgttatcaccctattgtatataagaaaaaaactaagacctcagtaaaaaaaaaaaaaagaaaagaaaaggctctcttcctcggcgctgcctacggaggtggcagccatctcctcctcggcatcatggccgccctcagaccccttgtgaagcccaagatcgtcaaaaagagaaccaagaagttcatccagcaccagtcagaccaatatgtcaaaattaagcgtaactggcggaaacccagaggcactgacaacagggttcgtagaagattcaagggccagatcttgatgcccaacattggttatgggagcaacaaaaaaacaaagcacatgctgcccagtggcttccggaagttcctggtccacaacatcaaggagctggaagtgctgctgatgtgcaacaaatcttactgtgccgagatcgctcacaatgtttcctccaagaaccgcaaagccatcgtggaaacagctgcccaactggccatcagagtcaccaaccccaatgccaggctgcgcagcgaagaaaatgagtagacagctcgtgtgcacgttttctgtttaaataaatgtaaaaactgcaaaaaaaaaaaaaaaaaaaaagaaaagaaaactaaggcccagggagacgaaagaatttgtttgttcaatgccagacagcttatcagtgtcagagctagcaactgaatgcccggtctctagactccaagattcatactcttattccataacataatttttttaaaagggggaaaaagactagaatcaggaagtaaaaagataaatgtaacagtttcagagattaaaggagcaaaccacaaggcaagagacaggtatcctccttgctcatccactgggagagtctagaagcctgacaccacagcaccaactaacacagcaggcccagctcttggcttgtaatctcaatctcttatcaaaacccaaggacttcttggagaaagggtccattccacagccagggcaggagaagaattcaaacctggaacttcctgtagtgtacaagaaaataaagaagt

SEQ ID NO: 15650 - DNA, 1196 bp, Homo sapiens
atatgtacttcacaaaatgtttattaggtagaatttgaaatacaaaagacagtagacagaagaacatgactcctcatgtgctcattgcccagttccaacagcagcctgcttttctccctcctggtttattttgaaacaaattctgccttgtatcatttcatctgtaaatattttcagccactgtttaaacttccagttttcttatagtgtcctaattaaaagaaagttttgtttgaatcaggctactaataaggctccaaacaccaatgcctcatagtcaaccctccatttttctctcttttttttccctcaaaatttatttggtaaagtaaatcaagttgtttgtttgtatttcccactagctggattttgctgattattacccacatgtggtttagcatgtcctttgtcctatttcctataagttggagttggatttagggtaacatttttgaaagttaggagagtatgtaatagaagcaggttcttcctaaagatgactgttgttcaatatcatcttttgcaaaattttaatattttatatgtatgtatatattttccctactatatatagtacacatgcacagacaaaagcacatcagtgaatgttgcctttgtcatatccctggaatgtgctgtgaacccttgcactagataagcagctgacactgactgaatacttcctgttgccaggtagcttctccttagtgtacacataggtttttcactgtcctcacaactctttgaggccgttctgttgccttcccattttgtagtttaggaaactgacccaggctcatgttgttgagcagtggaacctagtttgcctttgggtggtttgccctgagattctccgctacgttaaaatgctgatgttcatattgtttggtccataaaacataaaataaaataaaatgcttgggtccttgctctagagatctgatttaattggtctgagtgtggcctcttctgtgtcatgtctggattttcagaaactttccaggtgactctgatgtgtggccaagatgtttactaactgccatgtagtattctgctgtgtagatcttattatttaatgagtccccaaggggtgtgtacttaagttgtttcccgtgtgccagcatcacaaatgatgttgcagtgaatatgcgtttaagtgtctcttggaacatgtgtatgaatatcagctaaatgaa

SEQ ID NO: 15651 - DNA, 1104 bp, Homo sapiens
atgtttgttgaattgaatgtccatgcagtgtggtgaaaaacagcagcagtcctgtaaacctggttccattttgggaattgaagttcagccatattttcatgtttcatttgtgagtctgaattttggtgcctttataacccacagttgtaccaggaccgtgtattctttgcattgtgaacaagactggggtctgtaaaataatgacaacaaagaccatctaactgtacatcttttaggtatgtaaatattgttagccttggcttataagtttctgattttgttgattttggaatcctcctgttaaacactgtttacctgtcagcttttggtgaagtggcagtgcatttccattttgccagtgggaaaacttgtcagtttctgacttttagttctctccttcacagattttacgacatttctacaagatatgtggtacagtattgggcagatgaactgattgctggattggtgtttgattttaggtattcaaaacctttgaccacatggcccgtcaggatgatgagaagagaaggcaggaacttgaagagaaaatcagaagaaaggaagaggaagaggccaagactgtgtcagctgctgcagctgagaaggagccagtcccagttccagtccaggaaatagagattgactccaccacagaattggatgggcatcaggaagtagagaaagtgcagcctccaggccctgtgaaggaaatggcccatggttcacaggaggcagaagctccaggagcagttgctggtgctgctgaagtccctagggaaccaccaattcttcccaggtgggaatttctactttgcagcttccttctttcttgcgtaacatctggtgtttgggtttctccataatttattcttactttgtaacacattaattcttgatctcagtatttatttagctcttcatgtttgtaaactgctgcattacagtctttcagttatgtaggatgggaggtcagttggcttaaggtcagttccctcatttggtaaggtcagtagtcatacaaccatttgagatccagagccaaaattagagcacttgactcctctcacaaagacctaactttatctgtgtttagaggcttag

SEQ ID NO: 15652 - DNA, 1165 bp, Homo sapiens
aatgatgtatgtgaaaattgcattccattttataatacattagtatgttttaagacaaaaatcgtttagactgacaagccattcattataatcgataatgctgttttttttggagtccactttgagaagtgctcctttgtagaagtccttgaaactagaatcaggaaagctagctacatcctgttccttacataaattgttgagaaatcttgggagagtcacttcacctcttgtcagctgagaagattgattggaggttacagattagagttctcttccagccctatgttctgtgactctagaatgagtactgagaacatgtgatagttgggaggttggcagtggtagcacttcctggtggtgtgaatgggtaggtcagagaaggctggatgtactgagtgagcagaggcagctgcatggtgaggactatcaagtctgggggttctgtgttcgaagtctcaggtgttaggagagagagatcttgttgctttgcttttgtggagttaagatgaagatctggagtatcagcaggatgagcaactctgaaagcatggactcaaagcggtagagaccctaatgttagaatgaagtcagggcttcaggttatctgcagaagtaaaaatggttctggtgttgtttccagtttttaaccttttaggattttattgatttttttttttcccctctgcctacatcatcatctccccacactgtttggtgtgtgctgcgtagttttttacttcttttgccagcaggagctggggcaagttacgtaacctttccaagccttatttttttctcatttttgaaatgttgatgctgtcttcttcacagtatttttgtgagggttttgagagaatgtttgtaaaataatttgacacagttagtctgttagcacccttttgactgcccgcgcagtgcacagaacattgttatttaatacctgtccgcattctagccctttggaatctgactcccacccatgtcccaggttgctgtctcagcctttccttcctccagttattgcaagagcttttgcccttccttgacaagcctattcttagagctgtggcatttcctccagtggttccctgtggaagatgtgcctctcattcagggtctaactgggatcctccttgttccaagaagtctccctagatttctt

SEQ ID NO: 15653 - DNA, 1229 bp, Homo sapiens
gggaaatgtttatgttctgagctgaggcaggcttcacattggagtaagaattgcccagcatatctcatttctgtttatccatggaaactgtataaagatcacaagaaatggatcctttcagactcctaagtttatcataacctgagtttatctcttttttataaaagtacatttatgcacaatagtgcttttaaaataagttattccaagacttttaaaaactaattttgtcgtatgggtttattggtgctgtgttcctctttggaaaaggtttgcataacctgtgactcttttaaccctccccacagctcactggatctgcttaatgacttgcttgtgttattgcttccaggtcaggggtcaccacattgcaaaacttgatcctctcggaattagttgtgtaaattttgatgatgctccagtaactgtttcttcaaacgtgggtgagaattaagctgtaaatgctaattttaatgtaattttactttttttttaccccttccctctttttttttcttctgtccttttgtgtgtgtccttccctctcatcgttggccactcatagatacgagggcaccatgtagcacagctggaccccctggggattttggatgctgatctggactcctccgtgcccgctgacattatctcatccacagacaaacttggtgagggtctgagagcagtcagctgcgttgcttgagctcctctcgctgtgccacgacctgtggtagccaggatgtccaggcaggagggaaaggctcttaagtttcctttcattctgatcacttgaaatttatcggtattgtagccttagtgtgttttgggcaagttatttttatcttactttttcagccagattgtcttaagtctcaaaatttgaaaataaaattttggacagaaaggtttgtggcacagggaaaaagcttgtccacctggggcaggtggatcagaagcacttcagagtatagctcttttggcttcaggttttcaaatgtcagtgcagcactgccttcagtgaggcatgtccatgaggccttgctcaggaactgctgacacagccatccttttctgaagcccagtgtggcctgcccttgactggaggccatgtcccttaggggacgaattctagagcaagttgtgcagttgggtctcctgatttgtaattgctggtgatcacactgaggaaactttggaaggcattcccacagcgtcaggaggtcagggcc

SEQ ID NO: 15654 - DNA, 1790 bp, Homo sapiens
ggctactatgactacgtgaagccaagacttcggaccaccatcagccgcgccaagcccgtctggtaaggcttcagtccctgccaggaaggctgtgggaccctcccctcaggccagtaggcagttagccaggcacatgcagcagagggatgggctgggccaactcagtgtcccctgccctcactgccccctccctccatctctcaggtatgccggccgggacccagcggctgctccagccaccggcaacaagaagacccacctgacggagctgcagcgcctcctggacacggccttcgacctggacgtcttcaagaacttctcgtagatgctgcctagggttgcttgggccactgccctctccacacccatgactgccccttgcttctcaactaaagaatagtgcctcagcgctgcccacaccaccgccctcctcgctgtgccaccacccctccctctgctctcataggagttaggctgtcgtccccctccagtgcttggctgccccacaggccacacgctgcccaggctctgctgacttctgagcagttttccaggaggccggggggagcaggaggaggaaaggtagcccccgagggatgtccttggggaggggtcagctctggccacaatcctccccaccagtctcacccactaggataggaactgggccttgtgtgctggcttccgctgtcacccagcaaggcacaggctcctgtatttgagactaggatagcttcatcttgagcctgagccttagaatctgtagaggagcctggagtcggatctagccatggctggcagaggtttctagggtgggccccagccgtggcgtgaactgaggatgacccggggcagctggcaggagagagccttggcctgacctggcacagaaagggcagcttcagtctctgcagtgtccattatctgctgttccttcgagggttccaggctgtgtgtggggcccaagcatgccccacccacccctcctgggcccaggcagcacctggagcccacagagtctgtgtgtagccaggaagccccgctcaggtagccaccaccggggcactggctgctctgtcttggtcctgttaaccctccacctcctctcttggactccctccccaccccaaccactctttctttctcctttaacccaatggagactttctgatgcatcgttttctttgctgtgccaaagcaggtcagaagagggagaggaggggctgggggtgaggggccaggccatggccaaggggccagctgcccctcatttatcactctgaccttcacagggacagatctgatttatttattttggttaaaaaaaaaaaaaaggaacagaaacaactttgcattgcattggcttgacccataaactaagttatatccgtgggcatgtctgctgtgtctttctgtctgttctgccttctcccctgaggggatggggatgggccagtcccctcctaacccacctgggaagcagccccctcctcattggacagggggagtgatgaccaccacctgcaggccctcgccggcaaagccgtcattgtgaatgcggcagaggcggcctgggctgccgggctgtttgggtgcagtcctgtttctgagctttccctgctctgggtccttcccctggctccaccttgaaaaagtactctgcactctgtgcctctccgtttgagccagcgtgcctgcgggttcaccctaaccacacgtttgttaattagtgctccccagagcccaagcaacgattccaacctggagatggggcctctcaccagcacaca

SEQ ID NO: 15655 - DNA, 1093 bp, Homo sapiens
agcattaccggttctagcaagcatcagggtcacccttgggctagagaagaaagacatggcttatgagtgcactagtcagcctgggcatgagggccttggggacgggttggccacacaccacattgtctgggatgtggcagatgtcaacacagacccagcatctgtgactgtggatgtgcgagcagggggaacgttcaaggggacttgaggtgattctcttcatggagaagtggtgactaggcaatggttagaccggcaggatgcccagcacagctgtagagatggatacaagcgtgggcagggcgctgaggccaggaaaggcagctggatggggccaagccactgaggagttttgttggctgaatccccacccccagctcaccctgccctcagccttgtccctcccccacctggcagcccctgacacacaacccccagcacaccctttacctggccagggtggcccctggcccaagtccccctgatgacatcctcccgttgtattgcagtcccacctcttcgtgctgcagctagtgcaccgcccatccgtccgctcggtgctgcagggcctcctcaaaaagcgcctcctgcctgctgagcactgcatcaccaagagtgagtggctcctgcccctcagctgccaggcagccatccccattctgtgtggcccaagcccaacaatcctccttgtgggcacctcctcgtgtcacaccaggccttctccttggacaggtggctctgcagtaggggcagtggttagttccaggtggcccctcagagctgtcagtgggtcagtgactgggtccctgcctcgttggcatccccattcacacctccccatcttggggaccctttactcaagtcctttaccttgttgatgtcagtaaagcggaacttcagcagcggcaccatccctggcacccctgggcccaacggagaggacggggtggagcagacagctatcaaggtgtccctgaagtgccccatcaccttccgcaggatccagctccctgcccgaggtcatgactgtcgccacatacaggtaggtggttactgcagagtcttgccggaatttgctgctgctaaaatatct

SEQ ID NO: 15656 - DNA, 1941 bp, Homo sapiens
gtgacaggatggtcactcaggtgtggccagtcagtgaccaaagctgctaacagagttcactttgtcctcagctgctcccggaactgaccaaccctgatgagctactgtcctacttgggcccacccgacctccctacgaacaacaatgacgacctgctttctctgtttgagaacaactgatcctgtgtttaccccaagcccggcggggacacgctcacagatgtcaccacagccctgcccttcatgcccagccccatgggacacccggtggtctttcccaaacctcccccaaaacacacctggagccagagccttctgccgccagccctgcccctgaattggaagcagccctgtgctcgatgggaggggctcccaggccggcagcccttgccacctccctctgccaagcctgctgctgcagaacggtttttgctgaggtgcccctgcccagccctgtccagccttgtccacacacacatctcacgcccctggtctcacagcctcacaccttgtccttccacccctgcctgcccccacccagcctgcttcttgtccagcattgatccttctgtttcaacaactcctccactgggcagagctgggcatctggcagggctggctctgtcccctgggcctttggctccagtggcccctgtgcccagcagtccagctcttggaacctcgctgaatggcagcctcttgggggcctggagctctggcagcccagccgtgtgtggtgtcaggttcctctccccaccccagcttcaagcagaggcctcggggtgggggagctacaaagcacaacaatgtacatagtgtagaaacactaacagctgggagaggggagccagctgtccagccagcatgttcctgttgtacagcccggtctccctgcgcgctctgctccttcccatgtgcagacagatcagggaggaacctccaatgggtgggggacagtgagcttcggcctggccgaggtgggtgggtgggctctcagattcagctctgtgtaaagattctctagcgggctgcgctcccaagttccccttctctgtgaaagtgaagaattagtacagctgtgttttttaaagccacctctctgtctccaccccatgggcccacacccaggtgggggaggaggaagccactgcatctgttggctcagggccccagcctgtgcgagcagggcgcctgggctgttgtgtctcctgtctgtgccgatctctattaaaggactccctcttggtgggcctggccgagtccctcctttgtgctcccagggactattttctcctcgtaagccagcgacctgcctaaagcttgggctgtgcctgcaaagcttgtgcaggacctgggggccaggtcgaccttcaagtggcttttggggccccaggttgagctctggatgtttcaagccaaggctcggctattcccgccccatagtaaatttccttttccctggaattttccaagttggcttcagctgaagagctgttttgtgaagcatcccaggcttgcccaggagagacatttgccactatgtcaccttatctgggcttgccctggggcactgagacagttgtttggcagccccagcccagccaggggctcatccttctcagctcttgtccctgggaggcctctgcttgtcacttcccagagattgcagaggtgtgtcctgcctaccatctgcctgtccagcttggtgggggtccgggtcaccatttcctccagtcctgggccccatccttgagggccttcccagccagccagcaggagaggcaagaactgggggaacacaggaacctaggggaggaggggagcgctgggcatcctcaggctggcggccaaggcctgcccctggaggcactagaggagggcatctgtctgtgggagcccagaggctgcagggaggaggaggagggaggtatctggtgtgagc

SEQ ID NO: 15657 - DNA, 1292 bp, Homo sapiens
acctgtaatctcagcactttgggaggctgagaggccccggatcacccgaggtcaggagttcaagaccagcctggccaacgtggtgaaaccccatctctactaaaaatacaaaaattagctgggcgtggtggtgcacacctgtagtcccagctactcaggaggctgaggtaggagaatcacttgaacccaggacagaggtcgcagtgagccaagattacaccactgcaccccagcattggcgacaaagtgaggccatctcaaaaaaaaaaaaaaaaaaaagctatggttactcttctcaaaaaatgcacggaaagtcacacaattttacatacagttttaaagggttcacagacccctggggtgtagccattggtatagatagtttaacagtatcagaatatgaaaagggacttaagtaaatttcattttttctataattaactttttacttgaggcaaaaactttaaaagtttttaataacttttttaaatttcattctaggtgtgatccctcacatccacaaatctctgattggaaagaagggacagcagaaaactgcttagagggatgctttaaccaaccctcttcctccccgtcattgtactgtaactgggacagaagaaataatggggatatgtggaatttttaacaacagttaaatggaaaagcatagacaattactgtagacatgataaaagaaacatttgtatgttcttagactcgaagtttgataaaagtaccttttcatgtggtgacagttgtgtgttgattggctaggtttctcccgtgtgttttatacaaaaatggaattgataaaccattttttacaaaattaatttgtctcaaaactgttctgttcatgatgtattagaaatattttactcagactttaaatattttaaatctcagattggttattcagagtaaccttagaacagaaattgggaatatatctttacaatgattgataccatggtatattgactcttagatgctattgatctgtagcaccattttttacaaacgactaaggaaaaaacctgccaattaaatcatgatatgccatcaattatgagacatcccaatttgagagatgttagattatagaaaagtatgcatttatgactgaaatggtagtggaattatttgaattctacaccaagcacttaccatgtgccaggccctttgcagagtgctctactgaccaagaaagttgttgctgccacattatagatgtggagcctaagggtcacagaaattgtgtgctatgccaaaaaacattgaactggtag

SEQ ID NO: 15658 - DNA, 2840 bp, Homo sapiens
gaaaatgaaaaaataataaaatcgcatcaagaaaacttattaccttagagattcccaattgatatctgtacccctgatccaagtaaggcctttatgaatgtattttatatttcctaaagaaatagggaatatgccatcagtgtaatcacctctattcacagtcatttaatttgaaaatctaactcatgtctcttgaattagacattccaattgggataggtagagtcatgttaaaacaatagaatagcaactgccatattggtagtttcactgctcaatatgatttctaataagagcagagctttattggaagctaaaactcatttttctccatagatgattctaacagtttaataaaaaagtataattatactttaagtgtcaacagattttgagtctagaagcaaatttcattttccttgtgttatatctaatatccattgacatgggtaagaaaactaattatgtctttttagtatgatgaaatgtgggcccagagtattggaaagaaagcaatagccctattcagtgtccactaggatggatattgcagaaggcatgagtttgtccttttttcccccttaccttaaataacacttcaatagctaactttttccaaaatatccatttaggccatctcttatttcttaaagccaaatatttcgtccccagtcttaactctgagttgcaagatcaggctggttggaagaatctttatatttagaaataggatggtgagtggtttgtttattctcttgtaaaattcctttttcagagacataactgcagggagagtcccaagagaactgaagaactggattatatcattaaacacatttgtgttgtaggaatttgggagtttcattttgaactgataagatattagacataaacccttgttccagcccacatgtgtcatccctgtgtacaaaagctctctggattctttttttttttttgagacggagtttcgctcttatcgtccaggctggagtgagtgtagtggcttgatctcagctcactgcaacctttgcctcccgggctcaagcgattctcctgcctcagcctcccaagtagctgggattacaagcatgtgccaccatgcccagctaattttctgtatttttagtagagacggggtttcaccatgttggccaggctggtctcgaactcctgacctcaagtgatctgcccgcctcagcttcccaaaatgctggaattacaggcatgagccatcacgcctagcctactctctgaatttctaaaagtcagtaggttgaccaaaaagtctagaaactggctttaagtcagtatgggacgtacttataaagagtccatggttttgcacgtttcggtagacaagtaaatctgagttatttttcaatgacttaccaatatttgaatagtaactaagatcgtcagtgtatctggacttctttttttgaagttctaaaacaattatagtagggatttattattttgggcctccatccagatgtttttccaagatcatttttaaaattcatttgtcttctgtttccagataacatactttccgttctataggaatcttcactgccaatcatagtatctaccagtggctttcttagactattcactccaaagctgggactgatgtcctgccagtagagaatctacagaaataatttgaatgaattaaaaccaaatcttgatagcaggagacagcttcctgatctagatgtacaattagagtttaggttggaaattactttaaaatgtgttttttggggatgtcttcaatctctgtgtaaatacccacatgcttatgcattgtaaaccaagtgtgtattcctgtgtatgaatttgtagaactgatttctgcttcaagagaagctgcacctttaattttataaggtcccctccacctgtaaccctataaatgtctgtaaataaaacactaaaatttgtagtgataggatcaatttgggaatatctgctgagagaccaaaaagttcatttttttaagtaccttggttaaagagtaaagattattcctcttattttttaaagaagaatgcactttaacaaacatagagctgcatgggcaattcaaacaaatctgtgaagtgcagtacccattcagaaatcacacttcctgaaaaccgttcaaaagcagagtccagacgggctgttgatctcactgcctgtaggttgaagctcagattctgatcaattttgagaggagcagggctgcttcaaaagagcaatgtgaatacagtcagaagcttcagactggtctgtaaaaatggcgggtcccgtatttaccactaactagcaaaactgacagaaaaactcacagagaaaaaatgtaagaatccttcctgctggtgtgcactccttacaatagacttttgcaaatggagttttacagtctatatttaaaaaaaattgtatgtttgtaacaaataaagtatgcagaaaagtgaatgacaatcttgtgcttgtgtctctaagtaattatgtggtgataggggagggaaatcccatctgttggggctcacgaatgggtatggaatcaggagttcccacttaaaatgacttaagtcattgcacatttcatctgaactatagcctgttctagaacttctgggttgccgtaacccttttctagtaagcaatttgtggagtaaatcaaaactgcaaattaattttatgctttggttgataacctagacagccacttggttcccttaatttcttccatcatttacaatggcttgaaagaaactgctaagtcttcattcattgtttatcaacattgtagttgcttaggaggtaaattagggcagccttttctt

SEQ ID NO: 15659 - DNA, 1102 bp, Homo sapiens
gttggtttattcttttttctttttgtttggctgaattgcagtaactagccttgcctttctattctgtagaaatgacagggtcttcacaatccttcaccagtggctactaagctataattagctgaatagaaagaatgtggaagtggtctgaggcatatagagtatatgccaagaacactaccatatatggcatcagctttggttaccagagaaattttcttagtcattagaccatgtaacagtaatatatcatatgtaaatctttagatatcaatttgaaaatcctccaaaaaaaggagcaaagaatgcataagctatgtgttggcaaaagtaatttatattaaaattttgacctgcctatgtaagattaagtggtaatgtcatagtggtgggtttttaagtcttaaccaatctctaaggtttgtttctcctgcaagggatggttcatggcctctcttcccactgcaggaagattgcagaaggctgtggattaattgtagcatttcactgatcttcactccagtcactagggacaatagaaacctgcaaaacacagattcattcgtaaatattattaatagcttattaaaggaaatggtctttgttaattccagtcagataatggcattgtacagacatgggaaacaaccaatttttttgtttttcagttgttgctatgaatgattttgagcctttttttttaagcttggcaaacatcccagctaatcaaaatagtcatattcctgagaagtaggaaactaaaacttcttttcatataattgttagaaggtttgtttcccaaactaccatagttacaaaggtgaaaagccaaattttaggaacagaatcaaaagaataaaaatctgtgaagagatcctactactcttccttctatgttttggttttggtttctattgtccctatcatttcagcaagtggaacagcagcaagtttttcagtgcatatgctgcacaagaacaaaatataaatctgtatggcaccaaaaatcaaagtgaaaaccaaaccaaaaacccaaacaccctatgtaactatcggaggcatatacgtggtataaatgactgtagctgtgatacacacatgg

SEQ ID NO: 15660 - DNA, 1102 bp, Homo sapiens; identical to SEQ ID NO: 15659

SEQ ID NO: 15661 - DNA, 1099 bp, Homo sapiens
tgcttggagtagaatccgttactaaaatagtttcaaagttgacaaaaaattttcaaagataaaagcagttttacattgggggttgctgaggtaggcacaagaaaaagtcaggcataaagcacaaggcagactgtttgagtggattggttgctgctcactaaagttgttcccctgatctctaaatatggaggtcattaccaagaaatgctttggtatgaatgagagccagatctccactgtgtgagccagtgaattatggctaattcggctgttacagccactggttggctggattttaaaccataaaacttgaagattacctacaaaagtaacagtgtggctataagcctgagctttaatggatatacatcctcacagaaaagttggaaataaccaaaactgaagtcttaatttaccttcagtttaatctgtggatttgttcaaatactaaagatcctcaggtccagaattccagcatcatttattcttttaaaatttttaagaacttgatccattgtatcagtacctcacaatcagagttggcaaatgatggatgagtgattcaagcagtgcacccggtggaagctgaaatccatctgtgaatggaactgaagtgaacgtgaatatgctgactatatcctggaagcatttttataccatcttgaaatttcaacaaactggcttttgccagttaatccagctgtctttcaagaataaaagttggggttttcaaggatcgcctcttctatattttaaatggattttcagtagaaatgatttttactaatcaagttaatcccaccccatcaaaaggtattcctagaaatgtcatagacctaggtaactttgaattgaatgggagctaacgttctttccaaagttttcaggtattctttgtgtgacaccttctcaaccaggaggcaagtaaccccgcctccacaatcttagtattttttttaaactgcatgcctgccccttatttgagctgcctttttaatttattgcatatcctttttattatcttattttggtattattcaatctatacaatctttttgtatttattgggaaatgagtaatatacaaaaaggttttcatg

SEQ ID NO: 15662 - DNA, 1163 bp, Homo sapiens
aaggtaaccctatcctcttaaccctgtgcactagccctcagcccccaccagcccttggtccctgtactcttggcctcgtggctgtgaggaatgagccagtcccatcacattatgggtacacttggctcttggccataaagactattccttagtatggacattaagttgattctcgacacttgctccatgtgattttgggctgtttccaaaatttacactttcaagatatttcaaaccatgtgccgtaagtctgaatctgaaggcagttccagaagaatctcccaaatggtttgaacacattggtgtccctggaataagcactgttctgaggggaataacactgaccttattcactcagcatttgtcacatgtgtgacatcggccagcacaatattctcaggagaagcgccccatgccggttgacagctgagtctgtatttctgatgccctgtggttccttccagagagcccaccagcttccgggacacttgactcaggagcacgatgctgtgctcagcctgtctgcgtacaacgtcaagctggcctggagggacggggaggatatcatcctcagggtgcccatccatgacatcgccgccgtctcctatgttcgggatgacgctgcacacctggtggtcctgaagacaggtacaggaggtcaggggtcaggagggtccttgtcctaaggagtacatgtgtgaattttatgaagttctggagacagtttttgcagcttcgtgttgggtgctgctgtttgtcacgaccaataattgtctttcctgtctctgagatcagccagaagagggcttgagatcagttaccagacactgggggtgactgtcacactaagagcctttggggactcaataatactgggatacagtatttaggactggtatcctgttcctctgcccggtggggctcctattgactccctctgggtacagtggagttgcccctctgcccaggtgtggtggagcctagagagagtgcagtggatagggacctcacctcagcttgactgatattttgagctctgcacagtgtcctcaaacctgggacagaaaagatgagacccagacctcccaggagctcttggtcatagaggttactctctgtgtgtccttgccgtctgctgctttcacaatgggatagaattgggc

SEQ ID NO: 15663 - DNA, 1219 bp, Homo sapiens
ttttggtgttggacccctggggccttcccaggcttggtcaccctctgcactgtcagcacttgtctgtctgctttgttgagcagggcgtggttctccagtctgccctgtgcactcccccgccacgcccagcccaagagggctgctttagggacagacctgggttgttacctgcctgtctctcccagcttcttccctccatgagtgcttattcacatatgccggcctcttgcgtaggggtctgtatcagccccagcaggcaggtggagtcctagaattctgaacctccagagcagaggagcttcccagggaagctgattggagattcagtgcatggctgggggttctgatggagctgtggctactgaaccacagccatcctgggaggctttctcccatcagttgtctcacacttagctgagtgaaaggcaccctgacagcatgtggtgacaggtgatgtgagggctgggtgagcacttgggaggcgctggctctgggagaggagaagatcccacttggctgacaccacggcaccaagagccaaactccatcgttgtcttcaccaccctgaccagagccttgtgctgtcatctaggaactggctgcccaaacaggaccctggcagcctccctgctgctgcggggattaccaggtgctgggaggcaacaagctttctaccttccagcctctccttagagacacctattggcagaacctgactaaatagcagtcagggaactgggttgcctccagccatacagaacagagagtaggacagtggggtggagctgagatggagaggcccacagccctcagcactgtaggctcccaaccctaggctgtttccccaaaaagaaaaagtctagtcactgctctgatgcttggccactcacccaagcattggggtagtttgtgctggcttcactgggcaccatcaggcacacccagcctgtagtttttgttttatattacctaagtcggccaggtgtggtgggatcacgcctgtaatcccagcacttagggaggctggggcgggcgaatcgcctgaggccaggaattcaagaccaacctggccaacattgtgaaaccctgtctctactaaaaatataaaaattagtcgggcatgatgacaggcacctgtaatcccagctactcaggaggctgaggcaggtgaatcacttgaacccgggaggtggaggctgcagtgagttaagattgtgcc

SEQ ID NO: 15664 - DNA, 1049 bp, Homo sapiens
ccacactctatccttgcccaggtacatgagaagctggggtcagagctgccaggcctggagccagccctgcaggtggacctggtgtgggccctgtgtgtgctgcagcaggcacgggaagcagagctgcaagccgtcctccaccctgaatttcacatccaatttctaggtgagccccctgcccctagtactactggaactgggaaactgcctggtcttgtctgcctagtgccaggtgagaatttggggcagatggaggccagggctctccctccccctcgctctccatcctctccctgtaggtggccagcagaccgtaactctgctgcctcctgacccagaaaactgggctgggactgggtgtaggggtgcactgccctctcatcagggtctccccatctctggccgtaggcccacctccctcttctttctccttgtctcctagggggcaagtctcagaaggatcagaacaccttccagaagctgctccacatcaacgccactgccctgctggagtaccccgagtactcgggtccccttctgcctgcctcggctgtggcccctgggccctcagcccttgacaggaaggtgacccccctgcaaaaggagctgcaggagacgctgaaggggctgctggggagcgccgacaagggcagcctcgaggtggccacgcagtatggctgggtgctgggtgagggctccccctggttggcacagggcctggcattgcctgagtctaacgggactcttctaacccaccccgtctgcagcaagtactgacctagggagctgcagggtgtcagcctgggctccccacagtcccatctttgttcatctttcctgtgggggggtttctgagggatgtcccccaacatgttctcatcccacaccccttccccagatgctgaggtgctgctggacagtgacggcgagtttctgcccgtaagggactttgtggcacctcaccttgcccagccaactgggagccagtcaccacctccagggtctaagaggtaggtggccagggacctgttggccatgggggcaccatg

SEQ ID NO: 15665 - DNA, 1282 bp, Homo sapiens
gggagtgtgccctgtgggtggggaggtcagaagccccagggacacccagatgggtgagaggtccacccttcctggggagaagcagctgctggggggaatctagcacattccagagggctgtccgtgatggtctgcatggcggttaagggaggtgccgtgggaataaagggagttggggaagatgccccatggagatggcattccagccggaccttgaatgatcatcctgtagggttggctcagtgaagcagacaggagggatggacccccgaaggggaaagaggccatgagcgaggtatggggaaagggagaaggagatcaatgtgagcctggtcccagccctcaagactgtgctgaccacgcaagggtgtggcctgggcgggaaggtggtggcccaggtgcagcatgtcttgccagcgctctgtggccaccagtgtctagaggtggtggagccagcagtggcgctcacagcctctgtagcgctgtctcttaccatgtgccttgcccttccctgaaggagaaccactgtcgccgcatcaagattctcggggactgctactactgcgtgtcgggcctcacccagcccaagactgaccatgcccactgctgtgtggagatgggactcgacatgattgataccatcacgtaagtaccccgtggggctgagaggagtggcctggggcatctacacattgaaatcctagaagctgagccaccttctgccccatgtgggctcccctctcagggtctcgctttgtcctgatgggtctgtctgaggctgcagagaatgatgccagcattaggaggatgctgggttcaggaaagcatgaaaggatgcttccgtgattccctgcctttacatttcgtgtgtggctgtatttctttgtccacaggaatcctgcatattgtcaggtatgcatgagtcatacaaaaataaattagtctttagcttagccagataagacatacagaaaggtttggccccaatctagctgaattctctattaaaaggaagtaaatatgtgtgtttctcttcactcagcaaggtaactgggtctcagatgctctctgtgtggggagacaggcttgggatcggggcaggtgagtcttcatggaatgaatattacacctgtgaggccaggcctgcccatttcttggtcagtcttatgttgtcattgtccttatcagagactgggatgaagacacagatgtttttgtcaagttagggaaggtgtggagctggaaggctgagctaatgtatggagtgtagatccaaacaaac

SEQ ID NO: 15666 - DNA, 1183 bp, Homo sapiens
cccagcgggtgagtgggtgatgttcatccgattttacagatggaatttcacccagaacatgaggactgtgagggaattgaggttctgagcctcagctgggtgcactgcccagccctccccatcctccccatgcgatttctttccttgtctgtagaaggggacatactggaaactgaacggggtaacaaagaccttcattccaagccctggttgtctttcctgaccagggcctccagccttcccccgcactttgcttcaggattccgagcatcacgtaggcttttagaggcctttggtgcggattgagaatggaacgttttggacgtggccctcccaatatggttttgtttgctgctctattctgggcacgttccccaatgcctggcttgaagtaggcgctgagcaaatgaatcccagtgccctggggtggctgtgtttgtcaggatggcattcccagtccgagaggcacaatgtgtctcattcacagcatttctccttgccccttgtgtgtttggacagatatttccaggcctgattctctcagatataaaaccggccaaaaggatgaagttcaagactgtctgctacctgctggtgcagctcatgcactgccggaaaatgttcaaggccgagatccccttctccaatgtcatgacctgcgaggacgatgacaaggtaggagcagccagggagcctgccatgctggagctgccagggactgatctctgtcctgccctcccaatatggcccccgtgccatttggctagatcagaattccctgttcacatgtggataatcttgtaaatgctgctcagagctgagctactttttatttcctgcaaaagtcattatagtgtacttttttactccttggcattctttgtatttgtccataatccatgtatttattcctgtttatccataaattcaagctaaaattccccacctgctgtctaaatggcctctgagggtattcattctggacagatgtgctaggccctccctccttaggtggatttcacactaaggctggccctacccacctgtcatccttgcccccagcgtccaagcctgtgcctcatctgtctgtgcctgtgcggcttcctggctccctctctatgcaggagctcgctgcctgcagatggccttcctctgttactctcggttagcagcccagccagga

SEQ ID NO: 15667 - DNA, 1864 bp, Homo sapiens
gtgtgtgggacctgctccaggctgatccctgtccgcacaggtgggtgatgtccttggctgctgccgtcagaggcagccccctgcacagggaggggctgatcctgcctcagctgtgtggccatgtgggggcagcaggggcctgggccatagctgggggaggccagaccctgagggctttgcagggcggccagtgcagtgatgcctggcgcttccagctgagacaggagtccggacagaggtgggcagggtggatggcttcgggcagggaaggcgggtagaggctgcatgtgggggcccctgtctgcctgtccttagggtgtggattaggctctggcttctgtgatggtgcaagaggcaggatggtctccagacaccttcttgcagagtgattttgaccaatgcctttccagcaccttcccctggttatgacagggagctcccaggccaggccacatgaccccacaggtaggctgaccccatggacccactggagactttgagggcagagctcgggcacctttcatcttccttgggtggtcctcatgtcgctgtccgctcatgttcctggtgttctggcatcaccttgtgccggtgggggctgggctcccgtgaggtcctagggcagaaggaggtgcttgcagggcctctcgctgctactgggacatccacaggacctaatgtttatgtggaatctccaggctgccatcgagggctcctgagctcatcctgaggacccagggtccatctgagctggctgtgggctgagatcctggctggggccctgctgtcaacctctcctccaggccctgccttgtccctgctcctgtgctttcctctcttcaggacaaatggtttgtccttatggtcccctttccactaggattttctcatcctcatctgtctatcccagccggatttaaagcagtcacttcagacaggagccacagggagcctgtgagggagtagtgcggtggtggtgagtgtggctgccctggctcccccagctcaccgtggtgctgtccttgacccacgagctgttgagaagggtgcagagcccctggcacagccaaccctgttgcccccagtgccgctgcccagcttcggccatccaggtggtgggtagacagaggagtgaaccccaaaggtgtccatgccccagttctaagccctgtggccaggtgctgtcacacagcaaaggggactttgcaggtggaattagggttagggatctaaggatgggaggggaacttggtttatctgggtgggctcagtgaccccttggaatggctgagggaggcaggagagcctggaaagattcgaagtgtcacagagatggtgccgtcattgctggcttaaagacaaggggccaggagccaacaccagaggccactccacaaccccagcgccagtcagcaaggaagccgggtgtcgctcacacaaccagaaggagctgagtttggcaacaacccaagtgagcctgaagcagattcgccccagagcctccaggcgtgagtggagcccagtccagcgacaccttggtttggcctgtgagactgagaagagagccagccacgccatgctgtgcctggggtccacagagccgggaggtcacacatgtacatcctggaagctgcccaaggtgtggccacttgtagggcagtgagaggaagccgtcgcggggaccatgctgccttctctgggctcacgactgttctggaaaggaccccatggcagacttggcaaggtctccacttcaggggcaaacatctccatcatcagcaactccaaaccccagccacttcctgggagttcaggaactgtgtttagccataatgtcccttggggtttggtgaaaaacaacttc

SEQ ID NO: 15668 - DNA, 2552 bp, Homo sapiens
gctaacgaaactgagaagggggcgtatgtttgacgaaggtttgtgcaagtcaggcccttctggaacacagcagggcctacaacgaggggcctttgcgatgggctgtgaggatgggggtggtgggaagaattggccacgttggagaccccatgccaccccaccatggtgagtgctctgtgcctcctgctcacctgtggtgagctgggcgagctgggcgagctgggcgagctgggctggggagagcctgtgaggaccgagaggagaaatgagaagaaggaacaaaaatattatttctatgtaatttatattttacttatgccaaattatttatgataatttgccattgctatactgtaccagtgtcaaatgctgcagcctgccaagctgtgattttgtgaggcttgtccctatgtaggatgcaccgcaggcccctggccactgaaagagtgtgcagtggactgtgggtctcccatatgcggtgccgcccaaaggtggctttgcctcaagcaacctaccctgatgttttactcattggaatgtttttccccgattgtggatgacttcttttctgatggagagagtccaggagggatggaaaactcctggatttaagctcagcatcccccacatgggcttttcgatcatcttcaggcctgaagctgcacgacctgaagttcgcctgcatttatcagccctctttgtgctgctccttgccaccttggggttcctgctggggaccatgtgtggttgtggcatgtgtgagcagaagggaggatgaggaaaaagagaagaaaccccggtactgacaagctgtttttgagtgccactgtttgccatcatctaagccactgaatcaagtgtatttcaggcttatttcaacattccaatgccctggttttcctgcttgaatctgttcgtggtcaaaggtttgggggaatttgtgaccctggaacatccccagagtgaaagatggagctgggccacatcagaataaggccttggccccatcctctcacagcctaggtgctctgcaggcatgctgactgtcctgattgcgatccagcccgaaattccctcctctgctttcaaaagtcaaatcccccattcttaggccacactggtgtcacaagctcctgtcagggagctggggtttgggaatgtgctttgtgaactctgctttaaagtgaggggccgaggaaaacttagaaacaggcagagttggaagcagccaaatcacagtgggtgttgtgtgtgtgtgcgtgtgtgcatgcgtgcgtgtatgcgtgtgtgaaagcaggtggaccattccactttttagctcctattgatgcaccaaaccaagtgcctcatttctgtgccaaatgtttgccttggtcgttgtggacctccttctctaacttgcggtggcatgactgtcaggaggtgctggcattttcagcagatcctcatgtgttgaccctgatgtctttagcagaggcctctagcatctcggtttttcatccactgcaggaatgtggccacagggagcagaggtttgtactttccccaagaggtcctcatcctgagacggtctctacccatgtttaacccaaagagtgcaggccaggttccttatccttctgatgaaggatgagagagctcatttagaagtcagagcaaactagggtctcagtattgagaaacgcagcctgccagggaatcacagagacatcggggtgcccgcgatggccctcatgaagccatgcctcgacggcattcaggaagccctgcaaacgtgctttttgaactcattggccaggtgtgatttttacacaaggtaaacgtggtcaagggcatcggggaatttgctccaagcagatagctccctctgaggaaccaaaggaagcaagtttccacgatttctgaagagctggtataggaagtttctttcttccttttgtgttacatgtgcattaaacagaacaagctgtgtgtcatcacagattgtactgtgggctcagaaaccgtgagagagcccccaccgtggacaccggctctagggccacaggaaaaggaacgtttccaggcattttgtctccagggctcccgctggacaggcacgtactgccctggggagtaaatgcggagagttcacgaactgtgcccaacgcatgttatagccagggtcctactaactactcagtaaaagaacgtattgttgtattcctccagtgttaagctatagccatgttaaaagtcactgtgcatttattctcagcatcaaataccttgtaacgtcttctctgccttgttagtgcatatttttacttttctgatactgtaaagaatatatccagtatgtaaatgaatgttctataaatcttttgtatagtcattttctctgctccttaaatatcatctctattcagagtataataaaattatgaacttggtaagcctccgtgagacggtatttgtgtaccctgaagtatgtttgtgtgtgtttgcacatgtgtgtatgcgtgtgcatgtgtgcacttttgtgtatgtgtctctgcaaatgtgtgcatgtg

SEQ ID NO: 15669 - DNA, 1212 bp, Homo sapiens
tgtggaggccttcatggggcggctcccctgggtgccctcatgcgggctgcagcatccaggcatgaaatgggggcttgaaaggcaggcagcgtgagctcagagagggccttagtgtacatattttggaaaatacctcctgtgctgcctggagggcctcagcacccacttccccatccctgtcttcccgtgtgggtgacgcttgctggtcttcaggtgtctctttgtaccttacatgctgtcttggtcggcttgtcttttgaacagctcctcttctgcagaacgccagtgggtggagagcagccccaagcccatggtttccctgctggggagcggccggcccaccggaagtcccctcagcgctgagttctccggtaccaggaaggactccccagtgctgtcctgcttcccgccgtcagagctccaggctcctttccacagccatgagctgtccctagcagagccaccggactccctggcgcctcccagcagccaggccttcctgggcttcggcaccgccccagtgggaagtggccttccgcccgaggaggacctgggggccttgctggccaattctcatggagcgtcaccgacccccagcatcccgctgacagcgacaggggctgccgacaatggcttcctgtcccacaactttctcacggtggcgcctggacacagcagccaccacagtccaggcctgcagggccagggtgtgaccctgcccgggcagccacccctccctgagaagaagcgggcctcggagggggatcgttctttgggctcagtctctccctcctccagtggcttctccagcccgcacagcgggagcaccatcagtatccccttcccaaatgtccttcccgacttttccaaggcttcagaagcggcctcacctctgccaggtaggtgtgtttccagctggttggaagggcccctctgtccattcactggggaagggaagggttcagacctgcagctgagctggcatatctctagtgctgggctgggcacctggagaggaaatccagagccgttggggtacttttccattttcctcgtccaaaaccaagcactggctcaggcttttcattcactcttcttggcttctgtgtttggccaccttggattccttccagttgtagaaagtgcagacatttgcagtggttctactttccatgtcacttgggaacatggctttttgtaaataacaaattc

SEQ ID NO: 15670 - DNA, 1233 bp, Homo sapiens
tgagatactcatttacctgtaccattacaaactctgtctacttcacttattagctgtatattgtattagaaggatgggccgtaagataccttccgtttcctttactgttgaaggtgaaagtgttttccagttttccatggctaggagaggcgggctggttttgtgcagtggatccagacctcagcctccttgtcctactgtcagaggaggggtttgctcagtgggccagcctgggggagccacaaccacaactgtttggaggggccttcacttgactccctgttctcacattctactccctgtgccaatttcagacgatgacccctggctatccccaggacctcgatattatcgatggcagaattttaagtagcaaggagtccatgtgttcaactccagcatttcctgtgtctccagagacaccgtatggtaagaatgaagtaacactagctgcatgtgctgctccatgcccaaggagggtgacaacagccccttgctctgctttcttttccagtgaaaacagcgctgcgccatcctccgttcagcccacctgagcccccgctgagcagcccagccagtcagcacaaaggaggacgtggtaagaaatctacccgcgggtcacaggcgcgcggcactcaggcgctgcatcgcggggtcgccatttttacagagaagaactcgtatgcagaaatgtttccatttgtgtcgtatctcagaagccttggatgaggatggatcttgctgggaaagatgtagggatgtggccgtgaaatccactgtgtggtggcaacctggccttgcatcgctgcctggcatcctgtggggaaccctcctgtaatatgcagttgatgggaccatcagtggtgactgtcgggcagcttagcattggtgcttttgaagaaacgagaatgcccaccccacacttcacgttctctgtggggattgtgccgcacgggcgccccagctctgccaccccagctgccttctcacacgtaccttgtggcccctcctgtctgttattagtgggtgcctaatcactgtccctggatctctgcaggaactcaggggctctgtccatggcctgatcgcgtccgtctgtctgcatagctggctcaggcgagagagtgttagtgggcggtgtttagggcgagttactgtgcacttcttctgggtggacttgaggacttgcctgagagtccaggacaaggccgagctcaggcaggtggagagaga

SEQ ID NO: 15671 - DNA, 1203 bp, Homo sapiens
ttccctctccagaatttctcattgctaagattcaaattatcatagtcgggccatgctctgcccaaggtcaccgcaggtgtgtggtcctcagggcactctggtcctgacaggacaccaggggtggcatgtgggggcctccttcccagctgggtcatcgtcagtcccacccagcattccatccgggcactgtcctttcccagcactgagagtgagtctgggtgcttggtcctatctccaagtggcctgttctggaaggagcatgctggcctggggaagctgcacatttccaaggctgtggccttgttcatccctgagagtctgagaatgccctgggtttcccatcagctgccttcagcaaccacagcatcttcccagagcagtggtgaccaggatgcagcatacagcacctttgagaagcagcaggcaagatttaaggaaggggcgcctcactccgccttgaggaagcgccctgcagcctgcttgtctcccttttaacaggctcctctgctgaacagcccctgggcgggagactcaggaagctgagcctggggcagtacgacaacgatgctggggggcagctgcccttctccaaatgtgcatggggaaaggctggtgtggactatgccccaaacctgccgccattcccctcaccagcggacgtcaaagaggtatgtgccacagccaggtcccagtttctgggcccattccactccctttcttgtcctggaaccccgagtgaatgggcaatgaccaggccttgtccctgaatacagcccacattatcctccgcacccaccttccgtcctggtttcacaaatatggtcgtggctcctctgtacctggcaagcggtgtggctgggagagcacagtgtgcagtcagctggcctgggtaatgcaccccagagatagctatgctggtgaggccacctcactcagggcactcgagcctctatgttctaatctgtagaatgggcacaaggagcacagcatgtgggtgggttgtgtgggttcgaggtagggctcttataggcctggccttagccattctccatagcccgacagcagcagccagtggcacacacagccttccttcagggtcatcacactcacacagggtcctcagtcctccctccgagacctccctaggaggtgacccacagatgagggccacagatgagagcttcttgctcttccaagaggcct

SEQ ID NO: 15672 - DNA, 2117 bp, Homo sapiens
tcttcttgtctaagatgaacagtccattcttggggatttatgatccaagccgagctcaatgttcacaatcatgatgaaattaaccatgagccctaaaggcaagatgattcaaaaggtgaagaatcccagagttcaaaatgacaatttgttttgcatggaaaggtagaagtgattctagcacctgaagatgtttatttgaatgccttttcattggcatcctccagagtatatatagaactttgtgatgttagaggaatctttgtccttgtttattgtaagtcatattttgaatccatttatttgtttagacagatgcacacgcccattcagagggtgtgaggctcactttcatccctgactgaaagcctctctccggttttctcccccgcagtgctacacacgcagggccctgtcgatggcagcctttacgcgaaggtgaggaagaaaagctcctcggatcctggcatcccaggtggcccccaggcaatcccggccaccaacagcccagaccacagtgaccacaccttgtctgtcagcagtgactccggccactctacagcctctgccaggacggataagacggaagagcgcctggccccaggaaccaggaggggcctgagtgcccaggagaaggcagagttggaccagctgctcagtggctttggcctggaagatcctggaagctccctcaaggaaatgactgatgctcgaagcaagtacagtgggacccgccacgtggtgccagcccaggttcacgtgaatggagacgctgctctgaaggatcgggagacagacattctggatgacgagatgccccaccacgacctgcacagtgtggacagccttgggaccctgtcctcctcggaagggcctcagtcggcccacctgggtcccttcacctgccacaagagcagccagaactcactcctatctgacggttttggcagcaacgttggtgaagatccgcagggcaccctcgttccggacctgggccttggcatggacggcccctatgagcgggagcggacttttgggagtcgagagcccaagcagccccagcccctgctgagaaagccctcagtgtccgcccagatgcaggcctatgggcagagcagctactccacacagacctgggtgcgccagcagcagatggttgtagctcaccagtatagcttcgccccagatggggaggcccggctggtgagccgctgccctgcagacaatcctggcctcgtccaggcccagcccagagtgccactcacccccacccgagggaccagcagtagggtggctgtccagaggggtgtaggcagtgggccacatccccctgacacacagcagccctctcccagcaaagcgttcaaacccaggtttccaggagaccaggttgtgaatggagccggcccagagctgagcacaggcccctccccaggctcgcccaccctggacatcgaccagtccatcgagcagctcaacaggctgatcctggagctggatcccaccttcgagcccatccctacccacatgaacgccctcggtagccaggccaatggctctgtgtctccagacagcgtgggaggtgggctccgggcaagcagcaggctgcctgacacaggagagggccccagcagggccaccgggcggcaaggtgagctgggtctccatgggaggtgctccacgggaggtgctccacgggaggctaatgtgtgatgagaaatcagcctagtaggttagcttttggcgaaatccacaagggagggacatttcccttgcagtttcaactcttgtgaattttggcctaggatccaaatgctgtcatgctggtgtggtcccttggtaggagatttggaggatgggaagaaccaggcagaagacttgctgttaacgtcagtgcaggggcagggacagcatgctctctgctggaaagggccggtcatgcctccattgcagaatgggcttaacagtgaaaccattcttccttcgtgaatgttggtggatttacaaagaaagcatacttacttctgtccctgcggtataggtcagggctttgtggaagaatgccaggtacttcagtggggctgaaggttggggatgaagaagactactgagccctcaga

SEQ ID NO: 15673 - DNA, 1238 bp, Homo sapiens
aaagaaaccagtccctttatcatcaaggtgaattgtccagatccatcaccaagatccacatgcatgggagttttgtttccctttttaatagctgtggaaataatcatgctttttctatgttcattgtcatagatttaggcaaaaacctttaaatacatggcttgtgtgttaaaaatccccttggtattcctaaaaagacttgaagggaggagtgtggatctgagagcctggagcctggattcaaatctgtggactctgaggctcagagacagcttaccgggcctctgtgtcctcatcagtgaggtggtctgaagactcgttttgcagaagtgtccaagcctggttcacagtggacgaaagatcagtgcttacttatcccttccccctcgtggctttaactatggttctagttgtggaaaatcctccacagtctctgattagtgttgtggctcctggcaggagggtggaggatggagaggcttctctctcctgctcaagtcaggctgctcacctgtccttatggtggagtcggttggatggaggtgatgggtttcactgggactaatgttgctgcctgtgctctgtgcagggtccgaacacttgtacaacgaccacggtgtgattgtggactacaacacaacagacccactgatacgctgggactcgtacgagaacctcagtgcagatggagaaggtgcgtgtgttcatcttgtgtgcagttatggaggcaaagggcacagggaagacagcccactcaaatatctgaagtattttgcagtctgctaagaagaaaaaatttcccctgttttctcagaggtccagaatcacaccttcgtgtgacacagttgtgagttttgagggtcttcgtgagaataaggcatggtgagtttgggtcagggctttttgtgaagctgtaacgggtggatgagctgtcagtgaagttatatccaggagctccttggcctgaacttgtgtgtatgtataatgccagggaccgttcccccttcttccgtcccttccgttttgcatatggggatgccaagcgctggccacagccaaactagctactgttgtacggccccacatgcaacagacatcttgttttaatttctgtttgcttgttagtctagtgttcctgatttatggctgtatcatttaaatctctgttttcgtgaaaccgtctcacccaaacatgtcctctgttcacctgtgtaatatgcacattgggtcatagctag

SEQ ID NO: 15674 - DNA, 1153 bp, Homo sapiens
cggcctccgcggagtgtgttccttgccgggaacgtgtgtcccccgctgcagctactttgttttgttttgtctctctaacccaggtgaaatgctaccacaagaaataccgctcggccacccgtgacgtcattttccgcctgcagtttcacactggggctgtgcagggctacgggctggtgtttgggaaggaggatctggacaatgccagcaaaggtgaggcgcggagctggcggccctgtgcttgtgggcagctgcggttgaacctccttggttgattctttcactatcccctttaccctctttccaaaattcagcctactgacaaaattgttcccaaagtaggagaaaatgatcattgatccctgggggaaaaaaattatggataaccaatgaaactgcctatactttctgtatcatggggtgtctttattgcagatttgggagtggtgctgtactggttggaataaaggacaaagtcagtccatacttttccggttaattgtctccacaaatgtgttaaaatacattgtttttttcagatgaccgttttcctgactatgggaaggttgaattagtcttctctgccacgcctgagaagattcaaggtgggtagcttggtggaatactgggtggtccttgctgacactggtgaaaggtgcatgatggctacgctggggctgtagtactagtctcctgcctttgtgcatatttggagatttctgtgattaattttatttaaatgtaggatattggatagtggaacaagaaggcccacttgtgtcagtaagccccagaagtggcgtgacttgctcacaaccactcagccaggagagccttgggcatgactggccattcttgtaggagtaaggtggtattgcattgtggttttaatttgcatttctctgggggttagtgatgtttagcattttttcatgtgtttgttggccatttgtatatcttttgaaaaatgtctgttcatatcatttgcccactttttgatgggattatttgttttttttttttgaggatttgttcgagttccttgaagattttggatattagctctttgtcagatgcatagtttgcaaatattctgtctcactctgtgggttctgtttactctgatgattatttcttttgtggtacagaagat

SEQ ID NO: 15675 - DNA, 1172 bp, Homo sapiens
gagtcactgtgtctttagcacatggtggtgattttctttgtccaagcaccaaacttaattagagttttgaaggtgcttcctccttaagtgctgcctttccaggagattgtctctgaggtgttgtccgcacggtgtgggagatggctggctgcactctccaaactgggattttaacccgagtggggagattttggcagcagcttgggcctaggactcctgtttgtgatctcactggactgcagccccgtccacacaacctgcaccatcagcaactcaaagacctttctagaattgtcaccccagctgcagaagagcagatgagcccctggaagaagaggcatcacatgggcagtataatgctttattttttcttcccagtgaaggaagttgatcctcatgctcactgagttttaggaaagggtcacccagcatgttctttactcccaaatgaaatgtactgatgatgaaagaagtcattgtgagatggcctcagaaggttttaggaaatggaaaccgaggaagctcccctttcttgttgcagatcatggatgtgggctggccagagctccacgcaccgcccctggataagatgtgtaccatatgcaaggcgcaggagtcctggctgaacagcaacctccagcatgtggtcgtcattcactgcagggtgagtgcgccccctctcacatttgggggtctggctgggcttcagcctttggagttgagatggagaccaatgctgcatctgagcacatttccgctttgagctggtgcgatgtgctccttatgggtttgtctttaggttttcctacttgctcttaaagaaggaaacagagttatcacacctccccaagtttggctttagaatttataggattgtggtccctgaatgtgtagctggacatttgaaactgttgaccccaaattgaccacgattatgagagcaaatcgtttcatttttattaaattttatttttcatggaaagccctccttttcaaaagagctatgtatgcccttttcagatggactgtgtcagactttccatgccatcttgagttatggtaatcagttgatggactagatgatggcatgatgccattgcagtaaacgtgttgtcctttccacgtggagccattgcagtgcagacatggcctgtacatcttcacagagtggc

SEQ ID NO: 15676 - DNA, 1253 bp, Homo sapiens
gctctctggggtgtcagtgcccctgcaggcccctctgtgacctgcccttagacctggctgctcttctgctctgtcctgtgctggcggcccctcccacacctggagtttacctggcacttgtacccacccccaggccctcctctgctctgcagctaacctgaggggcatgacccctttggagaggttctagaatagcttcatcccagcatgttttatcgaggtgagctgccgggtctgtcaaaattcctggagttgtgctggctgagggcatgattgttttgaaacccctgggcctaattccctggtagggcagaaagaaggcagtgatgagccttgccagccatacttaccgacatcccaggacaggactgtaagggtgtctgtcatcttaatgacatactgtgtgagggttctttgtctgcaggcatagggtgcctttgtggctccccggggcatttaagacacaatggagaaggaaccttttccgtgattgtggcgcattgaacccgtggctatttacctgtgatgttcgttttcatattcctggtagcagaatcttctgtttactgcagcagcttacaaaagtgggatgtgaggttagattaattcatggactcaaaatcggcacatagtattgttgagaaaggagctgggaggcaaacctccctttgtgaatgtcaacttggcatatgttacatggacacagggttggagcttcctgggagccagtgtgaaaaggaaaccacaatgattggcatgtgcctttctggaaggtgggaagaaacaagaatcagcagagaaaatgtgcgacgtgggaaattatggagggtgtagactaaggcatcaggggcatgcaccacgtctccatgagtcgagcagaatgatgattttggagggatgtcagaggcaagctattgcagcatagcctcattgggacctctggcttttagaactataaagggacaattggtgtctttctgcttacattaccgttctatgggctgtggtcttctgggtcatagagagaatgcttcaccattgttcaggtaactactgtccctaaggctgggagaggtggccgggctccttacaggggagtcacagcctgtggtccagctgctctgtaagtctacgtgtatgtgtacacgcagtgctcacatgcgcacacaggcacagaatgtagtggtaggtgtgagcatggactagagttgggttgagtcccatccggggtatgacactggtgagctgtgtgg

SEQ ID NO: 15677 - DNA, 1227 bp, Homo sapiens
ctgactgttcttcatctttgtagttatacattgatatctgtgcattgaatatgtaggtatttataaacagtctttgcaatctggctttgtctgtgattgtccttgtatagtaggtctgtccagaaattgtaagcatactgtcttttttggtctttaagcccgtgaacgctacagcccgtgtagtgccaaatggtgccctaagcccaggttccctgcagtccactctgtgatttgtttgttgactgctgtgagccccacccccattctttgtttctaatttacacctagcaggctaaccctgctggcacctgcagtgcttccagggggaaaggaccatagtgtgcccctgtgaagagtctcagaatggtgcggaaggtgaatgcccacctcccgctctcttttcccactgtagaaactgattccagagaaattctccaagtgcggtgctatgtgggcttgcgggagaggtgttatgatcaaacagaaccattctctttaccctctgttcatggtttttcttggctctgtggtccagtgagttgtcacagcttcactcccaatttctgggatattcagggcaataatcttgccactgggtatttgctagttgaaattatgtggtagggagagaagccagtaagcttcacttctccgtttggctgatgtcactctcgaattctgtactttcatacggattgtaatagggagggtctaaaaggaagcttcagttttggatttttagagcttcttctaagtacaattgttgaatcaagaggtaaaaatggtatgttataactggaaatacgctgagattaaaaaggagataaattagccccattgggacagtgctattgggaatgtgaattgataccactttcctggagtctagtttagtatttattttatatgtaatgcctgaaaagatgtgtgtctcctttgactcaatacttataggaatttacacaaaggttataatcaaagattatagaactgttatactggaaaaacacgaaatattctaattatgaattaattggggattggttaaataaactatggtttgatatgctctaaaaataatgttacagaaaaaagtgtactgatatggcaaaatgtatgacttatagttaaaaaagcaggttagatgttgatagatacagtatgatagaaaaagatcaggaaggtatatgctgacatttaaatctggatatttatgagtgttttttt

SEQ ID NO: 15678 - DNA, 1748 bp, Homo sapiens
gcctatgtttaataatgttgaaataggatggaatattttgttaaattaacattttaaaattagaagacaccgttttaatttttaaacccttcctcctctcattgtaacgaaattaattccagctgcagtgagaaaacttaaaaatcatgatacaaaatgaaacaatatctgaaagtagttttataaaactgaaattgctgttaaagagaatgtgttagtgacttaaccatttgctctatgtgatgtttattatcaaatacatataattttgaagattttaatgaatggcttaagattttatctttgtgtagaatgtggctaaagaaaccttagttgagattcaagaagttggtgtctgtttctgattcttatcacaacttgctacttagtgtctaccaagtcctccacctctttgctcctcaaagagctgtgaaaaatgatggcaggagccggtacaacaccacagacttagagaagggcacagtgctgctttattgaatgatctaccaaggtaaaattttgccgggtcaagaaatagcaatttaatccatttaaaggaatgaatataatttgaaacattaacttatttcaagactaacatctcaaagtgttgagaccttttttaaaagagctttctggattttgagcatactttcactggctgtgatttataagaatttgtggtttgtggagtactgtcctaaatgccagggtaaaataaggcagtcccatgccttacctgccctgggctcagggcctcacatccttttggtacgcacatcttttctcttctcccttgttctgctctcccgcagcatatacctcctagccccaggcaattacttgtctaatatctatctctatatatttgcctattctggcttttagctttttttttttttttcctgagggagacagggtctggctttgtcccccatgctggagtgcagtggtacagtcatggctcactgcagtctcaaactcctgggcttaagcagtcctcctgcctcaccctcccaagtagctggaactacaggtgtgtgccactgcgcccagctaatttttatattgttttgtagatatgaggttttgtacgttgcccaggactcctgggcttaagcagtctgcccgcctcagcctcccaaagtgcttggatcacagctgtgagccaccacacccagcaattctttttatccaagaattttatcacctgagttttgaggtcattctgtgccatatcagagacacttaagaatttcccattccagttgctcctggctagcatccaagtggccctgccatcctcctccagcccttccttggcccagcagggaactgcttggccatcaggtctgtaggctgagtttatagtgaggtactgtgcctggtgtgaaggagcccactcttggggacctagaatgtggcctcaacagtagtcctggggttgggattctggttcagccactaggcaaaggtatttaatgacattcatgttcttagtgtatgttgccaatttagcaaagcatccatcgttttgaagaaataacaattcagaactttttaaaacagctgtattgagatataattcacatatcacacaattcaaccatttaaaatagactgtctagtggtttttagtatgttctcagagttgtacaaccatcaccactatcaattttagaacattttcatcacccagtaaagaaacttcttaaccataagtaatcatttttcatttttctcttctc

SEQ ID NO: 15679 - DNA, 1271 bp, Homo sapiens
gggtccaccccgtgcctacctctcccacgtcccggcgacggagcgcgcggggctctgggcggggagcccaccgggccgaggcgcagcgagggtgaagccagagccggcagggtcaggtcccgcagggcgcaggcgggcgcttctcgcagcccaaacccgggcggggagtgcgggaacccctagaactatgctgggagccccagataagaggaaggagatggtgacttaagtgacgaagtgatgttttgtccccaccgccttttaaagggagaagggggtaaaatttcatttggaggatgattgttacgcgagctttcagagttcagatggcgtcaagtggccatcgagtcaacatttaacaaaatgttaccgcataaaatattgtcatcgagttatctggcagctccgcagagaaacttcacaggcatatgcgttatatgacataatttgcatggggaagggggtcccttcacgattcttttatatggcaacctgttcttggacctggcagggcccagagaagcgaggaactccgcagctcgtcgacacgtctcgtctcctgtcccaattcagggcttggtgaggtgactcgcggtcgcgggtgactcgccggcaggacactgcctggaacgcctggagcgcctcccactgcagacgtctgtccgcctccagccgctctcctctgacggtcagtttcaaagaaacacagtctgggatccggagtagaaagaggccgtttcccgtgaaggccatagaggcagtttccaggcgcctgggtgacctgtctctgcacttccctctctgcttctccatccctgtttcctttccccactgtcccctgcctggcctttctttggctcattttctgccttcctggggtcttctggttaaaaagaccattggttccattcattggctgtaaccgcgggtctttaaaaaactttgtgacttccttgaatagaaagaatgtcttactctggatttctacaagcgctgctgagccattcccagggcaggcctttgtctctcccgcctttcagtttgtttgcccatctgcattttggcccaagctttccccatttctcagctgctcttacattatttcttttttcagaggctaccctgaccttctagtcctctgcattaaacctcatcaccgcagaccgttttaattcagcacaggtgtatcgagcacaaattatattcttggttccaatactttcagcactggtgggcattcatgtttcatttaagaaggataaattagtgtt

SEQ ID NO: 15680 - DNA, 1099 bp, Homo sapiens
cacaatgcctggctaatttttgtatttttagtagagatggggtctcaccatgttggccaggctggtcttgaactcctgacctcaggtgatctgctcgtcttggcctcccaaagtgcttgggattacaggcgtgggccactgcacccagccctctactttgttttttgtgcctttctcttccatagtgtccataatgatcatgcattaattactttcatagcttaaaaaaaagttgaatgggaaaaatgggtcactgtgtatttgagaacagtactggatgcttcgtgtttggatgtgtgggtggatctgcttctttcttccatatgctctgctgtgtgctccctggctgccctgctttaattttattttgttttacaccctgcatatcttgatgtctgcttttttcctcaggtctggagcccggcactgtggtcataacagagcaggcagtggatacctgcttcaaggcagagtttgagcagattgtcctggggaagcgggtcatccggaaaacggaccttaacaagaagctggtgcaggagctgttgctgtgttctgcagagctgagcgagttcaccacagtggtggggaacaccatgtgcaccttggacttctatgaaggtgaggcagcggatacgaggaggcatctttcagccagggaaccctggtccgtcccctgagcctgccttctcgctgtggactggcgtttccacttgccaggctgctgtctcagttacacttcgcccagagtggttataatgacccgtttgagtggtcattataggcaggacctggatgggtcttgcttgtccctgtgtccttctgggcatcagtggcgctgatgtgttgtaggagcttctcacatgcatgtggttctcatgtctccatgtgtgcctcagggcaaggccgtctggatggggctctctgctcctacacggagaaggacaagcaggcgtatctggaggcagcctatgcagccggcgtccgcaatatcgagatggagtcctcggtgtttgccgccatgtgcagcgcctgcggcctccaaggtaagcggcacttgatgggcctcggcgtcccctcctcccttcacttctgctct

SEQ ID NO: 15681 - DNA, 1297 bp, Homo sapiens
tcacaccctgacaaaatgcaggattctcagtgaccttgtgcaggaaaaatgacaaaaaagcttttgctgccccatgaggctgccaccaggtctataaaaaactcggctttcaaagcgctttggctttctgaattgtggttcatctaccctcaaggtactagccacccttgaaggccagctcacagctctgcagaattcccttatcacctcggccaaaacgtgcctttcaaggtggtgcttgcagccctgagctggtcctggaatggtgaattccttttggaagcaggcacgagaataagggagggacagggcagggtggtgtcagagagggaggagtcttccgagcccctggaccagcgcctttccctcccgcactccatcctccggccccgcctgactgcatgggcagcctggtttcctgaggaggcagagaggctgctcctcagagctcgtgggttcttcatcccgtccctgtgaaatgttagacccccggcaccttgccttgatgtggtctttgtcctttgcagcggccgtggtgtgtgtcaccctcctgaaccgcctggaaggggaccagatcagcagccctcgcaatgtgctcagcgagtaccagcagaggccgcagcggctggtgagctacttcatcaagaagaaactgagcaaggcctgagcgctgccctgcacctccgcagacctgctgtgatgacttgccattaaaagcattgtccaaaatcccctgttgtgtggactttgagcacactttacacaagaatctagaaaatcagatcgcgattaagagacagagaatcttggattaaccgcatgggagatgttcttccttttgaagtttcattggagcattttcaatgatgttagcctgatttggggtttcttcaagaacattctaccaaatttttgtactatttctagggaaatttttcagactttaaaattctaatggtagtcagatttcatgtcactaaacaagaaatctgacaatagtgccaggaaactaatttcctgatacattaaaaaaattccatgcaccacttgcaatgagagatgactgaaaaccaatgaagcagacagcaggggtgtttgagaaataatgcgtacctaaacaggcatatacacagtttccaaattatagtcacacacattcccaaaaccatccacaccagcttaatcacacgacagtaatcctcccacccattgtccacaatgctagtgtcttgatccaagtacctagggatgggaaacgggacacctgggctcaagacagcttgtcctattgtttctg

SEQ ID NO: 15682 - DNA, 1379 bp, Homo sapiens
gatgcaagctggcaaaaaattcaaagactctctgttggaacctgctcttgcatcagtggtaatccataaggaggccactgtctttgatcttcctaaatttagtgtttgtggtagttctcaagagagtgactcattacctaactcagctcatgatcgagaccggacccaagacttcccggagagcaatcgtttgaaactccttcagaatgcccagccacctatggtgactaacactgctaggacttgtcctacattctcagcacctgtaggtgagtcagctactgcaaaattccatgtcacaccattgtttggaaatgtcaaaaaggaaaatcacagctctgcaaaagaaaacataggacttaatgtgttcttatctaaccagtcttgttttcctgctgcctgtgaaaatccacagaggaagtctttttatggttctggcaccattgatgcactttccaatccaatactgaataaggcttgtagtaaaacagaagataatggcccaaaggaggatagcagcctgcctacatttaaaactgcaaaagaacaattatgggtagatcagcaaaaaaagtaccaccaacctcagcgtgcatcagggtcttcatatggtggtgtaaaaaagtctctaggagctagtagatcccgagggatacttggaaagtttgttcctcctatacccaagcaagatgggggagagcagaatggaggaatgcaatgtaagccttatggggcaggacctacagaaccagcacatccagttgatgagcgtctgaagaacttggagccaaagatgattgaacttattatgaatgagattatggatcatggacctccagtaaattgggaagatattgcaggagtagaatttgctaaagccaccataaaggaaatagttgtgtggcccatgttgaggccagacatctttactggtttaaggggaccccctaaaggaattttgctctttggtcctcctgggactggtaaaactctaattggcaagtgcattgctagtcagtctggggcaacattctttagcatctctgcttcatccttaacttctaaatgggtaggtgagggggagaaaatggtccgtgcattgtttgctgttgcaaggtgtcagcaaccagctgtgatatttattgacgaaattgattccttgttatctcaacggggagatggtgagcatgaatcttctagaaggataaaaacagaatttttagttcaattagatggagcaacaacatcttctgaagatcgtatcctagtggtgggagcaacaaatcggccacaagaaattgatgaggctgcccggagaagattggtgaaaaggctttatattcccctcccagaagcttcagccaggaaacagatagtaa

SEQ ID NO: 15683 - DNA, 1110 bp, Homo sapiens
ctgtaatcccagcattttgggaggccgaggaggccagatcacttgaggtcaggagttcgagaacagcctgaccaacatggtgaaacctcgtctctactacaaatacaaaaattagtcaggagtggtggcacatgcttgtaatcccagctactcgggaggctgaggcaggagaaccacattgaacctgggaggcggaggttgcagtgagctgagattgtgctactgcgctccagcctgggcgacagagcaagactctgtctcaaaaaaaaaggctacgtttgagtatttttagtatatctacagaattgtgcagccatcaccacaatctaattctagaacattttcatccccctaaaagaaaccccacacccagtcatgccactttccccatcctcagggctactaatctgttttctgtctctgtaggtttgtctattctggacatttgtataaatgaaaacatacaacatattgccttttatgactgttttcttcacttagcataatgtcgtcaaggttatggcttttattttatttgcataatttgtagatgccaccaaacccatctgtgtactggtttctgtccattcttctctcatgccatatagtgagtcctctcatgaaggaagtccaaggcatttttcagctgacaaatgtttccttttgtaaaactttgcttgtgcctccagtctgcaaatccagtttctggaggaagcgcgttagtcaaacactgtggctcacttttctgcctccatatctgccatcttggcctcactctctcctggtctaatcctctctaatctgaatttcaggtcctctcatgctgaatgcttcagtgtgtcatgtggctctttactaaagcagaagtgatgttgctatggcatcacggtccctctccctccatcctcattatggccagaacttgcttggtctccatctgtgtgcactcagcctactttgttcattgtaattgtcccacctctgctaggcttcttgcctctacttcatggaagtactgccctatccagtctgtttgaaaatggcaagcacatttttcctaaataatttgcttccattttctgtgctctatactttgcagatgtttgctct

SEQ ID NO: 15684 - DNA, 2604 bp, Homo sapiens
gttggacttaaacgacgatttgctgctgtgaacccagcagggtcgcctccctctgcatcggccaaattggggagggcatggaagatccagcggaaagttgaaaataaactggaatgatcatcttggcttgggccgcttaggaacaagaaccggagagaagtgattggaaatgaactcttgccctggaataatcttgacaattaaaactgatatgtttactttttttgtattgatcacttttttgcactccttctttgttttcaatattgtattcagcctattgtaggagggggatgtggcgtttcaactcatataatacagaaagagttttgaatgggcagatttcaaactgaatatgggtccccaaatgttcccagagggtcctccacaccctctgccgactaccacggtgtggattcagctcccaaatgacaaacccagcccttcccagtatacttgaaaagctttcttgttaaaataaaaggtgtcactgtggtaggcatttggcatattttgtggactcagtcaagcaaccacagtctgttaatcatttctctatgctcagatgtcagatcctcttgttattagtgtgtcttgttctgcacagtgcaggagactttattcctttggaaaattcactgttccacaaacagcaggctgaatggcctcgcctctagattgacgtgggccagcctccttgagacacacctggcacccgtcatcggccagcggtggatgctgcataatccacctgggtacttcagccttgcgtttccacagccttcagcctgttctagaacgatcactgccttacccctgctgctgcagtggtgtgagtcgtttcacggctgatgtccctcgggggattaaaggatctaaagagaaaatggcacctggttgtcttcgtgctgtgtctcatgggtttccatagtgataaagacaaggaaacgctgcaggggccacaggcacaggctgatatttaaagatctttgcttgcagccctccgtcctgctgaaaacccccataagccagtgaacacagagcagctagaggctcctcctctgctggcttagggtcagaagtacctcacagtggttgtggacatggaagagttttgtcaacacaacactttgtccccgctccgggagatgagtcagatggtggcttgagttgtcacttggtcccctccgcccctcgggtggccccctttgccacgtccccttagcttagtgatcaggtgtgagagtggccatttccttacctttgatccctgtaaagcagaaaggactcctttgacaggcgacaaactactgtggtgagcagaatgatttcctttttcaagacaacacctgcctggcttctattaatgtgtgctggccatgatattgccccaaatccgccccactgaagtgttccctaaggaacagcatttctctgctcctcagtcaacccccgtagcctagagcagtgtcacaagcttcagtaaggccagtcagctggaagtcagtctaccgtatagtaacactgtatgtcagtctacagaccacactctagttgttttccatgaaaggtatacaaatgaagaattttctagcaaaacatgtttttaaccatcagtgctcaattgcattttcttcctttcgcagccagtcagtctttcaaactattgacagtaagataattctcacgttcacacctggtggcaggcttcactgtagggacggacattgcagttacaccacgattccttcctcttcactggctcgaggtaaacccttttcaaggaaaaacaactctaggatttcttttttctgtgtacgtagaccagtcccatcagtgtataatctctctctcacacgcctctctccaatagacagcttgtatttgcagtatttcatatttataaatatgcgtttatttaaaaggagaacaaaagcttgactctgattcacagttttgtatgtagctggtttgacgtagtcttttgtattttccctgccgaagtgaattgttggagaatgtaaaccgcctccacgtggcggcagacttcctaaggccccagctcgctggcctcgcgctgggcggctgggaattccacctgagaacaagtcccgcaaaccggggacggaaggacatttgacttttatttttgtatttaattgacatgaatgtaaaggggacagctcagggttgttttggagcctgttgactttgtatctctgcctgtgattttcttttctaaatgaaactccatgtagcaaccaggacgaagttgagaaggaaaacgccaaatgctttggttattagagtttaataggtaagctctgttacactaggtgttagagttccagaatgttcttttgtttgctaaaccttgaagaaacatgtgcctcagcctagatgttttgtcttctcttttctgcacttaatacctgacagtatgaccgatctctgcgcctttctgggggcgggcaagctggcggtagatttgtgatgtcacagtgcaaactgcagtgactgtaaattggcctggcgtgtataaacgttttcagggaatgcagaaggtattaatgaagagacaaaacctttattccatgtgctttg

SEQ ID NO: 15685 - DNA, 1132 bp, Homo sapiens
atcaggcttcatctccactttccagcttagccttcatctcttttgcctttgctgtcagttacttcttgaccactggcttttatgccttttcaaagattctgttcttgttctagtaaagcaaaatgtgtgtcctgtcagccattcagtgaaggtctggcttttcaagattccttgtccatcattagatcatttctctcttgctcttcccacatccaggaacagctgcttcgaactgggacctctggcattttgtaatagaggggagtgtggcagggaagccctctgtcctgcacaacctgttgttctagcccaggagatggcagggtgcgtgggatgttcaggcaaaggagttcaccatccaggctgggagctgctgggcagggaggcagaggaacactcgagccacctttgtggggttgactgcagaggtggaagaagccactgtgtcagaccgcagaaaagtctcatatctggagtctggaaggaaagccaagttctcccagtcagtaacctgctctggactttggataagttacataatttctccacactttggtttctccccgaatctcagggtttgattctgtgcttccatttcccattctgtgccttgcgatgttcactatgtgacatcttctctgaggggtgcgcagttagagtcaaaagcgctaacaccttcaatgtttcttgcagtagccaggccatatgtggtcagcccggactgtgagaaaagaaagccttgtgttaccctttgtgttgtgttgaaaactgctcttggctgctttcagaaccagccttaactctgcttttgtttgatcgacttaaacatattggaattttgtggtcatgaccaccgtggaacctctccttttggagtgcatatctgcactttttccagcctcctcctccagtgaccttcaggggcctgacctggcctccgagcagttggactagggtagcttttccactctttgaaccccagactgagatggggttttcccagcgccctgccccttaacgtgtgtgaatgcagtataggatctcagtttcagaatccattgtccactgttgactgttaggttcttactgctgtctacaatgtctagcttttcctaccatgttctctgctaga

SEQ ID NO: 15686 - DNA, 1490 bp, Homo sapiens
gtctggaccaggaccccagggcccacctcccagttcccttgacctcgggcctctgcatcctgctagtcgtccttccctggcagcttttacgaggaagctggagcgtgagaaggtctgtgaggacagccctgatcacagcctcctttctgcaggtcaaaggaactgggaagggggttccaggagtactattgcaagagtggctgtgcacagagctctctagcaccagaagatctgcatcctgggcttattgacataccaaataactgtgaatctctcttccctgcaggtgcccttgctcgtgtgaatgaacagaggccagagaattgcagaaacccacctgtaatatgcccacaggcgtcactcaaggagtctgcatagccaggaacatcaagttttggtgttactttcttgtctacaggccaaatgcgcacagttgattttcggtgtgttcctgtataacggcttgaaaggaaaggagaagatgctgtgtcgctgcgcagctcgtgtgccaaggaaatgtgttttgcctctgaatatcttaagttgctaataaacgattcttgttggcaggttaatgggactataaatgctggagcccagcactcacacttaattatatttatgggcaaagtaaaaagaatcatgccttagactgattttggacctttgagacttttaccacatacagatggatgaaactacttactgatttaagatcttttgaattttagaaaaaacatatgaatcagatggaacaatctgaatgtgatatgctccatgatgctgtgtgttttggtagtaagaaaaaaaaattgggaggcttttcaaaggtggctttgttaggtagtaaaactgctggattcttcttcctcaaatatttggggctaacacttcacagagggtcacagtccatgatctgaccaactaagcttttaaaaatcaactattaccacccagaaaacagtcctacgtgatcatgtggccagggcatgcccgagtcctgcaagggtggcgggtggctgaggtcacaccaccactggagtggatgggcagtgccccacatggacagccattccccaggctatgaagtgacataggcctcccccacggtgcctgtgtacggagcctgatgacttcactgggagccttctggaatcctgcagagggtcaaggagcagggatgttggatgcccacctgtcaagagttcagatcaaagttgcgctgagagcatcacaattttggttcagccttgacgcgtttgtccaacagctcattggctccctttgtatgatatcgtggtcttctcacatggtgcccagtcaccaatatttataatgaggtctaactacagcagtagtttttcatatatatctctaaaacattttgttatattgaaaaaagtaatagaaatcaagatgtgttgatgaaataaaatgtgtatctgagtgagaaaacaagtatggtgaggtcactttaatgtttcacagcg

SEQ ID NO: 15687 - DNA, 1137 bp, Homo sapiens
agacaccagctccctcaccagctccatccatggtgcatccaaccactgcccacaggatgccatgatccctcacggcgacacagatgcaatcccagtaacattcataggggaagtttcagatgatcctgtggattcggggttgttttccaatagaaacaacaatgctgggtctttcgactcggagggtgttgccagcaggagagactccctggcgccacttcaagctgagcacagccagccccatgaaaaggcaagggaggaagtacctgccctgcaccccgcttcccatgacgtcggaaaaggaatccgtgtggccttatctaacatctctaaagatgggaatctaatggaaacggcgcccagggtgacttcttttgcttcgaatcttcacacagacaacctaaatgcaaaagtgaaagacaaagtgtatggctgtgctgacggggagaggactcaagccacagagagagtgaattcccaaccggtgaatgaaaaggacagcaacgataaaaacgctgccttggcaccaacatcatggcaccaacgaggccaaaacccagggaaaagctacagacttaagcacggcctcacaacgtataaaatcattcctccaaagtcagagatgcgatgttacgacagagatgtgtccctctccaccggagccattaagattgacgagctggggaacttggtgagtcctcacgccaccggcatcaggatcatttccctgtcttcgtctgtgcctgaagcagaatctcagcccattgggaaagtcagagagttctggaggtgcaactctgtggaaaaacacctgggccgaccctcagagagctctgccaggggacccccctccacccctgtgcccacgcagacgcagaatccagagagcagactccaagcagaccccaagccaatatcgccccagcagaagtctgcccaccatgagggccggaaccccctaggggaggggagaaaccagccccccaccatgggcatgggtcacgtgagggtgccagcagctcacaccacagaagtcacatttctcaagcctcagagaagaacgtccagccagtatgtggcctctgccattgccaagcgcataggagccccaaaagtccatgctgatgtggtgaggcc

SEQ ID NO: 15688 - DNA, 1176 bp, Homo sapiens
taaatacgtgtgtgtagtgtgtatacataaatacatgtaggtctgtgtacacactgtatatgtttcatatatgtgtgtatatagtacatatatacagtatatatgtatttatatatatatatatctatgtacatatatagatattcctgtatttatgtggatattttgactccttaaaactttgatgtcatgtttttggagggtttttctttaaattattcatactgcttccaaacttttttttttagaaaatgcatataagtgccatgtgttcacatctggccagaacccttggaagacagtaaagtatatgtgttggattttaaatgtagagtcttccctgatgtttatttcgctgtgttgttagcagcttgttcactagcaagagattctaaaccagatttattattctagacatttgtttttcaatattcattatgctgttttcccccattactcactcaatttgtggaagaaggattcaggctacacacaatcctgccacacccaattgtcaaattgacacaagagttgaaggcttgtgggaggatatcttactgaattctttttgcctgtgtgttcttccagaaatctgtgcgtttggtcgtgaattacctgcggacacaaaaagctgttgtgcgtgtgagccctgaggttcctctccagaatattctcccagtcatttgtgcaaagtgtgaggtcagcccagagcacgtggttctcctcagggacaacattgccggagaggagctggagctgtccaagtccctgaacgagctcgggataaaggagctctacgcgtgggacaacagaagaggtgaggccccgctgcgtctcacgcacctgcccataatcacacggatgcgcggcgtgtacatgtcccctgttggctctccccagcactctcagtagcgccagggagagatgggtacatgaagttccaggcaagtcaagttgaagtaggcaaaaaagaaatctggcctgttttcattcctctggattgagctgtgcctcctttctcccagccctgaacatgtcctttatcctttgtctccctgcaaacttccacgacataagtaaaaggggaaaaggtgaggtgagattagagcttatgctctgaagtaactactccaaaccatctataatactttcttgtgggttggtggctcacacttg

SEQ ID NO: 15689 - DNA, 1208 bp, Homo sapiens
agaggggaacaacaacaaacactggagtctctcagaggatggagggtgggaggagggaaaggatcagaaaaaataactaatgggtactaggattaatacctggttgataaaataagctgtacaacaagcccccatgacacaagtttagctgtgtaacaaacctgcacatgtacccctgaacttaaaagttaaatcaaaaagatacattatatttctgaataactgaaaatttagtgtcttgtatgcatgaaaaatatttgtgctaacagaccttagatgatccaactcaacatacccttggatttaactaaaaatataactattttccaagctattaattatgatttttctctttcaatagtgttgtttgttagtgctgaaaatgttaacatattgctctacaaccatgcagaaggaattaatgagcttctgttgtcttttttcataagcatatctaatttgctcattcatccacttgttcatttgttctacccttatttagccaggcaaaagagagagtgcagtcattcctaataatcatgatttgttttccttttttcagccatgcgatgatggacctactggttgaactttgccttcagaaccacctgaatccatcccaccatgcccttgaaattcggtcttcagaaacccaacaacctttgagttttaagccaaatactttgattgggaccctgaatgtgcatactgtgtttctgaaagaaaaagttcctgaagagaaggttaagcctggtccccctaaggtgcctgaggttagtaggtacctacatggaaatacctgtgtctgaatgtgtggcaggtcctgagtaggggccagtgtggctcttcttatcaaagtacagtgcagagagctgtggctgaggctgctactttcatgccaggcaaagctaggcactaaacagagtttgttttaggagacaaaatgtacacaattgaataatgtttattgttgtaacattgcttctttatatattatagaagaggaattgatctacagtggagctatccattagaccttcattcaaagaggggcatggtctttaattctgtactttcttatatgatagccactggctgcatgcagcttttttaaaaatttggtatgtttattataacttaaatatctaaaatattcatgtagatttttcttttttcattttaattgacacagcttttgaacacttgaa

SEQ ID NO: 15690 - DNA, 1293 bp, Homo sapiens
ggattaaaaggtgcaaaaagacaactaaaatacccatttggaccaaaagccaccagattgcttagtgcctgacacagaaacaactgggaatcctgaaagagaagcagacaccgtcacaggcccctctggttagactagcatgagtgaccgaagccatccatcaacattttctaacagcaccctcatcaatataaaatatgacttcttcacatacagattctctgtagtgtttgcatgtttcttggtgtttgttgtctccaggtgtaagctgttttaaatggaaggcccttctattcctgagggctcagagctgaccatgcatgaatgtatggcagtgtccacttttctgtataaaatgtataaagtggggtttcttccatattgacaaatgagggaacaggtggtgtctatcttgtatatcagaaagattatctagggtctatcctagtgataatacattgtcagccttttctgtggcaccttccagatgagaatgagggagcgaccactccaaggacggacaggaccagcagttctgcaggggcgtgctggggtggtttgggagtgcacagctgaacgcttcccgtttggattttacactcaccttcgtgttttaaagaagcctcagagtgcattgcagctctgtcagggccccattcccagcagaggcttcaggtgctttgtgtagagtccagggcagctggagctttgttggggagacttctggacccaaagggagctttcccaagaagcctttgatggccacactgtaggcagcagtgactaagcactggcagttccagaacatttacccaggtatatgttactaaaacaggctccacctcagtttatcaacattataagttactgttctaagaaaagtaaatacagttccagatgggttattgcagattaacagaaagacactcaactggactcatgtccctgcaattaaacttacttcaaccttttggaaagttatcaaaatctaaatttggaatgaatgcatttcctattttttgtctacttttgggtgataaaaagtactagcccttatttatagatatgagaaacataatgttctaaccaacaacattatggtatttgtgtgacttttatttgaaaaaatgtgagcagtaatttgggttagcctaccttcattaattctatcacatagatttcagtttttagaagggtttctgtcatcatggaagaggtggtctgggactaggtacttctcgtcttgtgagctaaggcttgtgtcatgaaagacaagaggcctctcttaacagc

SEQ ID NO: 15691 - DNA, 1194 bp, Homo sapiens
caaaaaaaatttagccatttctttactaaaaaaaaccaaaaaacaaatctgttttataatcacagatttttagacaaatttcttgtatcaggaagaaatacaaattttgtcatgtttctcaagcagtttttctgagtagtttctgaggaggaacaaattacaagtgtacccaataactgaaaatgttttaactcactctcatttgtaagcagtccacatagtagacaatgggttttccaagctgggcaaggtacatttaatcagtaaatcagtttcacatcatgtattgtgatgtttcaatgtgagacacaaaaacaatggcttgaaacttgtgtatcatatgtgattttgaaatgaacaccttgaatagcactaatttttatttgtggtatttttctataacaaaacaagtagctctaggaaaagaggttttattttgtaaacgatcatttgtgacctcagacactctctggctaatattttaataagctcacagcagataattctgagatcatgggtgaggggtggtgcatgttgagatttaaattggcataaagctgcatactttttgtctagctgtttgatttcattttttaatatagtatgccaattttgtgactgttaccatgtgaaagtcctgttgaaatgaacaattgtctgccccacaatcaagaatgtatgtgtaaagtgtgaataaatctcatatcaaatgtcaaacttttacatgtgaatgattttctcaaagaacatagaaaagtcaataaaatcctcttaatttccacatatcacgtttggattttcttttttaatttgttctgagattgacaaacattgctgtgaatgaccttgtcactcttgcaaaatagcttgtcacaaaagattgaaggaagtgaggaagtcagctggcttctggggaaaatccctccataggaacaaattacgaggccctgggcaaggtcatgcctggtatgtgctgagggcagcagaagccagtggcagaagcagacatgagggagagtgtggtgggacacgagctcagaggtcacagggctggatcccttgagtgttggaggccattagaaagaccctagtggccgggcccagtggctcacaccagtaattccaacactttgggaggccgaggccagaggatcccttgaacgcaggagtttgagaccagcctgggcaacatga

SEQ ID NO: 15692 - DNA, 1106 bp, Homo sapiens
gagaagcttcgtattttaggcgagttacttttttgtgaaactttgtttcccactgtaaggacaataatgctcaaattggtttgggggagctataggaaacagtctctgaagatgcataaggggcaggattggagctcagtgaactgttaaatcttaggactaatccagtttcagaagctgctttcttaatgtttccctgctttctgtaacttttttttttcttaatagagaagtgaattctggctttttttacaagagtgcagaagagagagaaaaactcgtgaaagctgaaagaaaattcattgaagatagggttaaaaaaataatagaactgaaaaggaaagtctgtggcgattcagataaaggatttgttgttattaatcaaaaggtgagaatgaaaactcaatgtataaactaaatagtacgtatcatcctttttacttttaaggtgaaagatgttgaaattaatttttatttttgttacagggaattgaccccttttccttagatgctctttcaaaagaaggcatagttgctctgcgcagagctaaaaggagaaatatggagaggtatccgagtaatttgacttttactcattttgcaagtgaattgggattatttctttttccttatactttatttttgggtttttcaactgtatagttaattggcattaactatattcacattgtgcaccccgtcagcactgtccatctctaggacttttttcatcatcacaaactgaaactgtatacccattaaatagttactccccatttctccctcccccttgccccttgtaaacattattttactttttgtttctgaattcaatatacttttttccaaagagctccccacaataaaaagctttttttaaaaattttttattattattttttgagacagtcttgctctttcgtgcagtggcatgatcttggttcattgcgactaccacttcctgggttcataggattctcagcctcccgagtagttgggattacgggtgtctgccaccatgcccactgaattgctttgtgtttttttagtagagatggggttttgccatgttagctaggctggtctcaaactcctggcctcaagtg

SEQ ID NO: 15693 - DNA, 1099 bp, Homo sapiens
ttctacactgcaggattggcagactacatggtttatggaagttgaagtagcaataagattgctgtatatggccgggcgcggtggctcatgcctgtaatcccagcactttgggagcccgaggcaggcggatcacgaggtcaggagatggagaccatcctggctaacacggtgaaaccctgtctctactaaaaaaatacaaaaaattagccgggcgtggtagcgagtgcctgtagtcccagctactccgtagactgaggcagaggaaaggcgtgaacccgggaggtggagcttgcagtgagccgagatcgcgccactgcactcagacagagcgagactccatctcaaaaaaaaaaaaaaaaaaaaaaaaaaattgctgtatatgttggcagaagctcttctagtatctcacggtgttccatttgcaggtgatgtttcaaaagccagtgctttgcaggatatgatgagaattctggtaacatcaagagtcagttcctatcagcatacatctgtgacgttggagttcttcaaaaatgttgttagatatgaaaagtttttcacagttgaacctcagcacattccacgtgtactaatggctttcttagatcacagaagtctgcggcattccagtgcaaaagttcggagcaggatggcttacctgttttctagatttgtcaaatctctcaataagcaaatgaatcctctcactgaggatattttgaatagaatacaagatttattagagctttctccacctgagaatggccaccagtctttactgggcagcgatgatcaactttttatttatgagacagctggagtgctgactgttaatagtgaatacctggcagaaaggaaacaagccttggtgaggaatctgttgactccactaatggagaagtttaaaattctgttagaatagttgatgctggcacaagatgaagataggcaagcctctctagcagactgtctcaaccatgctgttggatttgcaagtccaaccagtaaagctttcagcaacaagcagactataaaacaatgtggctgttctgaagtttgtctggactgtttacagacattcctgccagccctcagttgtccc

SEQ ID NO: 15694 - DNA, 1216 bp, Homo sapiens
ccctacaagtgtgaagaatgtggcaaagcttttagccaagtgtcaactcttactatacataaaagaattcatactggagagaaaccctacaagtgtgaagaatgtggcaaagcttttaaccaagtgtcaactcttactatacataaaagaattcatactggagagaaaccttacaaatgtgaggaatgtggcaaaactttcagtcgatgctcaaaacttactacacataagaaaattcatacaggagagaaaccttacaaatgtgaaaaatgtgctaaagcttttagccagtcttcaaccctttctacatataagataattcacactggagagaaatgctacaaatgtgaagaatgtggcaaagtttttaaccgatcttcaaaccttacagaccataaaaaaattcatacaggagagaaatcctacaaatgtgaagaatgtgacaaggcctttaacctgtcctcaacgcttactaaacataaggtaattcatactggagagaaactgtacaaatgtaaagaatgtggtaaagcttttaaacagttctcacaccttgctatacataatataattcatactggagagaaactctacaaatgtgaagaatgtggcaaagcttttaacttatcctcaaaccttactgcacataagaaaaatcgtactggagagaaaccctacaaatgtgaagaatgtggcaaagctaacctatcatcaacccttactccacataagacaattcatatttgagagaaaccctgcaaatgtgaagaatgtggcaatgcttgtaactaaatctcaaactttactaaacataagaaaattaatactggaaactttacaaacctgaaagatgtgacaatgattttgacaacaccttcaaacttttctaaacataaaataaatcatactggtgagaaatcttaaaaatatgaagaatggtacaaagcctttaaatggttgtcacacttgattgtaggtaagataatttatactggaggaaactcccagaagtgtgaagaatgtggcaaaacttttaatttttcacaccttatagcacaggaaagcacttcagaaaaattgtacaaatataaatgtggaaaagccattaatatctgcttacatcttactcaacattagagagttagtgcttaataaaagcattataaaagcaattagtgtaaaatcagaaaatgaaagttttttttttttttttaga

SEQ ID NO: 15695 - DNA, 4110 bp, Homo sapiens
agctttttagaaatttagaatatcagactgttccagatcttctgaaaaaataatctgcattaacgagatctgaagtttatcatacacattaaaacttgcgaggtaccttttaactcaacatgtctttttcatctcaaaaatacacacaactcattctgtatgatgcagatatagcatttaaaaatagacatgttggcgtttatgccctaatttatactttattatccagaaaagtaccatatatacacagatgttgtggatcttcttataccactttcttttctcagggttagataatacattagaaaatatttctgtgttaaaaattcttttatggatagtttcattcactcctataagtcagaaccagttttctttactgttttattttaccttgaaatttaaaattatgcccatggccacttggtaaatgtatgtgattttgtgtatgtgtgtgtttttgtgtttttcagggaccattgacatttatggatgtggccatagaattctctttggaggagtggcaatgcctggacactgcacagcagaatttatataggcatgtgatgtgagagaactacagaaacctggttttcttgggtgaaggtaacttcaatacacattttctaatataccctaaaggttttaattctcttttttgtagaatgtttttggtgatttatgctttgcataaattgagtttcagatccctgttttcaaaaaaatcttttagatttgtcattgtagaaaatagtttattcaagatgtttcatctttaccataactttccacattcctgagatgatctttatcattcagtcttgattagtggtaattttagaaatttattggcataaaatattgttgcccacaccttaaaatctaactcccaacaacaattgttttgattcagtagtaccaggtagtgaaattaagaaactacaaatttaaaatattttctaaatctttagaaatttttgttataaattagcatttggggattaatttactagaatattctattgcattctctttactgagcacattaccaagttggtaattggagaatatgtgcaagatttatgttatttattttcaataaaacaggtattgctgtctctaagccagacctgattacctgtctggagcaaggaaaagagccctggaatatgaagagacatgagatggtagctaaacatttaggtaagtgagagtgaatacacagatggcacagagaagaggtcaaaggccaaggagaaggccacagcttaaaatgtgatttggtaagctgtgttccaaaggaaatagtttctggaaagcccgagtttttttttatttttctctcacatagaacatattttgtattgtttttcaattctctaaggattcctctttccctttagtgatctgtcttcaatttcacagtgaaagccaacatcctcttcatgggatataaaagactgcacaatctgactggtttttttttgttgttgttttgggggacacacaaatatgcataattttgagaaactctatgttaaacagttttttaaattctctttttgcatcaagtctgaaatgtgtgagtagtgatttctgttccattggtttttttgttgttgtttatttttctgtatattccattctgtttttactactatagctttgaaatatagttacatatgtaaggcatatgcagtgccaatataccttttcaggatttggctattttggattggctttttctttttatttggcaggacagatttgctgctggtattattctcacttgacagctattttcttcaggacttggacaatgtcacacagttagttcccttctggcctgcaaattttcttgagaaattcactcattacctcataagactatgcttataaataacatatcacttttatcttgcaactcacaatattctcttgtctgtgacttttaaaattgtgcttatatatgttcttgttgtaaatatctttgtgtgtattctagtttctttgttaacctttttaatttttacatcagtttttcttataatttttcagttccttttttatattttttacctccacaatatctgttttttgatatttttaatatttttgttatcccaatttttatgatttttaatagttgtctgtgtttctatttcattcatggagtattattcaatttatgttaactttttaaaattaattttttaatggttgctttctgaaaattttataatatctgatagagctatgttgccctaaaattttgtatgcattgtaatctttaattgaaatttgaacattaaaaacaagctacctgtcacagtgtctataatgtagctttgtcctggcaaagtctgaaaccatttgtcttagctagagatcctgagagtctttcaaacatgttcttaggatgtgtcttgtctgaaatgttctagttgttttttagttaaaagactttattcatgtttcttcttaatagtcatcacttgccacaactgttccctgtctgtagtacagtctctttcctgctgtaacatttacctttgatctcagcagactcaaaatgtcattccaaagtataccactgttaatttcagcactttatgtcattggagacagaaaccagtgtccgccaaagcacctaataaagccagaaataaagatgtgggtgtgttatttttcttgtctgttgaaaaagaaagcaaaagttggtaatgtacttctaaagacactatgttatactgaggagcagaaagagctgtgttgggtaaatgtaaccaacttttctcttccttccatgtggcttttggaattgtgataacctggaacactgcacacacgtaactcatttataaattttctataaatgcattttggtcaatatgctcttgttacatttatatgtctatgaaggaattagaacctgtggtattttgctatgccatcttgcttatgtagtttctgtaactttatgggttagatttgtaaagtatattcatctgagtcgagcaagtgaagtagtttgttacttttatttctttcagttatgttttattattttgcccaacacctttggccagagcagaacataagagattctttccagaaagtgaccctaagaagatatagaaaatgtggatatgagaatttacagttaagaaaaggctgtaaaagtgtggttgagtgtaaacagcacaaaggagattatagtggacttaaccaatgtttgaaaactaccttgagcaaaatatttcaatgtaataaatatgtagaagttttccataaaatttcaaattcaaatagacacaagatgagacatactgaaaataaacattttaaatgtaaagaatgtcgcaaaacattttgcatgctttcacacctaactcaacataaaagaatccaaactagagtgaatttctacaaatgtgaagcatatggaagagcctttaactggtcctcaacccttaataaacataagagaattcatactggagaaaaaccttacaaatgtaaagaatgtggcaaagcctttaaccagacctcacaccttattagacataagagaattcatactgaagagaaaccctacaaatgtgaagaatgtggcaaagcctttaaccagtcatcgacccttactacacataatataattcatactggggaaattccctacaaatgtgagaaatgtgttagagcttttaaccaagcctcaaagcttactgaacataagttaattcataccggagagaaacgttatgaatgtgaagaatgcggcaaagcttttaaccgatcctcaaaacttactgaacataagtacattcatactggagagaagctgtacaaatgtgaagaatgtggtaaagcctttaaccagtcctcaacccttactacacataagagaattcatagtggagagaagccctacaaatgtgaagaatgtggcaaagcttttaaacaattttcaaatcttactgaccataaaaaaattcatactggagagaaaccctacaaatgtgaggaatgtggcaaagcttttaaccaactctcaaaccttactagacataaggtaattcatactggagagaaaccctacaaatgtgg

SEQ ID NO: 15696 - DNA, 3116 bp, Homo sapiens
attattattattattattattcacaacagacactttccctaagaatctcaaactgatttttaaaaatccggtaaattagaaggggccctcgctattttctgtgtcagtcttcattttaaatatggatacaaaaaggatacgccgagccaatcaaagacaagctttaactttactttgaagtgtttctgaaatgataaaatgtagccctagccccctgccctcaattgtaaagtgagcaaccattgctagtaattctttaatgtgtataaattcaatttcaggtataacaaatgtgatcatgacatgaaaatattctagaatagatactgtattaaatattgccatgtttacaatatgtaatatgtttttagccgatggatttaaacatgtagattcaactagaatccatttgtgatatttgtaaataaaggtagaaatattagatccatttctgcagaacttactgtacagtttagttggagtgtagcactgaagaactgtcagctcagcgttgactgaggagatagtgaaaatagcctatacacagcatcttgtgaaaagtactggcagccgtggttgcagcaaataatagggcaaaaaaaataataatagggtggtcggttccctttcatctccctcttctgaaaggaaaaaattgaattggaacgttcaagtccagtttgtgttcagtcataaaactgggccagttgttaaccttacagaatgagtcatgtggccagaccttcaagtccaaggccttcagacactaaggatgggaaaatgggtatttttctttggagaaaagctggaaatataaacatggcatttttaggtaaagtttcttccactagttgaattttcatgcagatatttttccttaacgttggtgccagtcaagcaaagagtattatgatggaaaagaccagtccaagccccatcgctccggagtgggagccagtgttcttgctaattgtttctttctgcactaaccactcagatgtctaatttaattgttttgcagtcaaatactggatttgtaaccttcagggctgacatgctgcccagtttgcttcatcgggagaatagcaacaggtagacacatctcaaggctaaatctgctcatgtcgccactgctctcataatgacacacatgcagtaagaagacttttgtaaggggatttgagtacacccaaatgaaattgtgacaggatgtttgtatggttaacatctgatatcagaatgttaaaagtgccttctgtcttaaatctcaaaccaaatattttgtgtgttgaccttgggcagaagaagtgtccttccctcctttcttcaccgtcaggtagaaaacctgcactctgcagaagggtcctgtgtgatcacttaatcctctggttgagaagcagcagtaatgtttttgcttccaacctgattaatcattttatgttgaaaatagtcaatgagaccagtatctcttgagtgctttatttgccttctctttgaagggaggggacgggctctgctctgtaaactcaaatgtgtagagtcagcaacaattccgtagcttccaactgactcagaattgatgcaacgtaggtcttctggcccgaggcaggtatcaagtccaaatcataatgaacttttcaccagtttcaaccagtttcttaaaagagagcttaagtcaagatttcatcaagacttgtgttttcccatgaatgtgaatctttcaatggctgttggagtatgtatgtactgttcttgcattctgaagtagttaaagaactctagaaagtactgattggccatctggtgtctatggagaaagaagtcctcacgtttgagggctgtacagtgaggccatcttgtagcagcgcatccagctctaccaaggcagtcctctggttcttttttctaagctacagtggaaatggcctaatggttaaaactgtggtatacatgacatcggttgtgctaaacaagttcctcgtgtcccaatatccaatggtttttcatcctattttgtatcaatcaacagagtatagttaaagcttgtcttgatgttgcattcttgcaaatgtcttcaactcttacctgagaaaacatggcaaaatggtcagccagacccttccagtttttcctttgcttttctaagcctcggggaaaccactgtttcagttgtataaaaacttttgccacattcctatggcccagtcgaattaataccctttttctcactgagagaggaacacgtactgcctgtcataacagcattgtaatgccagtgtctcagtaacagaatcctggtgggtgttaattgggtgttttttgccctggagaattcagattcctttctatacctccgattctgcccagaagagggggggaatcaccagtgttacaaaattagaagattgttttgcctgttttagactgaatatttgaacactgcagcattactagccaccagtgttaaaggacagatgaggggaaacatttgtttttagcagtaattccatgcctcatcttttttaagtgatttgttccaaatgaagccatttattgacttgatgttcacaaatatcatttgaagaaataacaggaattggggttagatgataaattctagggaatctaggtgatttggaggatttcatttgttttgcattacagctagttgctctcactaaaggtaaatttccggtgaaataactcaggtttaactagctgtgtgcccagaatcactgttccttcatacatgtgtcctctccttaaattcattactttcaaatgatgttcaaagcattgactattttcattcaaagaaactacattcggccgggcacggtggctcacgcctataatcccagcactttgggaggccgaggcgggtggattacctaaggtcaggagttcaagaccagcctggccagcatagtgaaaccccatctctactaaaaatacaaaaattagccaggcgcagtggcacacccctgtaatcccagctactcgggaggctgagggaggagaattgcttgagcccgggagacagaggttgcagtgagtcaagatcatgccactgcactccagcctggccaacagagcgagactgtcccccccccaaa

SEQ ID NO: 15697 - DNA, 1172 bp, Homo sapiens
aggactgcgagttattgaaattaccatttatgaaggcagaggcatgagccatggaagataaaccatagaattaaagatcctacttctagctgggcccctcatgtatccattggccgactgcagagtgtctctacctcctctccagagtatcattcctatctgctgccagagccacactgccatttactccaaggactttgtaaaattccacacctggaaagacctttagttgctcagtatccactttgtgtctccaaattgtgtaggactctgtaatcttttgactagtttctgagaaaacacaatgaagcatttcactttttttattgaaggccatttaataaaacacagctggtcagcccagtgcaaaccttattatctgccaccagtatgtaccattggttctcctcattccttgggccagcttctcaggtagctttagacctcaacaagttgtatctttgccagtgttccatcttgttcccctaaattaataaaatgcttttctccaggattttggcaaaggttggtgtggctgtggttttgctaatgcacctcctagatttcaaagatttaccagttttaccatgactcatatattaagatctgtttctactattcagttcctcaaactgaagctcattgaaaaaataatgtataatgttatttgttttattatagcaattattcctcattaaagcagtatttaatgcaatttccagttatttctttggagaatgttatgtccttgttgcattaccttaaaggttgtgaagatgtgatgtgtgttgcttgttcatcacaaaaatcagtaagcacaataaagtggatgccaaaccatcaaacacatagatgttcctgctgggtccctggatatgtaataagcaggtataaaaatattttaattatagttttcttacaaatataacttacgagaaaaaaatttgattggaataatactgtatattactaatttttaactatccctacccaaaccttatgactcacagaattttctcatatacagtattcagtgcacagaaaacttatgactggctcaagtacagtaagttacttctaagtaaaactctcaagtctgagtccatatttgtagctctgcttttggttgtacgtttctaggatcagggccgcttatgccttttcgttcatcc

SEQ ID NO: 15698 - DNA, 1702 bp, Homo sapiens
cagaaatttatttaaggggaggaatatttatgctttatttgattgacaatttaaaaataaaaatttcttgaccattacttggaaatgtattttcgtcaagtaaaagcatacaatttttttttttttttgagatggagtctcactccatcacctaggctagagtgcagtggtgcaatctcagctcactgcaatctccacttcctggattcgagcgattcttctgcctcagcctcctgactagctgggactacaggcatgcgccaccatgcaaaatatttatatagcaaaattaggtatttctatctataaggtatttgctatttggctttgtctataaatgatcatttatatggctggaaaagtttgtatccactcttttattcttgaacgtaatatatataattgggaaaatagacattatcctctgtaccatctttttgaggtagtgtcaggatttctttccttttacagctggaaatactcatatttagaaaaggtgggtaataggtactataacaactcagtaacaggactggaaagaggatactcatttgctagctcccaagagaatgctacaagttaagttgttcattgacttcagaagctgctccgtttgcttgtaccagagtttaggttttcagagcatgacttgatagcataggttgggcataggagaatttgagcaattattttcgtcattgcctgtgtaagagttgactgtgtggcaattaataggcactgtttggccgggcacagtggctcacgcctgtaatcccagcactttgggaggccgaggtgggtggatcacaaggtcaggagatcaagaccatcctggctaacacagtgaaaccccatctctactaaaaatacaaaaaattagccgggcgtggtggtgggtgcccgtagtcccagctacttgggaggctgaggcaggagaatggcatgaacccgggtggcggagtttgcggtgagctgagatcgcgccactgcactccagcctgggcgacagagcaagactccgtctcaaaaaaaaaaaaaaaaaaaaaggcactgtttgcatgtgccatttgtgtatgtgtttgcttctaaggaaagtccaccaagagatcattttgttctgtttatttggaattcagtttcctcaagtagttgtttacatccacttgactcaccattttaagcaaattttacaagaagtgtcaaatggaaagtcagcttcagtcatctaattcattacttaaggaaattaagtaactgcctgcctgtagtatagatttagacagttgttttgtttttttttttactcaagcattgctatgttaatttgccaggctgcttttagaaagcaccagacactgggtggcttagacagcaaacacttgttttctgacagttcgggagactggatcaaggtgtagcaggtttggtttcttttgaggcctcttgcctgagcttgcagattgcaaacttcttgatatgttctcacatggtctctcctctgtgtgcacaagtccctggacttttttctagacagtctttaaaatgcacttagagtatttgctttaaacacatgtcaataaaatgagtactattctttctttctttctttttttttttttttttgagatggagtctcgctctgtcgcccaggctggagtgcagtagccccatctcggcacactgtaagctccgcctcccgggt

SEQ ID NO: 15699 - DNA, 1374 bp, Homo sapiens
cgcccggtctcaattttgttttaagaatatcaaagaatccaagactgtttcagcttctttctacctaaaatgcagtggtgataactggtgactgatttgtaagcaatctcaatgtaatgataaataaccttttcctttctctactagatgttggttatctttctgaagtagactgtccatggcctgaacattttccgaaaatcattttgagcaaaatatctgtttaataacaagataaccacatcaagatggttggaaagctgaagcagaacttactattggcatgtctggtgattagttctgtgactgtgttttacctgggccagcatgccatggaatgccatcaccggatagaggaacgtagccagccagtcaaattggagagcacaaggaccactgtgagaactggcctggacctcaaagccaacaaaacctttgcctatcacaaagatatgcctttaatatttattggaggtgtgcctcggagtggaaccacactcatgagggccatgctggacgcacatcctgacattcgctgtggagaggaaaccagggtcattccccgaatcctggccctgaagcagatgtggtcacggtcaagtaaagagaagatccgcctggatgaggctggtgttactgatgaagtgctggattctgccatgcaagccttcttactagaaattatcgttaagcatggggagccagccccttatttatgtaataaagatccttttgccctgaaatctttaacttacctttctaggttattccccaatgccaaatttctcctgatggtccgagatggccgggcatcagtacattcaatgatttctcgaaaagttactatagctggatttgatctgaacagctatagggactgtttgacaaagtggaatcgtgctatagagaccatgtataaccagtgtatggaggttggttataaaaagtgcatgttggttcactatgaacaacttgtcttacatcctgaacggtggatgagaacactcttaaagttcctccagattccatggaaccactcagtattgcaccatgaagagatgattgggaaagctgggggagtgtctctgtcaaagtgagtagaagatacgttttttattttgactctatatttagctaataatgatctatacatatgtatgtatgtgttttatgtatatatgtgtgtatgttcctgtgtgtatatatagaaactgaagaccttttctggaacagatacagcttcattgatgaggtttctttttttattaattctctactagtttattacagatgttcacttatttatacttcattttttcatttatatatcgtggccctctttatttgtttgatggatacaaacccaccttacag

SEQ ID NO: 15700 - DNA, 1221 bp, Homo sapiens
tccatcctcctggcccctgatctgcaggaacctccccaaccgcctggcttgtctaggcctgtagctgggaaggaagagacgaagacacagggagaacacaccgggactccacacctgtaaccacattctgtttgttcgccctaggaaagattgctgccttttcagcagaagggaaattcctaggattggctgtcccctgccaagcttggtggagcgtctgcaccttggctgcgccgcctgtgcatttgccagtttcctcccactgagaggatggaggtgtccgcacagctttgggcctcgtgagggatctgcctcctgagcaaagagctcttgatcccgatttcatgcacagccctgcagtaaggagcccagaaggaacatgtgtttcctgttaaaactcctcttgttctcttttcttacattatgacgtttgttttcaaggagagggtttaaaaatgggatcctgtaagcagacttgggcagtctccttttgaaataggttgtctgtacatgttctaatgttttgtagaacacgtgtgcctgtttaagtgtattgatgtgaataatattaaatatcctaattatttaattcattgtattgtttctgagaagttgggaaattaccattatacatttacaacctaatgacttttgtattttatttttcaaaataaaagctttcaatgtgaagcattctggtagttacatgttttcattaatgtgatttcagagaagcacagaccttatcagatgctgatgtgataaaccaaagtttccttggttggctgtattgtagatactcccctggagccatcacctttttttggaggggggtggtgggtagaggcagggtctcgctacattccccagcctgggctcaaacgatccttctgcctcagcctcccaaagtactaaaattacaggtgtgagccacggtgcttggcctgcattatcattttgtagtgaagttttctttttatttcaagagagaacctattgccatccactttgagaatcctgttctatttcatgcttgcagactgtatttaaggacatggaagttactatttccacttgttttctagaagcctttgttatgaaacccaggatgtccagatagtagtaataattcccatattgagtgtgttcacatatgtgccagccatgaaaagggtatataacatgttatcccatctctgccccaaaacttgtacctatcca

SEQ ID NO: 15701 - DNA, 1254 bp, Homo sapiens
cgctacatgtctggccagacctctcccaggaagcaagaagctgagagttggtctcctgatgcttgcttaggcgtcaagcaaatgtataagaacttggatctcttgtctcagttgaatgaacgacaagaaaggatcatgaatgaagccaagaaactggaaaaagacctcatagattggacagatggaattgcaagagaagttcaagacatcgttgagaaatacccactggaaattaagcctccgaatcaaccgttagcagctattgactctgaaaacgttgaaaatgataaacttcctccaccactgcaacctcaagtttatgcaggatgatcacaatttagtggagagtatttatttgagcctaaattgtaggtagcccttactacactcaactgattgggatctagaatgtaactaaattgcttataaatgtcagcattttttaaaggtacagtatatggggattgtttcgtttttcctagcaggggaaccttagttaataataaaatactacttatttgagttactgatacagattcatttaaggcttgtgtgcaaattttgtctcaatcttttttccctccatgattttcctatgtgcttcctctggcattcactgtggttttggtaaataattgccttttaaaggattaaacaaatgaatgctacaaagtgtatgttcaagaaaattaaatggtaccactcttccacagtttggaataattttataattgtaaagatagaaattatattgataagtaaatatgtaaaattgtaaatatgtaaaaaaaagaatggtgtctgctgtgcatggcattttatatgttaattttttagtttaaaatgaagtatattgaatgtttgcctttagcaccattttatttggtttgtcccactaaaatgactcgagaagtgtttagacaaactccccttaagatgtgcactccatctttaagaacgtgttagccttaactttgaggttctatatagtcagagactatgacaccactaaggttcagaataaagtttaggccacataaaattgctgtttaatgtagtcgatggaagactttaaactatgcttctagcttatttttccctcattcattcagcaaatctctattgagttcttcagtgagaaggagcaggcactgggcctggaatggaaggcgggaatgaatgggcctctgatggtgagaggtgacggggtccctcagctgtgagatgcaaggggcgccttgcagcctccataat

SEQ ID NO: 15702 - DNA, 1104 bp, Homo sapiens
ggatttagtaacttcactgtctggttgatatgtgcaattagtgtggcatcctggtctttgggtaggggctgagttacctaggcttcccttttttgactggtttccctggcttgctgtcttccaggtggctttggctgaagcctaattccacagctccttgttttttgagagagactgagagaaccataatccttgcctgctgaacccagcctgggcctggatgctctgtgaatacattatcttgcgatgttgggttattccagccaaagacatttcaagtgcctgtaactgatttgtacatatttataaaaatctattcagaaattggtccaataatgcacgtgctttgccctgggtacagccagagcccttcaaccccaccttggacttgaggacctacctgatgggacgtttccacgtgtctctagagaaggattcctggatctagctggtcacgacgatgttttcaccaaggtcacaggagcattgcgtcgctgatggggttgaagtttggtttggttcttgtttcagcccaatatgtagagaacatttgaaacagtctgcacctttgatacggtattgcatttccaaagccaccaatccattttgtggattttatgtgtttgtggcttaataatcatagtaacaacaataatacctttttctccattttgcttgcaggaaacataccttaagttttttttgttttgtttttgtttttttgttttttgttttcctttatgaagaaaaaataaaatagtcacattttaatactactctagttaggacagacttgtgcttttatcctgactaaaaagttaaatatttaagtcacatacatggtaaagatctaagtttcattttccacatggatgaccaggaacctggtcttgttggagctggcataggaggttctactgtcttgtcgtccactcttgtccctcccttctgttatcaaagttaaagcgcctcttcactcaaaagggcttcaaaatgtaaatggctctagagttagagtgactgtttgctcttctgctttctggaatgcagatgacagtatggaaagaaagaataatgattctatctaataggaaaggatttctt

SEQ ID NO: 15703 - DNA, 1427 bp, Homo sapiens
gtctccctctgttgcccaggctggtctggaactcctagcttcaaatgatcctctcacctcggcctcccaaaatcctgggattccaggcgtcagccactgctctcggccctcttacaccattttgtttgattgtctagtccctgtttctttttctttctaatccttattcatttaagcaaaaccatacattatcttttccagtcctttcttgtattcttactgtttttttaaaataactttttgccttaatagctcattgtcactaataacttctgtgttctcccaggcagtgttataacagaagggcaatgaaaacattggacatgaccatgagtgcttcctttccttaactctaggtttgtagtctgttttaaattaggattagttcctgcattctgaaatacattggcctagaacattttatcccaggcatttttgaatagaaaacagttgcgtgcttttattgaagattgttaaaataatcaccatagtaacttgatatgttagtatttttctttttccttttagtatgtttcaagtgcagtaatcgtacttgtctatccagtttctatgtatgatacgagttgcttacacgatgcatggctaacttgttaatttagttttctccttagagactttgagacccttaagagacaagattgagaaagagccatgtggcttggctctagaaacgtcattatcattaggaccatcagattttagattaagctgctattgaattaataaaatcccaatgaagcagagttatagggatagatttatagctggcagagtggtatcaaaggagaaaaacagtgaaaaagccaatttcactggttcgttcaatccagcttgttgctaatattagttacccttgttttaatgacagagagtggctggaatctgtagctaggggaggggcaacactgttagatgtgaggaaaggaagtgccaaaaatgcctggacagatggcttgtcccaaggccaggacacacactttaaaatccaacattcacctaagcaagtaattcttaaagatcttacagaaacgcagagtcaatcaggtttataaaggaaggctgaggggagagaggaggcctgggggcctggacgaagaggcctaggacctgaagagactccagcgagtctcgggaagcccaggggacctgtcaccatctgggcacttcccaggctcaatgctcagccagagtttgctggtggacctcaggattcgaagtgtgcaacagacggagtgcgcttgctgttcagggcggccccgtgcaggagcaccagctcaccctcaggcatctcggactggagggccagcagaaggtcagcaacttactcttaaaacgattgtttcggatcatattgatctctttcctttttccttttgtcctttcactgtatgacttgaatcagtttt

SEQ ID NO: 15704 - DNA, 1198 bp, Homo sapiens
agtagctgggactacaggcgcccgccatcacgcccggctaatttttttgtatttttagtagagacagggtttcaccgtgttagccaggatggtctcgatctcctgacctcgtgatccgcccgcctcggcctcccaaagtgctgggattacaagcgtgagccaccgcgcccggcccagacttgattattaaaagacatctgctactcaaatagatgccacccttaatctgtcctaatcaagtaaaatcttgttagttatatttgggtagaggaaatattgtaggctaatgaacagtggctgtcaacagttatcttgaaaatctagacttgtagccttgaaggagagggacccgaactgtgaagagatttgtcactaaccatgctatattggatgtaaacctgggagtggttacaggaggtggcttagggtaatatgtgctggcatctttaagtatttcgggaagagggatttagatccaagtggtcactcctactcccattggagacgcaatttggcattgtgtataaaagaagagtttttctaatagtgctgtgttagggtcctgaattccagctgctgccattcaaacaggctcacttaacactcacctggattattctaatgggaattcaaactgggtattggtgacctttgagggctctccctcccaaagagactatgagtgtgtgatttttcagggcaaaatgttctaagtaaatcaagtcatggttcaaagtctagatccgctccttgtaattttttttttttctttttaaagaactcagtcttgggtgctgtttacttcatatttaagcccatggtccccatgtgtattgaactggcacaaactaaacttgtctgctcctctaggtctcttctcatagtctgagttcttaaaattaaggtcagttaaaagaagcaccttggcattttccttattggagtttgctgtgtgtttgcaaatcaaaatgggaattgattcagtcatttgggctatacaggttttcatctcaagtcacttaagtgaaatccataaggaaagatgttcatgctttacctaccatagggctcactcacctcttttcttaaatacaaaacaaaaagcacctgccagttttaagggactgaaaaggtgttttatgatggctgaaaatacatctgagaataataatatagttatacctagactggtgataca

SEQ ID NO: 15705 - DNA, 1217 bp, Homo sapiens
gggctgagattctattttgagttttgggatcagtaatttaaacacagggacctctacgagttctctggaaaagcccattttgagaccctgaacagttgttatgccaaagcaagctcttggggtaaggttggcagtgatgctgctgataaattacttttaagatgcttggggctgaaggacaatgattttgtaatagtgttttaagttctcaggctgacctatgaaatctggaagtgctcatctgaaaggccagtattctttctgacaggcacaggaaaaactcgtcccctgcttgatcctcatgcaagcatttcttggaggaagccaggcctgtgggtcttgggggccagaacagagacactgagagcaacactactggcattttgaatttctgctgaggctgcaaaaacatttcaagggaaatctgaagttatcccttcactgtctacagcctcttgaattgacttctgggtgttacagatgggaccagcgtgtgtaaaagcagaatttatattctatttggatatcagaatcaagtttctctttttaaaataattttatggtaagtcgtggtttctctgatatgatttctgttgtgagcggaacaaaaatcatggcgaaatggtgttattacttaaccaaattgcctcgtgtacagacaggctgaactggtgctttgcctagagttggcctggagttttcagaaactcaattgtggcctttataaggctgtgcctggggttgtatttccaatctctctcaacttttgttcttgtggaagggaggaagtagagctgtgacagatatattgccagatagcacacaatagcacacaaaacgagaaagacacggcgtgagccattcatggagacagatttacgctctgtgctgccctcaaaccatagatccatctatttcagagaaacaacttgcccactgtattatatttcagacagggacatggcttagaagagagatgctgactccttctgtttagcttttgccgataatgctgcacgttttgctgtagaattacttttgtggggatgggaaagtatgtttggcaaaggaaggcctgtctctagattggaagtggaagaagggagatatcaggagagtaattggccatgctgtcgccatagtgaagtatatgtgtatatttttgctgggttttgtttccagccaactatattatcaggtgttggattttttaaact

SEQ ID NO: 15706 - DNA, 1140 bp, Homo sapiens
aaagccctgcaggtaattttttttctactttttaaaaattataatttttattttctttactgttcttttaagacatcctgttatagcatctgcaggtgattttgatgcccagccatgtttggggaaaaaagtttgggttctgagtgaaaatagaaaacgtaatgacatggaaaggaagtcaggggataagaaaagctctatggccagccatggtggctcacacctgtaatcccagcactttgggaggctgagatgggcagatggcttgggctcacgagtttgagaccagcctaggcaacatggcaaaaccatgttcctattcaggaacaaagaatagatcacaaattaaactctgtgggttttcataagtggaaagttggctttcgttgttctgtatttgggtgcttagtggacaggagttatctaaaagaagtaattatagttgtaatgcggaccctcaaagttgaaagtagattgaaatccattattttacaaggtggccttactatttatagtttgactgtaggtatggcagtgagagataaaattactttttctagctttgcaaaacgccaaacgtctttgaaattaagagtaaaaggggtttaaaatatgtactgctttataaagcaggaaaaccccactggaacattttgggtgtttacagaaatgggtattccatgggagagaacgtggtaacctatgttttgtcatcatttgtttaatcactgaaaatatattaacaggccaggcatggtagctcatgcctgtaatcccagcgctttggcaggctgaggtgggaggattgcttgagcccaggagtttgagatcagcttgggaaacacagtgagactccatttctacaaaaaaagaaaaaagaaaaaaaagtcacatgtggtggcacacccctgtggtcccagctactttggaggctaaggtgggaggatagctcgagccccagagatcaaggccgccgtgaactgtgatcgcaccactgcactccaggctgagcaacagatcaagactcttgtataaaaaagaaaaaaaatttttttaaaaatataaatatagattaacaaagtaacagggaatataatattttcaggttggtcatatagaggaaatactatattgtgttat

SEQ ID NO: 15707 - DNA, 1160 bp, Homo sapiens
gtagttaagttttttaaacactgcgagattgctgacatacactgcaatatcacgtgaataatttatggaggttgctcaagacaagcttttttttttttttatgtgagaaaccaggggggagtgggggaagaaggatgagagggtctgtgggaggggccaggacagaagagcagacacaactgcatgtgctgtgctggatgttaaatgtttctgctggtgtaggcagcagcatttgggatttcagggaggtttgtacaatacgatcttattaataacaattctgtcaagagagcacccgattaaattgaattgggtttatgactccctcttggtttctgaaaatgtgtggatataaaacctctgcgatgtgaatattggataacaagggtaggtttctttatttatttatttttttggttggttttaatcattcctcctactactgagaatttgcttgtttataaatgcaggggtaggcatttttcccaaactatctttctgttttctgctctcaaaataatctagagaagatggaactggcatcagtgggcagttatcctaagaacgtgactgcttctaggcatggtttgctggacaactctgagtctagaatatcatctaattaacacctgtgggacaatcctcttcatctgctaaaatatactttttttctcattacaaaatgagtaaattatataaaatgtctagagtacaaagaggagaataaaaataacctgtaagtcctccccctgctaataaaattggtatggtttttgtttatatccttctagtcttttttctgttcatatttagtgaacataatttagtgaatcgtatatactgtttagaagtcatcttttttttttcactaaacattacatcacaagcatattcccatgaatggtctatacggaatgtcatttctaatgattgtagtgtgtatgtgtgaattaactatactttatataacctatctcctgcaactaaaatgcagtgttagtttataatttttatccattttagacaggcaagttataaatatattttttggtcaaatttcagtatacattcttgatcatttctttaggaaagctctgagaagtagaatttctacaagaagcagagtgagtctgagggaaaaaatcattaatgtctcaaga

SEQ ID NO: 15708 - DNA, 1238 bp, Homo sapiens
gggaggctggagaactaaggaaacacctgtacatagtgtccgctgccctgactcccgcttagcacacccttaggcaggcgccccttccacctttccccgagaccgtcgtcgctggagggggcagggtccagcccgcctggatcggtggtgtgcacctgatgggatttgggaaatgggctatccgtaaagctttatcttgcttggcttagctgtgagaagtggttctcttcctctggtcccttctggggactctgtttccccatttcttgctgctgtgtccctcaccagttccttgcaggattccttcgtttttaaatgcccttgaatctagctttgccttggagaccccagtgggtgctgctcctgccgttttcttcctgccaagcctgaatcaatgtttcatctccaaccctctgccagtttggcccctcagagcttggtggctcaagactgttagcctggcagagccaggggtgaagggagaagctcttggagcaggcaggatgcccaccgctgcttcagctgcctcctcgcccagctaccctttggccccattgggccctcgtctgcctctccaggattgtatgtttcaagccttgtcctgtgttcctttgtctgacgctctgtgtattgctctttgaatcgagtttggaggaagagttgagttgtatgagtggcggcatgttggtagtgccggacttcctgtttcaagttttctggggcctcgctaattgaatgtggaaagtagcaccacttgacggctacaagtgccgactcctgaattttcccatggtgttctgacttcaagggctggcagccagggagaatgggcccaggggaagcaaagacctcttccctctgccgtttctgtcccacttaactgacctcactggaggctacatcacccaaagtagatgttagaaaacctaaattaatgaaccatatttttaaaatcctatttttcccaaacagggccctctgcagcccatcctttccttccgtccttctgaaaccacataccccaggcccaagcgccttgctgccacgcccaacctctttgggagaagtatgaatgcgtgtgtctaaattaaaagaaaaaaatatttaaacgttttttaacaaaaatttatttttgtatttaagctaaattgccttttaaattccttcaagcttggttcattgaggtggttaagtataaatgctattaactaggaattagctgtatagttaagttatgc

SEQ ID NO: 15709 - DNA, 2288 bp, Homo sapiens
acacctgtacatagtgtccgctgccctgactcccgcttagcgcacccttaggcaggcgccccttccacctttccccgagagccgtcgtcgctggagggggcagggtccagcccgcctggatcggtggtgtgcacctgatgggatttgggaaatgggctatccgtaaagctttatcttgcttggcttagctgtgagaagtggttctcttcctctggtcccttctggggactctgtttccccatttcttgctgctgtgtccctcaccggttccttgcaggattccctcctttttaaatgcccttgaatctagctttgccttggagaccccagtgggtgctgctcctgccattttcttcctgccaagcctgaatcaatgtttcatctccaaccctctgccagtttggcccctcagagcttggtggctcaagactgttagcctggcagagccaggggtgaagggagaagctcttggagcaggcaggatgcccaccgctgcttcagctgcctcctcgcccagctaccctttggccccattgggccctcgtctgcctctccaggattgtatgtttcaagccttgccctgtgttcctttgtctgacgctctgtgtattgctctttgaatcgagtttggaggaagagttgagttgtatgagtggcggcatgttggtagtgccggacttcctgtttcaagttttctggggcctcgctaattgaatgtggaaagtagcaccacttgacggctacaagtgccgactcctgaattttcccatggtgttctgacttcaagggctggcagccagggagaatgggcccaggggaagcaaagacctcttccctctgccgtttctgtcccacttaactgacctcactggaggctacatcacccaaagtagatgttagaaaacctaaattaatgaaccatatttttaaaatcctatttttcccaaacagggccctctgcagcccagcctttccttccgtccttctgaaaccacataccccaggcccaagcgccttgctgccacgcccaacctctttgggagaagtatgaatgcgtgtgtctaaattaaaagaaaaaaatatttaaacgttttttaacaaaaatttatttttgtatttaagctaaattgccttttaaattccttcaagcttggttcattgaggtggttaagtataaatgctattaactaggaattagctgtatagttaagttatgcctgtgcaaagaagaggctcaaatgctgtccccggcagctttcctgggggactagagctccttctggccatgttatatgaaatgtaattcttattttataaataatgtgatgtaaatgtaactggtgccccctccccgatgtgactgagggtgagtgagtggtggtggggctgctccttcccacccctcagaacagctctgatcctcgttaatacctggctgcgtgtgcagctgaggagggagtgaacctcaagcctaaatacctgttaggattggagggtctgggtgggcctgggcctagcaatcaagcttctacctgtaccttatgtaaggtagaccctcctagtgtcagcacctgagctagtttacctcagttccgcaggcaggacagccggtccgggaaccctgagtgagtgtgagtgtggatgtgtacagtacacgcactggacggcagcgggaggctgggactttccattacaaatagagacttcattcctgttgagtctagttggaacttttagtatgaatgtgagatttttctcctgcttgtgacattaagaataaaaaactgtgatctatcgtagagtacgttctgcattttatttttgcaggcaacactttgctcaccagcaagaacacagcccaaggaagggacccaataacctttcaaaacccaaactgcttcctgcggtgagggcccagggtcctccacggagaggacaggcatcttcctttcccaccaggaaggagtcagcccggagcctctgctatgtgcaaggcggtgtgcaagcaccggctgcggctctttgctgtctcttctttctctttggggctgggctgggtgtgcgttctggtgctgatgctttggcctgtgaggctgagctagagaagtgtagatgttagatgtgccggtgccatcctgcgcctcccaagcacgcccccactcactcaccttggcacctcgacccgttcaattacagcaacgaagaagccactgctgagtgtggtctcaggggaggcccggaggcagtgctcggcacccgggaacgtgctcaggcctcggtggggccag

SEQ ID NO: 15710 - DNA, 1087 bp, Homo sapiens
agggtgggagggaggcgagcgaggaagaccaagaacctggaagagatcacagggagtccagaaacgcctgtcatcccaagcttatgctgtttttctaaaagctctttatggggcttgatattgggttggtggtctttgtccagaaatatgaagggacaaagagggccataaccctcccttctgagagtttccaggaggagtccgagggtctagcttttctggtgaagccagttcctgttcctgccttctttcctaagggcctgctcgctctggcttccaccacagtgccaagcccctctggtctccaggggagggattgctgtgttacatagcaggatcggggtaatcaggccaacaggggagatggtggcgatttttcttttttaatctgtatttattatacagtcttgtttctttaagcccatactctgtctcttcccccgtcttcctctcaggtgacagtatcagtgagtgccatacagaattgtgtattcaccagcatcatgaaacagttgtggtcttttgagttgatcttggcagagtaaagggacgtgtcctggagccattcctgaatctccccttctttgtgacagctcctcccacccccccaaaaaataaaaaaaccacaaaaaacaaaaaaacaaaactaaggcacttcacttagagactggagtcctgcttataatcatgcatataacctttactttgatggatctggccagaggggtgttggagcccagcccacccacataccagtcaagctcttaggggagcagaagaaaagcaggaagaatttaaatgtttaattttttttttaaattgacttttctagttattaaaagttgcttgtttcagcagtgatattgtataaagaacatcttgtaagatactcctgacatcttgctttagcacatgtacagtacagtttctatgataatgtgtttgctctaacttccctggcttctccttcagcccatccactctcctctagagcagttgggttggaggctcattgaggcaagcagcaacattggagggggagcagggcagtgctgtgtctgctgcctcccatgcccgttctgacctc

SEQ ID NO: 15711 - DNA, 1130 bp, Homo sapiens
cgctgaacaatggcctccatggggctacaggtaatgggcatcgcgctggccgtcctgggctggctggccgtcatgctgtgctgcgcgctgcccatgtggcgcgtgacggccttcatcggcagcaacattgtcacctcgcagaccatctgggagggcctatggatgaactgcgtggtgcagagcaccggccagatgcagtgcaaggtgtacgactcgctgctggcactgccgcaggacctgcaggcggcccgcgccctcgtcatcatcagcatcatcgtggctgctctgggcgtgctgctgtccgtggtggggggcaagtgtaccaactgcctggaggatgaaagcgccaaggccaagaccatgatcgtggcgggcgtggtgttcctgttggccggccttatggtgatagtgccggtgtcctggacggcccacaacatcatccaagacttctacaatccgctggtggcctccgggcagaagcgggagatgggtgcctcgctctacgtcggctgggccgcctccggcctgctgctccttggcggggggctgctttgctgcaactgtccaccccgcacagacaagccttactccgccaagtattctgctgcccgctctgctgctgccagcaactacgtgtaaggtgccacggctccactctgttcctctctgctttgttcttccctggactgagctcagcgcaggctgtgaccccaggagggccctgccacgggccactggctgctggggactggggactgggcagagactgagccaggcaggaaggcagcagccttcagcctctctggcccactcggacaacttcccaaggccgcctcctgctagcaagaacagagtccaccctcctctggatattggggagggacggaagtgacagggtgtggtggtggagtggggagctggcttctgctggccaggatagcttaaccctgactttgggatctgcctgcatcggcgttggccactgtccccatttacattttccccactctgtctgcctgcatctcctctgttccgggtaggccttgatatcacctctgggactgtgccttgctcaccgaaacccgcgcccaggagtatggctgaggccttgcccacccacctgcctggga

SEQ ID NO: 15712 - DNA, 1226 bp, Homo sapiens
atcgcttgaacctgggaggcggaggttgcagtgagccgagatcgcgccactgcgctccagcctgggtgacagagcaagactccgtctgaaaaaaaaaacaaaagaattcctgtcttctctccgaaacaaagcagcatcagtgcccccgcaggtgggagggagcgcttgcaggagggagcagtgggtccgccacgacggtctggggagcaggtggggagggggcagagggtgcagcgtgtggtgggagggaggaagccacactgctatcttcaggtgcttcccgcagctccatttgcaaagagcggatgggtttggggaaggaaggggtccccaccctgtgccaatacagcgtatcagaggtatgttctctgggctgtctacaggttggcttggggtcctggggaggggcaggccaagcgggcagtactaggatcgggtcccagcatgacccggcttcaccttcccagaacaagaatgtggtggtggctgacttcgggctggcgcgtctcatggtggacgagaagactcagcctgagggcctgcggagcctcaagaagccagaccgcaagaagcgctacaccgtggtgggcaacccctactggatggcacctgagatgatcaacggtgagtggttcagccctgcccatcatggccctcacgggaagccatgggggagcccaggagagctgtaacctcccaagcccctggcccctcccagcctccttggctcttcagttaccctgtgggtcctgttgctcctataacacacttagtggcagccaggcacggtggctcacgcctgtaatcccagcactttgggaggctgaggtgagtggatcacctgaggtcagtagttggagaccagcctagccaacatggtgaaacccccattctttactaaaaatacaaaaattagctgggcatggtggtgggtgtaatcccagtactgtagtactgtaatcccagctactagggaagctgaggcaggagaatcgcttgaacctgggaggcagaggttgcagtgagccgagatcgcgccattgcactccagcctgggtgacgagcgaaactccatctcaaaaaataaataaatagaagacacttagtggcttaaataaatgatcatacagttctggagtctgaagtccagcgtcagcctcaccgggctgaaatcaagacgccggtagggtgagctccttctgcaggctccggggcacctgtttcct

SEQ ID NO: 15713 - DNA, 1292 bp, Homo sapiens
ctggcatcagggacacaggttgtcagtaacaggtacttggacccaggctgcctgtcttttaattaacattcagagaagaatgccctgattgccaaggatatattttcagctttgtgaagcaaattttatgtcagttacctgagtagtaagttaaatcggcactttaagcctctttcttcagagcattttaggtaccaagtttgaaatctacgaaatctaatcctcacttagattaaatagtcattcagaagtcagaagagctctgcagatggcctgagaaaggtttgaatattatggttaaaacattcaagaagaaagctttctagaaacgcagctgctatttcagtgcatgttcagttagcattttctgactgataaaatagaattgagagggaggaatgccagtcagggttctatctattgaaaggctctcctagtctgccatcatctagacaacagaatggtagttgtgacgtggagaagtagtatgaataggatcttcccacatctttaacccagaattacttgaggaaatcggggtcttcttttcttttccaggattctgctatgtagaattcgatgaagtggattcccttaaggaagccttgacatacgatggtgcagtaagtatcctcgggttttctctgtcatagcagttgagattgttttctttgccaatacttacactattttccctttatcattagctgttgggcgatcggtcacttcgtgtggacattgcagaaggcagaaaacaagataaaggtggctttggattcagaaaaggtggaccagatgacagaggtgattggttcttctaaagctgaacatcataaagatttgcagtatgcctaccaattccaactcgtgaacgttcctagtagaactcgattatctcataggtgtgataggttctcgtgagctcttaaaagtttgcgtaaaatcctagaaagaatggctgatgcttctgcaagcctggcgttttttgttttctgttggaagcaaaagctcttaaaatgatttcattgaaccttccatcacttgagttgtatgtcttccaaatgaatttttccatgtttgcgcagcaaggtaatgacacgacctcaactttatcttttttgtgtatcctcaggaatgggtagctctcgagaatctagaggtggatgggattcccgggatgacttcaattctggtatcagtatttaaagtatcaccacttaatttttcctaggagccttgctgctgttctctgtttcttacgagtagcccgcctggccggactacttatttag

SEQ ID NO: 15714 - DNA, 2268 bp, Homo sapiens
cctgcggttgggagggaatggggcgtggggggttagagcaggaccacagcctggtgagtccccgggcagccgtcctgcagccgccactcctgcgcctgccattggcctcctcacagcggaaacacagcttgtgagtgcatgtcagctgttaacaagtggtttttagtacattctgggctttgctgtatctatctagtgcctgtttgtgcgtttttttctttcttccgctgcttccccattttccttctgtcctttttctcctgctccttgttttcccagcagcacatggggttcctcggaggagcagaggtggccgccgtgggggggcgtttgggctgcggtgctgcgtcatttttcctttgctttctctttactttagacactggcccaactccaggcgtttcctttcattccctcagtgcttctcttctgacctgcatgttgagttctgtattgctggggcttccaacaaaaaccagagtcactgacagagggaacagcagagaccttgttggtattcagctgtgatggatatagagaatcagaggcaccttgttttcacaactaggataaaaatatctgcagggtcctttccattcctatttagagggagtcctggctccatgaccccctcccgagtggactgtccaagcagataggctcacacgagaaacagtgaggctgaaagggggggctatggaagagcggtagggagtccacggagaagatgcagtgaatgcttgcatgcattcacacgtgtgtgtgtcccagctagttcactcctttcgccgtgcgtggtggaggctggcctctctggctgggtgcagtgaatggccagcgggtttcttttctgctgggccaaggcgctttgggggtggagggggtggtgctggtgctgcactgggctgactgcggcgctgacgcagcgtttccccccatccctgttgcctgtgtgttgtgtggatctgttcctagtataggcaacataatgagatactgtgcttcccacctccccttcagttcagagccaaaatgggtctagaatctggcactttactcatttcctttgataaattgtactatgcagagctgtcaggaaccttcagatagcagtagaggactgcagctgtctaggtctgcggccacatcttggggacacactggactgttcccatgtgcagggttcagcagttatgtgggagtgctaggggttaggcttttgagcttgaacgcctgcgtgtgaacagatgaaaaatccttcagtacccaagtcccagtctgtcctatggggagcagtttgggggcggccggcagcaggagcctgggaaagaggccctcgccaggtgatggcagggccagggtggcctggggcacccagcggaatgtgcttagtatttggtcaccagccgtcatcctgggcttttcctactgtgtcttgttacaaggcctcagcaatccacagaactctctctccttccttccacctgtcagcttctctgcttctgagataagaaccatttgtgtaacaccaacacttaacttcagaaagacatgcattatgtggtgtaatcaaacccgatgctttcagatgacctacttacatcttcaatgtggataagataaagaacaaaacacatgcatctaaactgctgggcaatccagttgacttttaaatgtaagaatggaattccaaacacttaacacattcagctatatgacagaaagtaaatctatggatatggtattttgtgaatgatcttttaaataaaagaaaaccttacgtaatatttaatgcttgcctttatttttgagttctttttagctgctcatggaatgtaacaattttaaatttgggaagcaccattgaaatggaagagtcttcctgtcattttaattctgggatgagtgaagttattttaaaagctggtgatgattagaaataggatgccaattttttcccctcacttgctaaaaatgtccttttcccaaccaggcagaaaccttgaaagtctggctgtttttggttaggtaaaggaacatttttttcccaagatggaagaaatcaagcatttacacaacatgtggcttcttttaacaactgcttgtaaacgaaattctaggtgcccctcatggctgggagggctgctgcttcctgacagcagatcctgactctggggaggtgctgctataggttggtattggatagtgttaaaattgacttaggcagacaaagaagagctgagtgggcaaggtgcggggcatgaatgc

SEQ ID NO: 15715 - DNA, 1183 bp, Homo sapiens
acatacgtaggactttggctgtcaccaaatgagatgggagccactggacattttttatttttattttttgagacagggtctcactctgttgcccaggctggagtgcagtggcatgatcttggctcactgcagcttcgaactcctaggctcaagtgattctcccacctcagcctcccgagtagctgggaccacaggcgtgcaccaccacacctagctttttgtattttactttctgcagagatggggtcttgctgtgttgtccaggctggtcttgaactcctgggctcaagccatctgtccacctcagcctcccggagtgctggaattacaggcatgagtcaccgcacccagcccagccaatttcctaacagaaaagtgatatgattttgacatttctgcaggatccctctggccgctacatggccagagtggagtggggacggtgggaggtgatggggaccgcagctcccgggtcctgtgtgtccagcagcctgtctaacactcagccttgctgtttggttgtctttccagcggaagccctgggcctggaccacatggtccccgtgccctaccggaagattgcctgtgacccggaggctgtggagatcgtgggcatcccggacaagatccccttcaagcgcccctgcacttatggagtccccaagctgaagcggatcctggaggagcgccatagtatccacttcatcattaagaggtgcgggtggggctgggcgcagtggctcatgcctgtaatcccagcactttgggaggccaaggcaggcagatcgcttgaggccaggagttcgagaccagcctggtcaacatggcaaaaccccgtctctattaacaatacaaaaattagccaggtgtggtggtgggtgcctgtaatcccagctacttgggacgctgaggcaggagaatctcttgaacccgggaggcagaggttgcaatgagccaagatcatgccactgcactccagcctgggtgacaaagtgagactctgtctcaaaaaagagaggtgcgggtgggcgtaggggtctggccttctgctccgggcttggcttgggctccgggttttggggcatgtgggctaagcaggggcctggggaggcaatgatggggcaggggcagaatgaatgggttctctaacttaacacagagaataagacgagtctgagagaga

SEQ ID NO: 15716 - DNA, 1204 bp, Homo sapiens
tcagaatcattagactgacttttttttttccatagtaatagtattttgcagagtctcacagagctgcagatcttttgttcatcttgcagagttaacaagtctgatcctgttagtccagatttcttaaatttggccaagttataataggagcagtagcttgagacccgaagtcaggaaactttgacaatggatttttttttttaatccagagacttgtactggaatttgccttaccctgtcagctcatggacttaaggtttcatcccgctttatgagtgcttctgaatccaagtcattgttacctgaatttgcaaattaagttgtgatattcgtgactgttaaattcctgtaattagattaacctctttgcttgcttgtttgttttctctcctattttagcttaaagtatcagtggttgagaagagcttttcggacctgttactaccccaagctgtgtaatatacttgtataacagaaataccttctatacaaacctttttttctacttttagatagaaatgtctactttttcagcagttctgtgaattaaagagcagagtgactgtgggtctggaatggctggtgtacttgggaatgtactatcaggattttacagcaatgctgggaaatgacagggaaaatgacaggaatgaatctcaccagattttttatgtactcagcagagccttgagttacggtgtttattttccaatcaagtgaagatatctcctacttctcctactggaacatctcagcttctgcagtgaagaaaaattcctgtgatagttcagttctttagtttttctatttgaaaaaaaaaaatcatttaaatgatcctttgttcacggctctccttaatgactgagtgaacagttcctatctgtatatttgactaaaccttttcctaagctatctctcatggttcctatgtttttttatcataattaaaagcaaaaccatctggatcacctaacagtcagaggtcagtatctcagcgtgtgaattatagaggaaatacagagagaacctcttccacttttacttttcgtccaaataaaatgcatggtgtaccagaagttgaagatcgggttgaggattggggctagctcgatgacactaaggccccaacatcgcgggacctgctgtggcgcggattcttaggaacgctgttctagccggccccctctccaggggtcgccgtggc

SEQ ID NO: 15717 - DNA, 1163 bp, Homo sapiens
atctactttctcagaccgataactttagcataggtataaatcgatcacagagcctcaaaatccacccgatatctgggccatgatgtgaaatttggtaggtaatcgtcccacgttatcaacttgtaaagtagaaatggaagtgggggggaaaactcagccgccagtggcgtttgtgaaaagcacctggtaacaggctgtgctggaggggagttcagcccctagaaaagatcacggattaggaattacataagcataggtctcgggtccttttattttggacgcgatcctttcacgggatcgcctccggatgggagccggatgggatcccggacgggatcgtctcgctgggagccatgcaggaaaccgcaagagtcagaaacaggcgttgaaggcaggcagcattttccaaaacagctgtgtctcgggagctgccgggctgtagcgtctccccgagtcgcgcgcgcatgacgtggcgggcgcgcgatgacgcgacgcgtggcgcggtgcacgctgggatatttaagtctcctccgcggcgcggagccgcgatgtctccggcggctgcggcggctggagcaggcgagcggcggcggccgatagcgagtgtcagggacggccggggccggggctgcggcgggccggccggggcggcgcttctcggcctgtcgctggtcggcctcctactgtacctcgtgcctgctgcggctgcgctggcctggctggccgtggggactaccgcggcctggtggggactgagccgcgagccccgaggttcgcgccccttgtcctccttcgttcagaaggcgcgacatcggcgaacactgttcgcttcgcctccggccaagtcgacagccaacggaaacctcctagagccgcggaccctgctcgaaggacctgaccctgccgaactgctcctcatgggcagttacctgggcaagcccgggccgccgcagcccgcccccgctccggagggccaggacctgcggaataggcctggccgccgcccacccgcccgcccggcgccgcgctccacaccgccctccccgccgacccatcgcgttcaccacttttacccctctctccccactcctcttctccgaccctccgggaggccttccccacggtgagatgcgctgattttcccagatcatcctctggctcgg

SEQ ID NO: 15718 - DNA, 1203 bp, Homo sapiens
cgtgaatggtctctgtcaagcgggccgtctcccttggcccagagacggagtgtgggagtgattcccaactcctttctgcagacgtctgccttggcatcctcttgaataggaagatcgttccaccttctacgcaattgacaaacccggaagatcagatgcaattgctcccatcagggaagaaccctatacttggtttgctacccttagtatttattactaacctcccttaagcagcaacagcctacaaagagatgcttggagcaatcagaacttcaggtgtgactctagcaaggctcatctttctgcccggctacatcagccttcaagaatcagaagaaaggccaaggtgctggactgttactgacttggatcccaaagcaaggagatcatttggagctcttgggtcagagaaaatgagaaaggacagagccagcggctccaactcctttcagccacatgccccaggctctcgctgccctgtggacaggatgaggacagagggcacatgaacagcttgccagggatgggcagcccaacagcacttttcctcttctagatggaccccagcatttaagtgaccttctgatcttggaaaaacagcgtcttccttctttatctatagcaactcattggtggtagccatcaagcacttcccaggatctgctccaacagaatattgctaggttttgctacatgacgggttgtgagacttctgtttgatcactgtgaaccaacccccatctccctagcccacccccctccccaactccctctctgtgcattttctaagtgggacattcaaaaaactctctcccaggacctcggatgaccatactcagacgtgtgacctccatactgggctaaggaagtatcagcactagaaattgggcagtcttaatgttgaatgctgctttctgcttagtatttttttgattcaaggctcagaaggaatggtgcgtggcttccctgtcccagttgtggcaactaaaccaatcggtgtgttcttgatgcgggtcaacatttccaaaagtggctagtcctcacttctagatctcagccattctaactcatatgttcccaattaccaaggggtggccgggcacagtggctcacgcctgtaatcccagcactttgagaggctgaggtggtaggatcacctgaggtcaggagttcaagaccagcctgtccaacatggtgaaaccc

SEQ ID NO: 15719 - DNA, 1758 bp, Homo sapiens
agccccggtccccagaaccagtccgggaagccgctggggagggggcctctgaggtttgggtgccaggtgggctggaagaggccctgggtgagtggggctggcctgcagaacgggacttggggccggggctgggcaagggcctcggtgtggcggtggagctcacacggccctccccacaggtccaccccaactctgtgcacatctgtgcggtggttgtggagtacgagaccaaggctggccgcatcaacaagggcgtggccaccaactggctgcgggccaaggagcctgccggggagaacggcggccgtgcgctggtgcccatgttcgtgcgcaagtcccagttccgcctgcccttcaaggccaccacgcctgtcatcatggtgggccccggcaccggggtggcacccttcataggcttcatccaggagcgggcctggctgcgacagcagggtgagtggggtcccatgggggagagggggtgacgactgggagccccgcgctcaccccggcccctgccacgcaggcaaggaggtgggggagacgctgctgtactacggctgccgccgctcggatgaggactacctgtaccgggaggagctggcgcagttccacagggacggtgcgctcacccagctcaacgtggccttctcccgggagcagtcccacaaggtgagacgggcgggcacccacgaaggtgggcatgaggctggcagggccacagccacagtgcccccctcacagcaccacccttggccccaggtctacgtccagcacctgctaaagcaagaccgagagcacctgtggaagttgatcgaaggcggtgcccacatctacgtctgtgggtgagtgagtggggtcactggaatagggggcagggaggacaaggccctgcctgccacagttggcccagcccccagcaccccctcttcctgcccagggatgcacggaacatggccagggatgtgcagaacaccttctacgacatcgtggctgagctcggggccatggagcacgcgcaggcggtggactacatcaagaaactgatgaccaagggccgctactccctggacgtgtggagctaggggcctgcctgccccacccaccccacagactccggcctgtaatcagctctcctggctccctcccgtagtctcctgggtgtgtttggcttggccttggcatgggcgcaggcccagtgacaaagactcctctgggcctggggtgcatcctcctcagcccccaggccaggtgaggtccaccggcccctggcagcacagcccagggcctgcatgggggcaccgggctccatgcctctggaggcctctggccctcggtggctgcacagaagggctctttctctctgctgagctgggcccagcccctccacgtgatttccagtgagtgtaaataattttaaataacctctggcccttggaataaagttctgttttctgtatttgcctggtattgtgtgagtagatctgggacctccacctgcatcaacttaactaactcagaccccaggaacccatgtggtggggccacccagccctcccctcccccaggagaacacacacgctcaggccacctctgggcctctctttattgagggcactgggcccaggtcttccttcagggcccacagcgcccataaaacccaagggagaatagaagagaccccctgatacacgcacactcgaggggcgcctcccatcccctcccacaacacacaggacagaagcccctctgggccggcag

SEQ ID NO: 15720 - DNA, 1252 bp, Homo sapiens
cggggagagacaagaacccagaaacaggctctgttggggagaatacggtgaagtgttcctgatgattgagttcctggcgtccaggtgcttgtcgcattgtcctcgtgttcacgaaggtggatggtgcttgttttatagctaaggaaacacatttggaaggtcagtcattgtccagggtacctgcctagacaatcacagtgctgggacccctgcctggcaccctctggctctgagcctcgcactcctgaccgcagctcagtcccacccacctgctcagcaaggcgtccccagcaaggcacccagaacccgcatgtgtagagagactcctcggcagggctgatggagcgacaggtcggggtttctctaacaagcactttcctggaaacttcattttaacatgttcccatctccctcagaaaaagggcatcgagaagaacctgggcatcggcaaagtctcctcttttgaggagaagatgatctcggatgccatccccgagctgaaggcctccatcaagaagggggaagatttcgtgaagaccctgaagtgagccgctgtgacgggtggccagtttccttaatttatgaaggcatcatgtcactgcaaagccgttgcagataaactttgtattttaatttgctttggtgatgattactgtattgacatcatcatgccttccaaattgtgggtggctctgtgggcgcatcaataaaagccgtccttgattttatttttcaaggtcccttctgtaaatgctgtgctttcttccctgtgagagccaactttagagtgtctgctacctcttcattaccaatcagaattagatgatgtttaactgttagactgaagcgtgacgctttcatcagtagcttcaagaaagtctaaattgttaatttatggaattggacacagtattcagtttacccgtacatgctcctcccgcccctcctgttggcacccttgcatcgcccaggcctgattcctcctgggggtagttcacccccacgggttcatagttcagcggcgaatgccaggcagctgttttctggctgagcaaacagcacctttctcattgagcttcctctactgacctctgtcccccttgggatttcatcttctgaccgaaccctgatgttcagtggcagagacagcccatagccagaactgtgggtagaccagggttggggtgtgcggtttgggacagcccaaaccccagccgctgtgtcaaggcctaggacgccatgctgccatcaa

SEQ ID NO: 15721 - DNA, 1098 bp, Homo sapiens
tccgcgccctgctccgttcctcccaaaactctgaatcgaagaactttccggaagtttctgagagcccagaccggcgggcacgcccccatccccaaccccctctgttaatccctaccagcctgcagtcctggctgcttccaagcaggaggtggggcctctggcctagcggggccgaaaggcagtcccctcccccgcagtctgatttccctcttccccccaaaggcaagcacgaggagcggcaggacgagcatggctacatctcccggtgcttcacgcggaaatacacgtgagtcctggcgccaggtcggggtgggtgggtggcgtgggggtggggtcagggaagagggcacagggacccacccggtgtgtaatgtaacgcttgcctttcctctctgcacgtccaggctgccccccggtgtggaccccacccaagtttcctcctccctgtcccctgagggcacactgaccgtggaggcccccatgcccaagctagccacgcagtccaacgagatcaccatcccagtcaccttcgagtcgcgggcccagcttgggggcccagaagctgcaaaatccgatgagactgccgccaagtaaagccttagcccggatgcccacccctgctgccgccactggctgtgcctcccccgccacctgtgtgttcttttgatacatttatcttctgtttttctcaaataaagttcaaagcaaccacctgtcactggcccaggccctggtgtttgtggaaggaagcctcaggcacctgccatttgctggctttcaggagtcatctttgctcaggcccgtgctgggccatgtgggtacactggtgtaggttgctggacacaggctgactcacatccataaagacagaggtcttagggccgggcgcagtggctcatacctacaatcccagcactttggggggttgaagcaggaggagtgcttgaagccaagagttctagaccagcctggacaacatagtaagactgtctctaaaaaataaaaattaggcagggtggtactgcacgcctgtagtcccagctactcaggaggctgaggcaggaggatcgcttgagcccaggagttgtgaagggtaca

SEQ ID NO: 15722 - DNA, 3115 bp, Homo sapiens
aaggcctacagcgaagcccacgagatcagcaaagagcacatgcagcccacccaccccatccgattaggcctggctcttaactactccgtcttctactatgagatccagaacgccccagagcaagcgtgccacttggccaagaccgcgttcgacgacgccatcgccgagcttgacaccctcaacgaggactcctacaaggactccacgctcatcatgcagctcctccgcgacaacctcacgctctggacgagcgaccagcaggacgacgatggcggcgaaggcaacaattaaggccccaggggaactggcagcgcacgcggatgctactactgcagtctttatttttttcccatgagttgggggtcgggtgggggagggaaagggagggatgaccttcccagggagaaacccacgacctgtcctgtctttgatcgcctctttgacatttttgccaaaataccactagtggaaagtcaggctagctgtgctggtattggaatagcagcctcacactggcgtctggactgttctgtagattcatgcaagtggagctgtctgtctctaatttaacttattgctagataatagggttttcagatgaaaagaaaacttaaagaggaatggccctcattcagtaagttctgtggttccagtaaggatttttatgtacatacgctctcgtctctcgttttgggtactttctatctcatctgtctcggctctgcatgttttccagggtgtagcctacagacatggaacagtgtaaatcccagactgacagacttagaacctgaggtctcattcatccttatggtttaggccttgccagttttccgaagtctctgattagttgacagtattaacactaaattgcagtttacagtatttctacattacagccatatgtaacatcaagccatcgattgtgtacttttcctttgctagttgtttgggctttaacatccttattcagccttatccaggttggttttgctgttgatcggtctcctaggctaaatgagaatgaaagcgacttcaggtcaggtggctgtgggattttttttttttggtccttctttcctcttaacgtaaatccaccaccaaaattattaatcctcttgagagaaacgtgaaacgccacaaaaatagagaaaattcaggtctgtatgtcatggatcgtgttggtattttcagagaacatcccgcttctgaagctgctgcagctccctcctcagggatcacactgccgtcacccactctgcactggggcgtttcctactgcgcctcgtgctggcggacgcagctgggtgcagaagctgtggggtcggagaggcgtttggagaaggtctgtggtgcagtgtgtgaaaattcaggtgctagaagcctactggtagaaaaacccaaaaggaagagctatatccttaaccattctgtccaatttcgggagccttgtcagtgtgtcagtttttcctccccgaagacactccttccccaagtaattgtaggaagataaaaaaactgttaccagataacaaacactgaactcctatttgaccagaactttttcctctcgagatagttttttctttttaatgaaaaaagcataggaattggagattggcttgtctcacgcagccagtgcacatttggaattgacggaaacaacgttgctatttccacccatttgttttcggcagccttaaggccctcattctcatttcgggtgaatctgtctatctgtgaacgtggcccgcatgtgcattcttttttttatatatataaagtcagtgacgaggaactcccgagacgtgtaatgacaccacacttgttttctttgtttctttgttttatttaggcaagaagaggtgtgagtaattgaggaaaaactgacagatgcttttgctaataccaaaattgagcttacaattaggaactgagtatgtgtaacaggatacaggtgacagtgaagatagaagaaccacgatgaccacagactcaatgtgctctgtaacatcgcacagtttacccagcatgactttccttaggaggccccctcctcacgctagagtaaaagtcccagttaagtgaagcctaccagaagaactagtagaagaagctttgccgcttttgtgcctctcacaggcgcctaaagtcattgccatgggaggaagacgatttggggggggaggggggggggggcagggtaggtggggctttccctaatttatcttcatgtccagtgagcagtgttgcgtttttccttgtagcatttggaaatgatttactggaattacaaaacctatttttcctttaaatttcagctttggctctggctgctttttagaataatgcaagataaaaatcacacctgagggctgaaaacggagagggaatgggagacttgatatttaagcagcttgaatggtttttcttttctttatttttaaagaaatgcacttgcctatgatactgtctctccagtgaaatgattactcctccattactctattgatacaatattgtgcatgctagtgttgtatttctatacagtagcttgaaattgattaacttatactgtaggtgttatgtattcctatgacaaaaaaaattaagtcttcaaattttttaaaggttttttttttttaatttaatttttccttttgggggtaaagtttgctctaccaaatagtgattgtaacaaattgatctgttttggatgttgctatagtgacatgcagttatatattttgtttttaaaagggggggagcaaaagaaacaccagtgttagcttaatcttaatgtctggtgtttgtcatggtgaaattataactattacagtgttggagaacaacaaatatgttctctgaatgagcctttgtgctttttgtcatgttatgcagtgaactatttttaaggtctaatcagtgattatttttccagctccgtgtttctctaaggaattatttcacacacggaccatctttagcagtttcctcagtgatggaatatcatgaatgtgagtcattatgtagctgtcgtacattgagcaaataaacttacagatctgacgccagtgctccttagcttcattgtgtgagttttactgtcctttgc

SEQ ID NO: 15723 - DNA, 1134 bp, Homo sapiens
agctgagtctaggttccagcacgagcactagtgggaacttgagcaagttcttatctataaaatcggggcgataataatacctcataaagttaatatggggattaaaacataatgtaattaggggtctggctcatattaaatgctcaatggcaaatcctatctataagctacatgtgtagtaaattactcactttctggtgttggatgagctgtgtaggactattggcaaaagcagatctagtagttaataatgtgctaataacccatattcttgacagaagttactgtgaatgccgagagtaaggaaactttgggcacctgggaataaggaaaaggtttaaataaatactgtatgctgaggagtaaaaacagtgtctcaggagcaatgctaccctgtcagtcaaatttataatagactctggtacttttgatttctttatattactaagctctccattatatttattacaggttctattattgtcaaggtcccatcttcacttcaagctcatttacagttatcagggaaagaggttgatgtgaactcagaagtccatgttcaggaaatggctgaagctcgtaaagatgatgttgtaacagtgactggtaaggaggctgcattttgctctgtcagatgaatagccattctccatacataagtagaaatgtggtacacttaacggaaattttagcttttttatatttttccattattatgtcctcatgtttgacatctttttttcttctagttgcttatcattaatatgatgcagacattttgtttaaaaagacctcattaaatcatttaggaagactcattagtcctgtcattgggtaaaattgatttttaaattttctagaagagctgttttctaattctcgaacttaaactgaatacatatattatagtgcaaaatttaaaactaacttcgtgtgactggagtaaatcggaattttgtttggtatgtacattttaaacttgctctttcagaacaacaaattctcagtagcacaaatgtgaatcgtttttgtacatttttcattatatctggctacagtggtggctgatactatttttttaaggtttgtcattggttggtttttttgttgtttgagacagagtcttactctatt

SEQ ID NO: 15724 - DNA, 1162 bp, Homo sapiens
caccctgataaagtgatttacctttctgaatcttggcagtcttcctctgtaaaatgggaaaaatgtaatacttacctctctggtttgttgtgaggattaaatgatagttcatgtgaagtagctaacatggtatctggtgcagagaaaatgccaaataagtgataactattattgttattaatgatgaatagtaactgattattattgtcatcttcatcactgtggatatttagttagctgatcacagtgatttttgattcccaagtccttcatcagtgaagctaccagaatacccaagtatctcttgtttttccctttgagtccaagtggcttatttaatccctttaacagcagttgacatttttttccagttgatgtcattattcgaagcagtgagtttctgtttcattccttattgttcttttgttgctttgtcagtattaatacagaaatattgaaaatgtttcactagtataagtcacacttactctctttttcactatatgtatttttaaatttgtctttcagggtcaaaaattgcatgttcaaacaaaaggaggcaaagtgatctgtctgggaacagtttatggaaatatagatattcatgcatcagataaaagtgtaagattgaaactttctttttttttagtaattgcaactttgcttccatttggctcactaagttggtaggttctacaaagttcgtagcataacattccctttttaatgcattttagttcataagtaaattcaaatttgaaattgaagtgatgaaataatatacaacttaagttttagtttgtggtttaatacttttgacagttacttagttcctagtctggaatcaataaaaacttaaatgcttactatttaactcaagttctgaaaagatttttatttttatgatcatagattaaaatagatgattaagtaatatcaccagtaactggattggatttttcttgtgttaggtttatttgagtattttctaagacctttttacttcgcccttaggcaaattgaaggatgtttcaaaactcagctttcttcagtattttccacaaggtggcaccattagatagctttactgctctctcacagctttttttttttttttttttttagtagctattgagattttcgttgttataggaagatagtt

SEQ ID NO: 15725 - DNA, 1221 bp, Homo sapiens
tcctcctttgagtaccttctccttcttttagtcttaggctttgtttacatcaaacttctcaattccccacatagattatacattgaatctgctgtgcttatgtatatttccttcactttttatgggataaccttcttttgatatccaactatgttgtagctgcacacactcaacagttagccatagcctctttattccctgtatactgcagtcatactttggctggacataactgtctccccatcttgaatgctgagggtcaagaacagttttgtttccacagtgccaagcacagtgtctgagatgcattaagtggtgttcaataaatgtttgcagtaaaccagcaggtatttaagttttatgtgaaaagctgaagaagattttactattttctgaatagatacacaaagttgatgtattaaattttctgttttagaaaataccagaggaatttaatgtatttaatttaatacaagaaatgagaacacaaaggcattctgcagtacaaacaaaggtatagttgtttgtttccctttataaactgctattttataaatgctttcttcttttttaaaatgttgttttcattttgttttttaatcatttttctccttcataggagcaatatgaacttgttcatagagctattgcccaactgtttgaaaaacagctacaactatatgaaattcatggagctcagaaaattgctgatggagtggtaggtgttcttggtctattaattttaggaaacttttactctttgttaagatgtaatatttagccttttttttgttgtcttgtgttttgtctaacatgagaagaatatccaggacacttaacatttttacttaaactcatttccttcttattcgtatctgtattatgatggctatttaatgactccgatataaggtaaattatgttctaaatgaaataaagttaggaaagatctcatgtcaaaaatcatataattcgttaatgttttacttttttaaaaaataattgcattgttctctttactcttcccttccacccccacccaagtaattctgcattgattctacttgaatttcattttgtataaagtgttttagttatttgtgtatatgcttttcttttcttttcttttttttgagacagagtttcactcttgttgcccaggctggagtgcaatggcacagtctcagctcactgcaacctctacctcccaagttcaagtga

SEQ ID NO: 15726 - DNA, 2436 bp, Homo sapiens
acatgaacctattgcatctgtaagaatcaaggaagaacctgtgaatgttaatattcctgaaaagactacagcactgaataatatggatggcaagaatgttaaagcaaaattggatcatgttcaatttgcagaatttaagattgacatggattctaaatttgaaaatagcaacaaagatttaaaggaagaattgtgccctggaaatctaagtctagttgatacaaggcaacacagttcagcacattcaaatcaagataaaaaagacgatgacattttgtgctaaatttgcatataccatctaaaatccttttttaaaaaaatttaatgtaataaagattcatgaattctgaaagcaagccaaggacttgctcctatgtctgttacaaaacatagtttatgtagctttgtaacattcctcagtgcctgtccataactgtgaagtattaagcacttagggccagatgcactgtaaacattgcaggtttaaacataaaggagtctttaaaaaaaaatcatttacgttggaattttaggttttagaatagagctgacattaacatatatatatatatataaatatatatatatattttgtaatatgagccagaattctttttcaacaatttaaagcttttccatagagcttatttatatccttttttttcattttaaatgtgtcagcactgtagtgtaaatagcttttaaatatctttttagtgtgatttatactgaaatgtgagccacttaataaaggttcatatgttcatattaataaatatgttttctgttgagtctgtaaagacaaactgacaattcatttaagtcatttgataatgattctctgctggtatatctatttagtgtggtattgtagtgcaaatgtacgtaattcaaatctagtaaatatttaagttcctcacactgtgcaggcttttttttttttttctttttttcttttttttgatacggagtttcattctgtcaccaggctggagttcagtggtgcgatctcggctcactgcaacctctgcctctcgggttcaagtgattattctcctgcctcagcctcctgagtagctgggactacaggcacgcaccacaacacccagctaatttttgtatttttagtagagatggggtttcatcatgttggccaggatggtcttgatctcttgaccttgtgatccgcccaccttggcctcccaaagtgctgggattgcaggggtgagccacagcgcccagcctatgcaggcatttttaacaaccaagactcagttaagaaagtgtgcatctgcgtgtgtgtgaatgtgtatatatatgtatatatatatcatattttgcataattttcttaaattgctgaataagatcaatatgtgaaattccttagcccttctccccaaaatacattgaaaaaagttttatattaaactattaagaaagcagtttaggtaatagaaacagttttagaaagttgggagaaacaaggtatgttaatgataacaaaggcttctaactaatagttacgtggccagattacatagcctaccatagattttttttattgtgtatgggatgataagaagtttagagaattttcttactagtaagtacctttactaagtaatagctaagtataaaatctttagttacagaaagcttgtgagcaattaaaatccttttacatttttcttgcagaatgggagaaaaatatggcaaatacaaaactgtaaaataagggcaatgacaatgactcaactgccatatagagatataattaacaaaatactttgtggtacctcttatctctcaggatctcctccctaccctagcaaggcaaacaacttggagtacttccttttcgaaagaagttctagaaattaaattgaggtaggagacggattgacagtgcctaactaaagatgagtaaaacagacctctttaatgatagactcactatttgacactgcttctactattgtaattaaaaatcagaagtctttgatgtatgcgttgctgtaagaaactctgctcattgcaaatctattttgtttgtttttggtattattctgggcacatactttggttgatgactttcaattggggttctttgtgctgccttttgggttactgttggtatttccatttctggcttaatttatggtaaccatcaaaactgcttatatttctggttagggcgaagccatttaggaagaagcatttcaccagaacaagtaaaagttaattgcagcaatgatgtcagttttggcccctagtttaataaaaggataggcaaatatcataggaaatcttcatggtttgtaggaaatcagtgtttgcaacgtaggaagtttcatgggatagggaaggtataaatcaagatagtaagggttttgttttatatgtcattgtcttaccatgctccccacctatttaa

SEQ ID NO: 15727 - DNA, 1211 bp, Homo sapiens
ctccagcctgggcgacagtctcaaaaaaaaaaaaaaaaaaaagcatacatctctgaaggtaaagtataaatcagtgggctcaagatttgcaggtacagccttgttaatgccttcaataatgcttacgttccttgtcttatgggttataattttcacatcctcttcagatacaatctgagaacttgttgactacctttgttacatgcaaaaattttctattttaatattgcattatattaatggtttcatagtacattccagttctttatctgaatacaagcgttttgcttttatttccagtttcttggaccagaacaataaaatacataagacatcgtttctatatggtcatatactatatagaataaagaattgttatgtaaattattaaatgagtatacagacctttacataaaaactaaggtacctcagtggaatctgctacagtgcttccccctccctacccctccattttgtttataaccttttagctatctaaataatacgtattccatactcaggatagctggttagctagcaaaagaattaacatttgtgatatttacttgcaaactttactgaagccatattcattatcttccttgtcaccaaggctgttgaccttaaataaacattaagttgattttgcacaacactgtatttgtgtgtgtgcatgtgcctgtttttgtgtgtgtatgtttgtgggaaataattatgtttgtttccgcatatattcatttttaatgcattctgtaacttttctcgagtggtggtcattgagggtagggaagattttattttttaagttgtcgttaaggtatttcattagtgttcctgagtgtaaaacagttttttcccaaatacttatggcagataagagcatttttgtaaataataaactagcaccgtttgggtaaatttgcattattttttggacaggttcattgtcatgtaaaacaaatatctcaaaattcattttacatttagcaaaggtgcaacatttgtttttggagtttgagagatattttccttgtcttccatcattcaataaatactaaaattgataaccacagtctttttacttttgtaattattttcttaaaattgacattttaatcttgtcaactttaaaagttcttttctgtcttcagtagaaaccgtaaaatcttgaattgactccaatttgaattttttttttactctaaagctaa

SEQ ID NO: 15728 - DNA, 1225 bp, Homo sapiens
atttaaaattttcgtttttttatatctttttatgttgcaaaagacctgtgtcttcactgtatattaaaatgagttgtatactaaaaggaatttatcaaactaagttaaaccatgaattgcaacttaacctgacaattagatcatttcttaaataaaacttcaaaatatatttttaaccataataaaatgggcaaaattttgtttctagattttgttcaaagaccagatgatttactaagaattttttgataagttagggcatgtctcctagaattgttatctgtaagacctcaaaacctttaagctgaaataggacattaatttacatgtttattttagctgttagatatatttctaaattattatacaaatagggtggtcattaaaatttagagaaatagctatctgatgtaattattaacagattataatttctatcagtaacctatccaaaataagctaagtccaaacattcttctgcatattttaatttttagatcaaagaaagcaaagaattcaattgataaatcaactgaaactgacaatggctatgtatcccttgatgggaagaagactgttaaaagcggtgaagatggaatacaaaaccatgaacctcagtgtgaaactattcgaccagaagagacagcctggaacacaggaacactgaggaatggtcctagcaaagtacgtgtgatttttaaaatagtttgcctatgtgattttatattagccaatgtaaagtgacttagatatagtagttgcccttgaactaagtattttctccagaattaattctgtgagcgtttataacactgatgaaactgtaaatgagataaagtgttgtgattaaacttgattgacaatataatctgacaccttctgaattgatggcttcagtttttccaaaatgctttttttgagacggggtcttactctgttatccaggctggagtgaggtggtgcgatcttggctcacagcatcctcagcctcccaggcacaaacgatcttcccacctcagcctcctgagtagctagaactacaggcatgcgccaccatgcccggctaattttttttttgttttttgtagagacagggcttagccatgttgcccacgctggtctcgaacttctggactcaagcagtccacccacctcagccttctaaagttctaggattacaggcatgagccactgtggctagccccaaaatgttaaaagcacttta

SEQ ID NO: 15729 - DNA, 1176 bp, Homo sapiens
acgttaaatatgtaaggaagagtcttttttgggataagactagcactatatggtctttcaaagagattcaaatctcagctgtcatattcttttttaatgatcataagttggacaatgattactatgaacaagttgatatccatttgtcttttagcattagtatattgcagctgtgtagactgacaactaagtacttttgctgacatgttttagtatatttttgaacataggttgactaatacttgttacagaaagttctcaacttgtacagtttcataaccatgtaacttcttatgatatctgttcagtgtatatgctaactaattttaagatagaattttagtgtcttagagttgtgtgtataaatatattagctgtgcacagatctatatattccatttataaaacatgataaatatattcaccaatttttatttttagtgtcattaaaattgtgtgtgtatatagagatatatatacaactttatatacacacattttatttattaaatgtgatctatatatttactaattttttttttttttatagagtcatttgccctggctccatagttcccacccaggattagaaaaaataagtgctatagtatgggaaggtaatgattgtaagaaagcagacatgtctgtacttgaaatcagtggaatgataatgaacagagtgagtttttaaattttattcttgtagttcaagggtaagacttagtaattatatataagataattactggaatattatattagtaaccttctgacctcatttcttcaccctgaaaaaaaagttacatgtgtgtatttgtttctgtctgtaatttaaacagtgatttgtcaccaaaccactctcatcttctagtgttttcacttatctgaccaagaatagatgatacggtctataatttttctcttttatctttttctttcttttgaaattcaggagcttgttagatatatacaggtgttaataaagacttttctttggactagagattgttgttacaagaactttaaaaataaaaaaataattaaaaagacttatttttctgtatcattcttactggttcatttgtttaataggacttaagacatgaaaaaatcaaactagtaaatttgcattcatacttgcttacctacttaaatatatagaagtaatgcagatag

SEQ ID NO: 15730 - DNA, 2925 bp, Homo sapiens
tattagaaactgcacttgtttgtgaatgaaatttgaatttaaaaatggtgttatatgatataatttaagctttgatattaaaactggcttgtcaccacttctatttttttttttctagctatggaagattaagtcatgacaattcaaagaaaagaagatgtagcctcttttccagaataagagtactgactaagctgcctgaaagcttgtcactgattctttgcttcaggagtctcagctagggagttgaagtgtttacatcagactgtcttgtgcaattcttatatttattttactggttcacttttttttacatttattttagtctttatatttttatttttaagcattgatgtacttagttgttgaaagggtgatgaaactgatatccagatacttgagatcctggtaattggtcataaataattggcaaaataacaaattgtgaaaatagaagccattgctcagcaccgtttctccatcaatgccgtgaacttgccttacttgaggaaaaattctttaactttggaatattgcattgaactcagctatacacataaaacattttctttggtaaatcaagatccagtcagggtttctcttgaattattttggaacaatgccaggatccaaactgattaagttacagtttaagcacccttcagtattaatatatacggtattatataacaggtcaacaagtgctctttgatgataaaacttgtaatagagcaataattgtaaatggttaccatactgtaagatattttgataaaaattaactagtaatacttgtatttatttgaaacactgggctgtttgcacagctccaactgtgcatgctcaaaatgtgcactttttaaaattgttacttttaatgcgtatctttatatgggatctgttatagtatactagggcatgatatggtatccttttgagtgaggtatatactcatctcacaagtgaagtgcctactgatattactaaagtacattatgtttactcaagtaaataattttctccccatggtacactctagtgtaggctattcataccacactgaaatgaacaactgaagaataaggctaagaaccaataaaatatttctctaattgctagttgtaaaactgtatccaaattttcagaaaagacagcttcagcttgcaaattctatcctctaaacttatctggtgcattctccccaccccacccccattatataagggctattttagatgcttttaacctccccaacaaataatttgccaagtgtccaatgagaacttatcatgttggtgtgttaggtaaatcgggcaaatatgatagtgtcttacattgggccttgattttaagttgttatatttgtacaatcgagtattttagaaattacatgaaacatgaaacagtttttgcaattttttttaaactgggcatctggtttctaaaaatttatttgaaacaatctagaattttcttggtgcaaagtgtatcatgtggaatatcctcatatttttaccatattttaagaactttaagacgattaattgtaaataatttatttgattggtgcagttctaatccctaaatcataatcttaaaatcaggaatgtgtggagaacagagccatgtcatatcactttgctcttaccattccttttgatcagcctcaattcagcctcattgtgtagtatgttttttctttctatgaaaaacaacagaaagcatttcattttatttgcctatgttcaaatatgtttaataatgaccaaagtgcattctgagttttttcaaggaatgtaatactggagctttaagaacatacttagtttctcatgtgaaaacttaggctttgtctgatgtttttccttcctctattgtctaatgttgaggttgtttttaggaattatgttttataaactttttcaatataaggtacatgcctatacagaacttaacattttgcacagaatatatcaaatatattttgagaaaaaaagtacggcatgagttctgttaggaataaaagatgaaactattgtatctcacaaaaaatcttatttcagaatggaaatatttttgagaaaagtagctgagtatactggtttaagaaaatgcttgttttagattgaggttaacttagagttgggagttgatttattaagtacagtatacctctcaacagtttataaataatatgttgaattatgtcagtgtgggcagcagtagaatactaaaaggaaaatgtcatgttaagcaatttcagaacattaactgaactattttcaaagcagaaaaattgacattgctgcctttaagaataccatgaatgtaagaaattgaaagaaattgtaaaatatcacataatatagaaatggcagttcaaagagaattgtggcagatgttgtgtgtgaactgttgtttctttgccacatgtgttgtatttgaaagttttacagtaagtttaaaataaaacattctgtgactgacggtgtttttttttttaattttcaggtcatatacatttctatggtaattttgtgtttacttaacataaaatttagttagatttggggggagtgaaaataaattttttataactttccaacattttagattttgttatgattcttagaacatgaaagaataatacacaggtttttcatcaccaaaatgatattatatcattaatgtttgtttgcttctttgtttttgaatacagcaaactggctgtggcctgaaatattaaagctcattgtgaaaagatagtggtttttttggtttgtttgtttgttttgagacggagtctcacactgtcacctgggctggagtgcaatggcacaatcttggcttactgcaacctctgcctcccaggttcacaccattctcctgcctcagcctcctgagtagctgggattacaggcgccc

SEQ ID NO: 15731 - DNA, 1201 bp, Homo sapiens
ccttcttgttgccaaattcaatggtcacttttttagtgtttgcgttacttgatctgttggcaacttttgacaatatttattactccctcctccctgaaacgttttcacttggcctgtagaaaacattcctctggttttctatttttctgtccatttcttcttagtctccactgctgacttttccatgtcaccagaacctctaaatgtggagcaccccaggactaagtccttagactgcttctttgttttctttactcactttttaggtgatctcaactcaaggttttaaatactatctggtgttaactaccagatttattccagaccagacttctcattctctaaatatttagcagttgtctcaaactaatgtatttaaagcagaggttctgtaacttcctgaatccttacatttgcttcttttacaatcttctcctactaattagtagcaggtgtattcttccagtagttttgattttttttaaaaaaatttaacgttatccttggctcttcagtctcttccatctcttctttgtctacaaatcatagtggctctgccatccaaaatacattcacaatttgaactaccagccactctcacttgccttcaccctagtccaagccactgacctatcttttttgcatttgcccttcagactgtttttcttatagcagccagagtgagcctcttaaaataaaagattatattattccactattcaaaatcttccagtcgtttcccacctaagagttaaaaccaaaaccttctggcttacaagggcttacacaatctcctactgttcttgtttagtctgctttagctacactggcctccttgctattctcgtgaacactccaagcatgccctgtctcagagcctttgcacttggctctccttgaaatgctcttccttgagatacctgtaaaactagcttccatcctcacttgttccaagtcttggtcacttttcctagcctcctatataaaatttcaaatactatcctccaccccaacacattccctttcctgttaggttttttctcactactaatcaccatccaacgtagtatcttgtccattttgtgtctttccccactagaatacaggctccatgaagaaaggatttttgtttcccttgctcactgctatatccccagcacccacagcaatatctactatgaattaggtgcacattaagtat

SEQ ID NO: 15732 - DNA, 1177 bp, Homo sapiens
ccataaaattgttcatttctgttaatggtctaatctctgcagcgtctctatttaggcctcatttttccatttctaatactgtttgtgtctttttttaaaattttggcagaactttaatcatttcaagttttattaatcttaatggatgttttcaaagaaccaatttctagattagtttatcctttctgtgctttgattctggattccattgattttgctcttgtgattttcttccttctgctttctttagatctatttttaactttttataattttaaaagagttgatggaaattcaatttattgaatttgatagtttattcttggaacatttaagtgtcacttttgtatctcttgcatcatcttaaaagtttatatttgatttattaatgaattagtgatatattatttttctaaatgccgttgatgacctttaacattaaaacaaattttaaaagcatagtatatccatatgcattttatcagaaatccctaaatcaaagaaatgtaacccatttaggcacgcggaataaaagatgctacagaaatcatctttgagatgtcaaaagacgaaagaaaagatttctacaggactatagcatggggtctgaaccggcctttgtttgcagtttatagaagagtgcttcgcatgtatgatgacagaaaccatgtgggaaagtatgagaacttgtaatgctgcatgttttcatgtaattaggggaaatatttgaggaactgtccatttttttaaacaatagaaatatggtcaaggtattaattgttgttaatatttttatcctccaggtccatgttgtgaatatggtgaaaccttattattaaagcctcttttagaaattaggatctaattcactttatataggttagatttaagacttggcttacttaatatgtcaaagtctgctttgtagtaaagtaacataaaaaatacagtaatgattaaagatttaagaagtgtgaaaataacttgaaatttattggtaacatttttcctatttatttttagaatatagcattcctaggtcagtggcctttttttaaatccagaatggaaaagaactacatttctgaaaacaatgtatggatttctgttttagatagcatttatgggaaggcatcattaagattcttcaaatgcaatgattatatactgttactga

SEQ ID NO: 15733 - DNA, 1148 bp, Homo sapiens
ccaaatatattatggaagccctattttacggtctgaaccaactgtatgaatcatgagtctaaatgttgtcttcctttcctgttaagtagtatgcccaggtatatgttcttggatagcttgccagatgactggtggagtatacaggtgtgaatatagaggaaagtaaactgagaaagtaggaataagtatgatcttggatgtggaaactcagagtaagaattaaattctggctgtactgatctcaggaatgtagagacctcagaatatggagaatgtctgtctcatttaggggaataaacaaatactaatgaaatttgaaattggtagagaaaatgttatatttcaaattttaatttataaactttaattcttcttttagatctactggtatcgacaaggagacttagaaccgaaatttagaaagctaatttactatatcatattttctatcatcatgttgtgtatatgtgcaaacctgtacttccatgatgtgggaaggtgaggctgccaaggagaagtacttaccaggactcttcaaaatgatacattaggacagtgagtaatttttggataaggtatgctgaagaatctcctgcagaagtctgatacatgattttcatgttaattgtaaatgttaattccctcttgcaagggagacatatcctagatcactttgctttttctttaaggagctgatgttgcacctaaacattccaacccttaaagctaaaacagcacaaaaaaatttcacttttgaaatgaaatttttataattgtatggcaaaaggctatgtaaaaacaaatcttgcatcttaagacaaatattcttttatttctgttaaactgaatatacaattgttccctaggcaaccaacttttgcttataactacaatttaatttcacgttgacaaaacacagtgaaaagacaactttgtgaagatctaattacaataataaataaaataatttatacaagggtttttttttcttgacttttctataggggtcatattcattaaaaagcccaaaaggctacctttgccttaacccttctgtagtacaggaatgattcttagatttgtttccttttgttatagaagcaaatattgtttttttaaaatagcctgagatgagaggttatattgta

SEQ ID NO: 15734 - DNA, 1205 bp, Homo sapiens
ataatgcgcgcttactatcttaaattaaattccataattttcagctctgtattttttccaaattaaacattatatctcaaacagacccagatatatttgaatattattaatgacaaacgttaggcttaaattacaaataataatatacctaacattggaaatttccatcattcctagtttgtcagactcctttatcttgctaatttgcagatattgctttagtaatgttgccgtgattaatgaaggttttcttggtattaaaagatccaaagagataggaatatgtaattgaactctagattgttgatattctactttcagcattctgaagtcatggaaattcttactgtagaaactcaataaacttacaagtagacctttactttttagttcattactgataaaataatgaatatagtctcatgaaggtgagttttcagaaaatagaagcatgagttgtgaagataatatttttaaaatttctctaatttgttttgttttgcaggctataggttccaggcttgctgtaattacccagaatatagcaaatcttgggacaggaataattatatccttcatctatggttggcaactaacactgttactcttagcaattgtacccatcattgcaatagcaggagttgttgaaatgaaaatgttgtctggacaagcactgaaagataagaaagaactagaaggttctgggaaggtgagtcaaactaaatatgattgattaattaagtagagtaaagtattctaatcagtgttattttgttactccctactgcttactatgctctaagaatgtgtttataaccattcctcaaagcaatctttttcatgcttattcagtaaattagaaacttacagaaagtagcaaagccagttcttggactcaaaaactgataattaactttaacagactttttcagttttcaggccattgtcttcacactgttcttccttcctccccactttcctccttcccttagttattttcttctttcttttctctcactttcactctctctccactccttccttccttctttccttccttccttctttccttcttttctttccttttttccttccttcccttcttccttcttttctttttctttcttttctttctttctttctttctttctttctttctttcttgctttcttgctttcttgctttcttgctttcttgctttcttg

SEQ ID NO: 15735 - DNA, 1201 bp, Homo sapiens
tcaatttctttgtcactttatccagctctccacaaaatatcactaaaagtagttattgtaacctagtaatctcttaaaatttgattctgtttagaagccaagtattgacagctattcgaagagtgggcacaaaccagataatattaagggaaatttggaattcagaaatgttcacttcagttacccatctcgaaaagaagttaaggtacagtgataaatgattaatcaacaattaatctattgaatgaagagtttctgatgttttcttgtagagattataaaaaagtgcatgtatatttaaacctagtgaacagtcagttcctatatcctgtgtctgtgaattgccttgaagtttttttctcactcgtcctggtagatcttgaagggtctgaacctgaaggtgcagagtgggcagacggtggccctggttggaaacagtggctgtgggaagagcacaacagtccagctgatgcagaggctctatgaccccacagaggggatggtgagatgacccatgcgagctagaccctgcggtgatcagcagtcacattgcacatctttctgatgttgccctttcaattacaaatgtatgaaagtcacacttactttttattccaggtcagtgttgatggacaggatattaggaccataaatgtaaggtttctacgggaaatcattggtgtggtgagtcaggaacctgtattgtttgccaccacgatagctgaaaacattcgctatggccgtgaaaatgtcaccatggatgagattgagaaagctgtcaaggaagccaatgcctatgactttatcatgaaactgcctcatgtaagttgtccttgccctttgcctttctagaggtgcaaaaaataaaatgcaggcctactatgcaggaagttaggaaactactataaatcggaagaagggaaatcctaagaagggaaagtaagattacttcagatttgaaagctctagcagtatcaactggtcgtagatacatttttaaaaactgaggttggttattgtgttaaataagatttaaagaactggacctgtattacttgtgagacttgggctgtgtataggattccttaccaatttaaaatatgagctgagatagcttgtccttatgctaaatcattctgggttttctgtggtagaaatttgacaccctggttggagagagaggggcccagttgagtggtgg

SEQ ID NO: 15736 - DNA, 1117 bp, Homo sapiens
aacagtgtcacttcagggacaaaggcctggaagcccttaaaataagttatcttagatgtgccagaacatattcagagctttattcctttaagcttaaggcttcaatacttgtagaaatgcaaatattcttgagaaatgatacattttttgttctcaatttctcaattctacatacctgattatgagtgaagtatccaaagcaggttttcatcagcatgggggatggaaggtaggtataatatgaggacaatggaaactttgggagaagggagtgaggaaatggataaagagaaatttgaaaattttaggctggacttgagcactattgctgctttcctatgaactatcagaatgtttaaatgctttatcattcatggtccactctcaaccaacatttattatcctttagtaattaaacaatggttttacatacatttttataatgtagaaggaaattcaagattccataatcgtaaaatttttcagatttgtctaatgtgtaatttgtgcatcttcacatgctgctaaatgcagatttaaacattacatctgaggatcatgacttttcctcctttcttggagatcttggtataaaattcatctgctgttataaaatcaggtttctacagagttcgtttcacactaaaggtagtttgttactgtttgcatgaggaaaccatgtatgtctcaatctttaattttaggtggtagtgtttattgttcaccctccctcttgcctccaaaagaatgctgaattatacgccaatatttccatgtgtattctgttgccttgatgcgtactatacttgttgcatgtatattaaaaattttgtactatgcattggtggtcttattttgcttgacaaaaagttacctgatttaagtacacttaacttttgtttcagcaaatgtggtaaatatatattatttcacacctaaaatactaacatgaaaatggaatgggagaaatccttatttcaactcacatcaagttaaatatcctattttttaaaagtaacatgatatgctttagaatacacaacatctattcaatcaatcagtacagtttagtagtggttctggcagtgttactgatttaattataaaatagtcatgt

SEQ ID NO: 15737 - DNA, 1198 bp, Homo sapiens
gtaacattaagcaagtcacctctcttcactttttatcctgcagaaaatgtagatagtatcatgaggctgttccatagattaagttaattaacatatataaagtatttaagaatagtatccagcacatgctgctgttgtgctgttataggagctcttatacttcctcagagatctaggttcagaaaaatacagtataaaaaccaccaatttacgaaataattgcatcaaattgaaattttttactgtgcttggcatatgaaacagtttatggtttttatgacctagttgaaaataccttggtggcatgtgcctatagtcccagctgttcagaaggccaaggcgggaggatcacttgagaacagggggttgaggctgcagtgagctatgattgtgccactgcactctagcctggataacacagtgagaccgtgtttcttaaaacaaatttataaataaaaatactttgttctcttctagcgagttgaagaatttctcagcaaagatatcagttatcttatttcaaataagaaggaagctaaatttgcacaaaccttgggtcgaatttctcctgtaccaagtccagaatctgcatatactgcagaaaccacttcacctcatcccagccatgatggaagttcatttaagtcaccagacacagtaagtctcttaaatatgctttgagactcagaagggctatatcctgaagatctcctggtttttaatagcaaggtggcagtagagtttacttatgtagaacatttgcaaagccacatgatgtgtggctctctagtcctcaataaagttgctgtcttttaggaaggtgggtttttcctaatagttcttgtgtaatcatactctgattgcttaggtatacccttgtatttagggatggcgtgtagtttttagaataatttacaactaaaaagttaagagcagatcattctttgaagaagaaatagaaacctttttaattttcagagcaggggtcagcaaactctggcccatgggccaaatctagtctgttgccttttttgtacaacctgcaggttaagcatggtttttacattttcaaatagttgtgtaaaaatatcaaaagaatattttgtgacaagtagaaattttatgacattcagatttcattgtcataatgttttattggaacacagccatacctgtttgtttaggtataatctgtagt

SEQ ID NO: 15738 - DNA, 1418 bp, Homo sapiens
caacagtgaaggagcagaatttcctgtataaagagacccaggaaactgaaaaaaagctcctgtttatttcagagcccatcccccacccttcaaatgaattgagagggcttaatgagaaaatgagtaataaatgttccatgttaagtacagctgaagatgacataagacagaattttacacagctacctctacataaaaacaaacaggaatgcattcttgacatttccgaacacacattaagtgaaaatgacttagaagaactaagggtagatcactataaatgtaacatacaggcatctgtacatgtttctgatttcagtacagataatagtggatctcaaccaaaacagaagtcagatactgtgctttttccagcaaaggatctcaaggaaaaggaccttcattcaatatttactcatgattctggtctgataacaataaacagttcacaagagcacctaactgttcaggcaaaggctccattccatactcctcctgaggaacccaatgaatgtgacttcaagaatatggatagtttaccttctggtaaaatacatcgaaaagtgaaaataatattaggacgaaatagaaaagaaaatctggaaccaaatgctgaatttgataaaagaactgaatttattacacaagaagaaaacagaatttgtagttcaccggtacagtctttactagacttgtttcagactagtgaagagaaatcagaatttttgggtttcacaagctacacagaaaagagtggtatatgcaatgttttagatatttgggaagaggaaaattcagataatctgttaacagcgtttttctcgtccccttcaacttctacatttactggcttttagaatttaaaaaatgcatacttttcagaagtgataaggatcatattcttgaaatttttataaatatgtatggaaattcttaggatttttttaccagctttgtttacagacccaaatgtaaatattaaaaataaatatttgcaattttctacagaattgaatacctgttaaagaaaaattacagaataaacttgtgactggtcttgttttacattatatatatgttcgtaattgtttcctgagaattacaatgaataataatttgctttgtcactgaaaaccaccagtgaagtgcaatttggggaatatcaaacttagcattatacatttggatattctagttgtattgtaaattttaaaagattatcaggataacatgaccttgccttgaaaaacctaaatttcatacagaaaggaaaaatacatttctatgcttgaattctggaaatcatcagaaatattgacacttgagggtcactggtggaccatgctagtattttggtgctgagtaattagattatgtataggggtaactggaagccatgaaggaaggacttaaccagg

SEQ ID NO: 15739 - DNA, 1181 bp, Homo sapiens
cctgaacataaaataaaagtttaaaaaatggtgacttttatagtagcattgacatggccccatatgaataaattgtgaatatatattttcaatgcttaccgaggttttaaaaaacatttctaaataatatatgcaggtttgctatattgaatagtgatatacaatagtttagtcattctcaaatgtaattggtacatatgcaatctttttgggtcagccaacttatcaaattacatactagtaataatgccttacttaccttttgcttggtagcccaggtgaaatgataaacctgtttcaattcaggccccagttatagtaattacattcaaatcctaaactttatcaatttctccaaaaggaattagatcaaaagattcaatagctttctctgagattgaactggcttatgctactggtctttaataagtaataaatagaatagaggaagcaatattgcctgcttttaagtttttgagcatattttcaaaatgaaggtgaattaatagattcattttttgctctcaatttgtttttagtggtgggcatgttaagcttgaagaagatgtagatcttggctatgtggaagatgggacaccttgtggtccccaaatgatgtgcttagaacacaggtgtcttcctgtggcttctttcaactttagtacttgcttgagcagtaaagaaggcactatttgctcaggaaatggagtaagtatccagtaccttgtcagaatctatttcttttatatcacagaaatagacaggaccctaaactatttatttttcttaattatggaaaaaaatgatttttcatatttctagttggtatataaatactaattcaattatagttatttgaatatttctgttgtataatctgagaaagcctggggataaggaaatgaataatctttctaaccaaattctcccatccttcttttctgtgttactatgatctcatataatataatgccaactttttacaagtgaactaggagataaattttaacaaactataatgggattttaagaaagagaataaaaattggatgtgatggccacagtatttaaaaacgatgtggtctgggcactgacaaatctcaacagacttgtcagattgtacacactgctgtagccacaccagcgtgtacaagctgaggataagtcctagaaataaaaac

SEQ ID NO: 15740 - DNA, 1197 bp, Homo sapiens
ttttaatccataggaaaataagattctattttaaaagacccttctttaaaaccaaagtttgatagctgttataatggcagatctgtcattccaaaagaaagctagctaccctagtgaggctggagattgatgggctcaatcacatggtctgctctgaagtatacttctgatttcctcatttgctgtgtgttcttaagaggaatggaatctgcagacaggttttcagatatactctcttaaatttgatcctctcccatagtatccatggacaaaatccatatcatcttcatatgtaatcaatttgattacatatcatgcccaaactgaagggccgagttagaaggcagcattttatactgtgtgtttatgtcttctgtaatggacctctcttttgaaagtctttgaaatgtttggaaagcaatttaatgatccaaaattacataatgtaaaacagcatttttcatgacaggaagggatgtgattgttgatatgaccataaagcgatccatcaggccaaggtttgggtgagtgttgggcagtgttgccacatagctcaagccaagaacagaagggcagacagattgaaagatgtagcaaataaagtgactttttaccaagatcactgtaacgtgcactgaatgtttcctggtactgagtgtacaaaaggctaatgctataaggtttattttgactataaaagagtttatagatttgaatataaggtgcctcatgtaaatatgcttcctagttacaggtacacaaactctaatttgaaagaatccacaaatggctagctgagaagttaacagatctctatcattcgtctgtgtgtctttcttccctcacctatttttacatgaaattattatttcaaatgaaaatcatgatcatgtgccttttgggagacatggtttctctagaggtatatagtttgtaattacccgccttggtaataaccttcctgtggaactgactaaaaatttttgttttatttgtagagattatgatttgaggtatacagtaactttaatgttctattcttggaatctactctatctcccatgtttaaacattcttagagccatttgtgggattcattgacaaatttatagtctcaagggagagtttcaagaagtatctatatgtatactcatggttggggttctagaggcattacatctaaatatttatgacttt

SEQ ID NO: 15741 - DNA, 1573 bp, Homo sapiens
tacataatttaatcctgtctattgtcccagatctcttgtggctactttacctgttaccttttttgggattttgttctttatgttttacagttaccttcggaccagaagatatatggtatttttattcacttttttcagtgttttaaaataaggtttgttcatttattcattttatccattcatttcctattgtcgtatagttctaaccatatatatagtactttaaatattttcttatgttattatttaacacaataataaattcttatctaaagaaaagattattttactttattttacttaaaggaaagagaatttattggcaggatattgagtagcttgtagagtatatggaaggggagagccaagttaggaactggcaggagcgaggagggacaagacagctgcctgcacagtctgataggacacatctggctgctgccactggatgcccacatgggcagcgtgttgtaaatatcaccctaccagttggtaagttggcatgaattttccatgaaacacttgactgccatttgcagcatcatatctactttttatgcacctaattatatttttcctttcacttttatgtttttttctaaaactgccacctaaatacctttccactccgttaaatgtatggagtcaagataaatttctcattcttgctctacagtttaagatgtataagaagtaaacacttccgtggaatagggcttaatttggggctcaaatgttttgttttcctcctgagatgtttttgaatggataagactactctggttttggatgcagcaacttttctcctggcatggaagaactaaggactttgataaacagtttcccattgatagtataatataatgaggggcccagtctgctcttgtgaaaattggctgagcggcagcagcccatcccagctgtgtgtgagtagccccgctgttaaaagtacacctgctgggaattgttggcacatgctcatagcatatgctctgtgggggaggtgcttttaattccaagaggagcttttctcccacatctgcggatgcagaacaaagatgcagcaggactttagaaaacaggagtgtttctactgacattttattcattgctttgttagtcccgcaaatggagcaacttctggttgtttgtaagcagaaaaacaaaacattcaaaaccaaaaacctaattagtacttttgtcctttatatccctaggatgctctagggagtagaggtggcaggcatctttatcttcacccactggcacattagcagcttatgcaacttaggaagtcactgggagatgagtcctaaaagcctgaatttcaggatggggaggagataagaagcagagaactttgggagaccatggggcatttagtcctggcatagacacagaatggatattcacaggaagattcctgaggccagatatgcaggagagcacacattgtcacaaggggtgtggtgggaagagaggtgctggatgcctaagacagacttctgtgcttggcagattgactgagtgttgactctgaatactttgtggtccagtccataataggccagtc

SEQ ID NO: 15742 - DNA, 6474 bp, Homo sapiens
ctggagtcttagctacttgggagactgaggtgggaacatagcttgagcccaggagtttgaggctacagtgatctatggtcacaccactgcactccagcctgggtgacagagcaagatcctgtctctaaaataataataataaataaataaacaaatgttaaactaatctgtaaaattcctagattattagattaatagtaaatatgggactctaatatctgataacaaaattttaattcttaatactgtacattaattttactcttatacttggcttttcaaagatgtagtggtaatcataagttaggaactgtttatatttgaaatatcttaaaaattttgggatgtaattgaacttgcggttttcatacattttcctttttcattaaccatttaactttgtattagatatcagtagctgatcttccgggtttaatagaaggagcacatatgaacaaaggaatgggccacaaattcctcaagcatatagaaagaactagacaactactttttgttgtaagtcatatgtatactaatgtgatattcaaataaattgaaaaccagtgaatttagtttttctagaatttttttataaataagaaagtggtagcatatgttactccactaagtcttttataatatggggatggaagtgacattgtttactatatcatatgtaagtttggccatacttgccaacatgtatttccttaagatttccagcatactaccatattatatagtatcatagtatctctttcattcttcactgatgatgctagagttatatatgagattgtcttcatacaaattgtcttatcctagttttttattttattaataactgtaattttatcagaataattaaagttatcttaacacctcgatttctgttacttattttgaattactaagtaacaagtagagtatagagaaattgtttttagcttgagagagtaaaacattttaaaacatagaaatgtatagctattcttcgtatgttaaaggctgtctctttccttctcttttttttaggttgatatttctggatttcagctttcttctcacactcaatacaggacagcttttgaaaccataatactgcttacaaaagtaggttttctgttttactgtgttctgtatttggtctaatacataggaatgtaagactatatgaaataacataattacagtctatacatactccacctttaaagctttgatgtcagttaaagaattacttaaacttgttgtctccatttcctctacattcatttgctcctcaaactactgcagtggataaaacactcctgggcttccaaatccccattacatacttcccaggtttttatcttgcttcagctttggcacattgtttaattcctcttgtttctcattcttagttttgtgaccggtaatcttctggttctatttctactcttacactatttctccgtctactttttaggctcttttttctcatcctttaagtaacattattcagagttctgtcctaaccttattttctatcttactcactcccgttgctttagttacaattaataatattgatgactgccagatctgtagctgatacctaaatcttttcattgttctttctttttttttgagacagagtcttgctctgtctgccaggctgtagtgcagtggcatgatctcggctctctctgtctcccgggctcaagtgattctcctgcctcagcctcccgagtagctgggattacaagcgtgtgccaccacgcccggctaatttttgtatttttagtagagacagggtttcaccatgttggccaggctggtctcaaacacctgaccacaggtaatccacccaccttggcctcccagagtgttgggattacaggtgtgggccattgcacctggcctttgttgttctttagaccagatgcccatcggacatcttctttgactagatgtcccattagtcacttaaacttaatatggataaaagtaaacttttaaaaaacttttcggccatccccataacttagtgaatgtgtaagctatgatatactgattcttctcaccacctacacaagccctgtcagttttttatcctaaatctctctgaaatccatcctcttgtctttatctacgctgttataatcatcagcccttcttattggaatattgaatctggtcctttccattctccctgtgtcctgccttgcttctctccagtccattttttatatggcagctagagtgatctttgtaaaagcaccaagctgatgctgatgttccctgcctaaaacactttgatagacccccatagctgttaggttaaagtctaacctgagcatgatttatgaaatctgcaagtttaggcccctacctagcagtcctcctctgtaaccctctcccctagatgctatatttcagccatgtgatttctctctaagacaacatggtattgccttacctccaggattttatagatcctatttcatttgccactttttgtctataatgaataatactgctgtgaacatttgtatgcaggtttttgtatagacatgttttcatttctcttggatgtatacttaggagtggaattgctggatcagataataatgctttgtttaacattttgaggaactgccaaactattctgaattggtagcaccattgtgccattttacagtcccaccatcaatgtatgttccaatttttccacatgaatgtcaacacttgttattgtctgtcgtttttactttagtcatcctagtgggagtgcagtggtattttgttatagttcttatttgcatttctcttaagactaatgatgctaagaatctttttatgtgcttattaggcatttctgtgtctttggagaaaagtctgttcagattctgtgtgcattactatttgtattatttgtcttttaattgttgagttataagcatgttttgtatttttggaaataagtcccttctcttttttttttttttttttttttgagatggagtctcactctgtcgcctgggctggagtgcggtggcacagtctcggcttaatgcaacccccacctcccaagttcaagtgattctccagcctcagcctccccagtagctgggattacaggcatgtgccaccacgcccatctaatttttgtatttttagtagaaacagggtttcaccatgttggccaggctggtcttgaactcctgacctcaggtgatccgcccacctggcttcccagagtgctgggattacagacgtgagccaccatgcccagctggaaattaagtcccttctaagatacataatttgaaaatattttctccccttctgtgacttgtcttttcactttttcagtgtattttttctgtattctttgtggcacaaaactattatttatttatttaattttccagttttattaaagtgtaattgacataaaaattgtgtgtacttaaagtgtacaagtgatatttggatatatgtttaccttgtgaaatgattgaatcaagctaattaacatgatccatcatcttacatactattttatgtgtgttgagaatatttaaaatctgttttagcaattttcaaatatataatacattaactatagtcatcatactgtaaaatagatcttcagggcttattcatcctatttaattgaatctttgttccatttgaccaacacccctccatcttcctcccccaagcaccctggcaaccaccattttctctgctactatgaattcaaccttttaagattccacatataagtgggattatgcagtatttttttttctgtgcttggcttatttcacttagcatagtgttctccaggttcatccatgttgttataaacgacaagattttctttttttaaggctgaataatattcagttgtgtgtgtgtataccacattttcgttattcatccattgatggacactgaggttgattccatgtctcggctattgtgaataatgtttcagtaaaaatgggaatgcagagatctctttgacatactgattttatttcctttggatatatacccagaagtgggattgccggatcatatggtagttctatttttaattttttgagaaatctttatactgctttttacaatggctgtactaatttacattcccactcaacggtgttcaagagttcctctttctccatatccttgacaacacttgttatcttttgtctttttgataatagccatccttccaagtgtgaggagctatctcattgtggtttttcttttcatttccctaatgatcagtgatgttgaacattttttcatacatatattggtcatttgtttgttgttgagaaatgtcaattcaggttctttatccatttttaaatcaggtttatattacccaaagtgatctacggattcagcacaatccatatcaaaattctaatggcatttttcacagaaatagaaaacaaatcttaaaatttgtatggaacatcaaaagaccctgaatagccaaagcaatcttatcttgagcaaaaggaacaaagctggaagcttcacactacctaatttcaaaacctactacaaagctatcataatcaaaacagcgtggtactggcataacagtagacacataaaccaatggaacagaatccagagctcagaattaaatccatgcatttacagttaattttcgacaaaggtacctagaacacacagtaaggaaaggacagttttcttcgtcaataagtgatactgagaaaactgaatatccacatgcagagaaatgaaattagatccttacttcacaccatataaaaaatcagttcaaagttgattaaagacttaaagcctgaaaccataaaaccactagaagaaaacagagaagttccatgacatttgtctgagcaatgatttttttttaatgtgaccccaaagcacaggcaacaaaaagaaaaatagacaagtaggattgcatcaaactaaaaagcttctgcacagcaaaaggaacagtcagcagagtgaagaggcaaccaagggaatgggagaaaatatttgtaaatcatatatctgataagtggttgatatccaaaacataaggaagcaaaacaactctcaatagcaagaaaacaactcaaaatttttaattttcatgaaattccatttgtttcattcttttctttccttttttaaaattaaactaaaattttgtatagagatggggtctcgttatgttgtcaaggcttgtcttgaactcctgggcccaagcaatgctcctacctcagcctcctaaagtgctgagattacaggcatgagccaccatgcccagtcttacatatttatttatttttattacaaacagggcttcgctctgtcatgtaggctagagtgcagacatgatcctagctcattgtagcctcaaactcctggtggccttaagcagtcttctgccttttatctattattttacttgtgcttttcatgttatatctaagaaacagttgtttaatccaaggtaacaaagatttattcctaagtgcatttactttttccaagaatactacaggtataacattcagtgatcattactgacttctgaattttatctgtgtgaagtccagatacccatatttgactctagacgcaaaattacaactgtctctaggatatcatttaagctaaaacatactaacacatgacttaaccagagtcattttctgaaattcttccttttgttttctgttgttgggatttattgcatttcggtgatgtgaatgggttttagatcacctgggtcattaattaccaaataagtagtttatacagaaaccagtactaaaattattgggttttctcttttgatttaaaggagttggaattgtacaaagaggaacttcagacaaaacctgcactcttggcagttaataaaatggacttgccagatgcccaagataagttccatgaattgatgagccagctccagaatcctaaaggtaaacctatttattcatttaattctaatttaaagaataattacaatgtacagagaatgctgttataatcagtggaaaactgacagtttctgctcttaaaagtcaagtttgaagaaagaatatacaaaacatgtaaataacattgtaacataataattaccaaattctagaatgtttgatatggacagtaaattaaaggagacaaaagaaagattaatttgaactaaaaaggtcaggctacatgaagaataaaacttaaattgggcccataaggcatatgtgggatttgaataaaaggaggaaaaagtcagcatctacctgtgaagtctttcactttcattaacatacttcacaagctcttcattcgtctagtactgtacatcataaaattaaagacagaactaagaagttctaaagaagtatgtttcttggcaaaagtaactctataggtttctgaagaggatgagtcttctgaaaagaacttcatttttcc

SEQ ID NO: 15743 - DNA, 2318 bp, Homo sapiens
atgttgaagattactttcttttgtgactttcttctacctcatgccactgtttaaaagtaaaacgtattttaacgatgttagaataagactaccattctaaatatcacctacttatgaataacatgtaataatttttaacattaatgattccataaattgtattattgggattagaatgtgctttatgacaggttagtgtttcctctgaggcagaaaactcttttttggagatatcttccatcaagcagtactcgtgcccatatacaatctcttagtggctaggagaaataaataaaagggccataatggtttgttctctttcagacataatttagtaggggacaagaagtctgttcttcagtgagtacactagagatttactctggtgactgccttttgagttatgggtgaagtaaggtatggctttaccataaccttgattcattcacccttgattcatttctcgcccccgtcactgattatttccttgagcatatatctctgcctaacactttagtaggtgctatagaggatacatgaaaagtatgagatctggttccatccagtaagacattttaatagagaagatcaaaatgttacctggcagttggggaataatctgacttcgttggcagttggccttaacttcttaatcattgatccaggaatatttcaaccagagacacaactttctggcagacagacaaattgtacaacaccaacaatatcctggaccttgaaattctgtttacttcagtccattgtatcctttaaggcacctgtgctagcctagattttgtaataacactgatttatgagaatggacaaaagtggtagggaaattgttccctctccacttctgaaagtatgatgatgtattaaggatggaggagttattaaaaatgtctcttctgatgaggtaacaattagatgaaaccatgttaaagctgagatgaacacttagaaattcagggatattgggtctttagccttatgaatttgagctgcttatttaattggtgtaatttactacatattagtactatattcgtaaggattttttattaaccattacagattttacaaacagctagttatatggtaaacagattattatgcctttttgcaattctgaatatgattctagtatttgtgtagatgtatttggtactttttcccctaattccaacactagtttatatatatagcgaataaatctagttgtataaatttttaaatgccgtcagtagaaagcacacaaggttatgatttttttaattactggcttctgatttctttcacttctgatccttttcctttttctcagatgtagctgagtcttgatcattttaagacaacgatgggtagaattttgagattaatgttaattttccctttttgttaatttcagtcccctctcactatgcttttgtccagaaggatcaagaattctaccatcccttgggtctttgtgtataaacaatgttaaataaaggtagactcagtctttaagatattagacagtttttttagtccatgggattgtaaatataaacattaactttcctataagaatattttggctttgtaatctatagcctcaaattggtatttattatggattcactagacaaacagctgtttccttattgtcttttttctttagtgtttctgatttgctatcagtagctgtttttaaagccgtccaaggaaaataattatttacagtttttgaagtcacttttgagccctcatcaagctctcattgtgatgggagggatacctttttgttgttaaaagcctattattgttaaaggccttttatggaaaccaacttggaaaacaaccttaaatgtggatgtatcagatttggtttatccagccatgggagagaaaacaaacctaagtttactttacttgtacatatacactacaatggatagtatatttgctgtaaactacaatgtaaaacctcaataaaagtgcgctgtacttcttaatgtttattaaaagatgtatttttacaagtttctgcttctgtttttttcctcagtgttttaaggtgaaatattttgagaaatgtttctcagatatatgtaaattgaaaaagacagttccatttaaagctctaaaacgtgtgaactggaaggctgggtgcagtggctcacgcctgtaatcccagcactttggggggccaaggcaggcggatcacttgaggtcaggcccttgagatcatcctggccaacgtggtgaaaccctgtctctactaaaaatacaaaaaattagccaggcatggtggtgtgcacctgtaatcccag

SEQ ID NO: 15744 - DNA, 1244 bp, Homo sapiens
aggtctttatttgagttaatttttttatatggtgtaaggaaggactcgcattctttttttttttttttttttttttttttcaactggggccttgttctgttgcccagactggagtgcaatggtgtgatcatggcttactgcagccttggtcttctgggcccaagcaatcttcatgcctcagcctcctgagtagctaggaccacagatgcgtgccaccgtgcctggctattttttttttgtttatttatttttttttacaatttttattagagacggggtctcactgtgttgctcacactggactcaaatgatccctgctgcttggcctcccatgcttaggattacaggcatgagccagtgtgcctggcctcacacacttaaaagtagaattttagcttcagttttcagggtgatctagaaatattgctgttttctctttgcctgcatccacttgtgtacctcatctgccatcccatctcctcctcctccattcttaactaaccatgacataatttattagaatctgtttgcgtagtaggtagtagtgcaatcagagtctatgaaaggacaaagtctctattaccaacataattacattcaattaagcaaacaaccaagttgtaatggatatctgctgtttctgccttctgtgccccctctatttttctggacgtgggacttggtttgctctttgtgaaactccctacccacagtttagtctacagactgaccttgctcaaggagtgggcaaattgcagtgatttggccaatgaggattgtgtctctggagctacagtggttgtttcagagatgtacacagacccaaaaagggtcatgagagagatacctataattagtgagaaagaaaactgctgtagcctggaatattgctgccttaccaccagaaagtggtgtctatttatagaaccaacatgaagaaacgtgagccaagagatggagagagacagattcttaactatcaattaaacagctggatctagctgtgcctgaagcttagactatttctggaccttttagatacatgagcctgtacattcctttttaggtttgcagctgaaatagttgtgactgttatacagatctagtggttggaactgagaacacaagatataagaagatattttctgcttttgtggacttgacaacctaaaagtgagacagacagacatgagtaaatgaataaatgacaaatgcaagaattgatatagaatagattgacagca

SEQ ID NO: 15745 - DNA, 1220 bp, Homo sapiens
aatgtattcagctaaatgaagagattgaaaagcaaaggaacactttttcatttgctgaaaaaaactttgaagttaactatcaagagttacaagaggagtatgcttgccttctcaaagtaaaagatgatttagaagacagtaaaaataaacaggaattagagtataaaagtaaacttaaagcacttaatgaagagcttcatttgcaaagaataaatccaactacagtgaaaatgaaaagttctgtctttgatgaagacaaaacttttgtagcagaaacattggaaatgggtgaggttgttgaaaaggatacaacagaactcatggaaaaacttgaggtaaccaagcgagagaaattagagctgtcacagagactgtctgatctttctgaacaattgaaacagaaacatggtgagattagttttctaaatgaagaagttaaatctttaaagcaagagaaagaacaagtttcattgagatgtagagagctagaaatcattattaaccacaacagggcagaaaatgtacagtcatgtgatactcaagtaagctctttattagatggagttgtgaccatgacaagcaggggtgctgaaggatcagtttctaaagtaaataaaagttttggtgaagaatcaaaaataatggtggaagataaagtttcttttgaaaatatgactgttggagaagaaagtaagcaagaacagttgattttggatcacttaccatctgtaacaaaggaatcatcacttagagcaactcaaccaagtgaaaatgataaacttcagaaagaactcaatgtacttaaatcagaacaggtatgtttacttcttcatatatggtaaagcacaatgaaaaaaatgtacatttcacactaaggtttcaccttcatagaacataagttcatatccttacaagagaatgaaaatgaaccctctgatgtaattttaacttgagcctatcatttatttatcatttaagtacttttttttttaaaccattgttgcctttctttcagttaatctatcttgtatattctgctcaggaaataaaacactaatggattcagattttctttggaaagacaagagtttgtataactttatggagaatctcagcattagaaaagttattaatttcattttgtaatttttgttataatctcaaagattggtttcagcgtttttatttcatagtgatgttttcaagtctctacaactgaa

SEQ ID NO: 15746 - DNA, 1540 bp, Homo sapiens
tttccagcaaatggaccttcaaacagaaatacattagagcaactcttttcaaacaccattattgtatagcatttgcaagtgggtatcatagagttgtcattatatttacccagggttgccacagtgcctacataaaccagaatgctgttacatttctccaccgataaaagaaaatttatatatcagcacttagtactcttaccagtatctgtgaggtatggatgacatcctgaaaccatcctatagattaaggaaagattagaaataaagactttttaggaacccagcaccagcttcatgtacctgttgaaatggttagaagaaagtcttgataagaaacccaagatttggtgttacctttggactgtcctttgctagattctttcttccttttgaaaaagtgagttgaaatattacacaatgtgtatggatccagagattaggtcctgatatgccagagctgtcttcgtaactctgtcttccttcagctgtgtggattcagctcttctttccgtttctttttttttttttttttttttgagacagagtcttgctctgtcgcccaggctggagtgcagtggcgcagtctgggctcactgcaacctctgtctcccgggttcaagcaattctcctgcctcagcctctcaactagctgggactacaggtgcatgccaccatgcccagctaatttttgtatttttagtagagacaggattttaccctgttagccaggctggtcttgaattcctgacctcaggtgatctccctggtttggcctcccaaagtgctaggattacaggcgtgagccaccatgcccggcctcttctttctatttcttcccatcacattgctgaactccattgtctcttgttttttcaatttctttttccttgtaggagagggaaatgaggaaatcaaaagaggggaaaagttttgtgagatggagaaacataggatgtggactcctggctcacaagatcaagcccacagttcactaccattccacactcaagcacttctcccatagaggcagacctaaaatgccagtttttgtaatttttgagagaattctgtttgttaaatttcatgtggagaaatgaaaagaaattatcccatttatggaaggtttgcctaattataagttggccagtagtgtgtttctaggtacagagaaaagcttgatttggaattgcaaataaaactgatttttaaacaccttagctgagttcaaagatagttttaaaaattgtttttagtaaattaagagctgaaataatactgaattttaaaccttgctttcaaattcactcttttcaaacttggtggaaggatttttcaaattaacttcactcttggttaagctctcagtcacggctattttatttctgcatatggatctttatagagaagaattaggtaacattttcttggtctgataaaagtgtttatcaaattatgctttttaaaaaacaattatttcacaagcttgtttcacttaaccatttagggagggattttgctgttctgctggtaagaccta

SEQ ID NO: 15747 - DNA, 1146 bp, Homo sapiens
gacagggtctcactgtcactgaggctggagtacagtggcatggtctcaactcattgcaacctccacctcccgggctcaagcaatccccccacctcagcctcctgagtcgatgggactacaggcacatgccagcacgcccagctaatttttgtatttttagtagagacagagtttcaccatgttgcccaggctggtcttgaactcctggccttaagcagtcctccctcccacctcagcctcccaaagtgctgggattacaggtgtgagccaccatgcctggactgcattaccaactcttgggactataatttttcatgtttcctttgaagtaatctccttaactacaaatcagttcttatcaacaaatatttataaaccaaatatgagttgcttgattatgtttcaaatattaatcatgttctgtgtagaactcttggaatataatatacagcagaagcagtctcaaatgctggagatgcaagtggagctcagcagtatgaaagacagagcaacggaactgcaggagcagctgagttctgagaaaatggtggttgctgaactgaagagtgagcttgcacaaactaaattggaactagaaacaacactcaaggcacagcataaacacctaaaagaattggaggctttcaggtgtgccaggcttccttattaaaaacatgtaacaaggagtgggagtaattttgtcataaacactgtgcaaatatagagaaatgtaacatgcatgatatttaaatagcatgcaactgttttttttaggaaaaactataatagaaaaaactctaaatgtttccaaatgatgaacttatgatcgtgattatagcatattctctactgtgacttcagttctgtgtgagacttgtatgaaatagaattttgactttgacctttattttaccatcaaccaatttgaagtgatatttatgaacgcagtagaattcatgattgagtgagctaaaatatgcaaaatatttgaagagacaatgcttgttaaaagaatatatttcttggtataaatactgagatattctgttgccaaagacacattacaactagtcatttttatattgaacattagcttcacacacaaatagatatggtgattcccatgttcagtaaaagacaaaaatt

SEQ ID NO: 15748 - DNA, 1515 bp, Homo sapiens
aactagattaccatcttatgattcaaactttccatatatttaacccagatatatattttcagaaaaagtaattggaaaagttatgtgatcagtcaagtactgttttcctaaaatgtggtattgaaaatctcctggaatttttaataattcatgttgttttatgtgaaaagaatgtcatctttttattatattatctgtacatttgctgttcatctaaaatgtagataatatcaccccaggctaaaaaggatgagaaagaatttaaactgattcttataactttttcttttttttagggcgtcatcgttgtattggggaaaattttgcctatgttcaaattaagacaatttggtccactatgcttcgtttatatgaatttgatctcattgatggatactttcccactgtgaattatacaactatgattcacacccctgaaaacccagttatccgttacaaacgaagatcaaaatgaaaaaggttgcaaggaacgaatatatgtgattatcactgtaagccacaaaggcattcgaagagaatgaagtgtacaaaacaactcttgtagtttactgtttttttaagtgtgtaattctaaaagccagtttatgatttaggattttgttaactgaatggttctatcaaatataatagcatttgaaacattttctaatagttatgatacttatacatgtgctttcaggaagttccttggtgaaacaattgttgaggggggatctaggtaattggcagattctaaataatataatttccagatagtaattttaagagtactcatcgctcttgccaaataagttcagggtattcaaatcttggactagtcctgcaaggtataaagaataaaaatcccagtgagatacttggaaaccacagtttattattatttatctgggcaattattgtgtgtgtgaggatggaagggtagggaataatcgaacatctaaagccttgaataagagaatactaattgttttggtatgatgatactcagaaatggagatattataggaaaaagaaatcctttggaattttaactaaaatcactgcatatgggaaattaagagatccaggaccatatttgataagagttcctaaaaataatgtaattattaatgctaaagactgctcatgtatcttgatctaattactaaataattacatatttatttacctgataaatatgtatctagttctacaaggtcacatttatgtggaagtccaaagtcaagtccttaggggataattttgttttggctcagttgttccctgcttcctttttttttttttttttttgagatggagtctcgctctgttgcccaggctggagtgcagtggtgcgatctcagctcactgcatcctctgcctcccgggttcaagcaattctctgcctcagcctcccaagtagttgggattacaggcacctgccaccatgcctggctaattttttgtatttttagtagagacgggggtttcactatgttggctaggctggtcttg

SEQ ID NO: 15749 - DNA, 1134 bp, Homo sapiens
tgtatgcaacaaatagatcagagcaataaaagaagaattaaaaattagtgtggaatgcttaatacacccttaggcatctgtataattgacattaatctgtaaattaccactgtgttttcttttcctgtccattcctcacctgttatatttctcatcttccttttttcttccttttcccttcctttccctcccttttaattagcaagtagtataaagatatttacatttatttttcttagtattgttattctagaatagagttttttaaaactaagaattagtcattcaagctgttgtaaaccagaccctcagtataaattggattatcagcttagaagtagagtttatcttttaaaagtgttatcttcaatgtatttcaaggtagaaaataagtgattttcatcctttatttttccctttctttccattttaggacttttcttggtagagatggaaatccaaataaacggaatgtgcacaatgaaacatctatgcatttgttgtgtatgggacctcaaattatgatatctgaaggagcccttcatcctcgcttggcacgccccacagaagatgatttcagaagagcagattgtctgcagatgatcttaaaatggaaaggagcaaaacttgaccagggtgaatatgagagagcagctattgatgctgttgataacaaaaaaaacacacccttgcactatgctgctgcctcagggatgaaagcctgtgtagaggtaaattttttttttttttaatattctgcattgtaaaatttgtatccaggtgatatgtaactgtcaggtttttttttttttgattgtcttagtaatttggtcattttttttctcttttgtcttctaaaagacccttttaaataaagggcctcttttttttttttttttttttttttgagacagagtcttgctctgttgccaggctggagtgcagtggtgtgatcttggctcactacaacctctgcctcccaggttgaagagattctcctgcctcagcctccccagtagctgggactacaggcacgcgccacaattagcccagctaatttttgtatttttgtataatttaatttccaaaaatttccaaaattagcccagctaatttttgtatttttagtagaga

SEQ ID NO: 15750 - DNA, 2194 bp, Homo sapiens
atgccagtgtcagtgaaggtagaggaacccagatagaagaaaatcctttggaagaaaatattctggcgggggaagcagcatctcaagctggtgacagtggtaacgaggcagccaacagaggagatggttcagatgtttcaagtcaaacacctcaaacctcaagtgactggcttgaacaagtacatttagtgtgaactgcacacatctgggctctaaatgaattacaggtacagatggtatgctaggtggagtatgcttgatagagactttgattcacttaattccaactcagtgataaaccactgacattagggttgaatacagagaagttcccttgaatggtagcttcattttttattttaaccttacagggaatttcctttgtacttaattgaatagcttttcccctttttgctgacaaaaagaagagcaagagaaagagaaacaaaaatgaaataaataagttgtattccacactctaagaaaatgcagtcctctatttagcctaggcttgacaatacttaaattgaacatttaaactaaaggcttactccctaatctttgggtggctttcctttaaaaaaaaaaaaaaagttttcttcattctagaaatttattttggataaatccgataacatatatgtcctcaatctctttgtgctcttccataacttacttcctttttgtctgagcaatgtgaattgaagtctctttagtaccacatctaccatagtgtaattagttttaattttcacatgaatcaaaggtttcctttcatgtctatttacagtccaattgtgccaaactcttacttgtgtgctgactaacaaggcatttaggtgtgcagcatcctagagtgctccagggcagtgtcagcgttctcgggagtaaaaggtgccacttggtagcaatgatattccagaattaaatgggtttttgttgccatggagactgcatttatataaatgtagcctgtagcttaagttaactaaacctaatgctgctgttaaaaacagtttattttaatattaaaatacagttgattagcaacagcggtgctgtattttaagagacactttattggaagtgcaatcatagttatttgttttcacaattttacagtgcattctaattactgatgggtgcaattacttttaatcgtgttttataaaatagaaaaaaagtggagttttcatgagttatagtaaatcccacgattattaagaaattcagtaaaacatcctgcgcaacatgttaccgtgcctttgcctaacctaaatggatagttgccagttaaataagtgagtaattcaaatttcaatgtctcttctgaagtaactatgctatgaattgcaaagacctccataaaaccacccatggccttgcttttacactaactataacaactaaatgttcaatcagtttgtttgcctaactagcaaatgctgacatgtgtttgttctactgcgcaatactcatttgctgtgtgattactgtttagtgttgaaaaaaatcaacttcctagttatcagtgtcttactgtgaagaaaatactggtcttagttgtaattaggatacaatggtacagtgtgtaattaaaactagagtaaactgttggaatggctgttttacttaaatattatcaaaactagcataacataagcaaaatagataagtacaacactccatttagtgttttgccagattgttaccagaagtctacagataccaaactttcagttctgagtttgtacaggcaagtcctgggctgggtaaaaagttatattaatattgttatccacaagagatgtgattatgggttttgattactttttttttttccaaaccctgcttttgaaatatccttgtacttaaaattcatattgctaagacactgtattagaatatttaatattccccagatcctcttaggataaactgtgggaatcctcctatgccatggatatcaaaggtccacattagtttttatttctccagtgatcagaaacattgatatcaatccctattaaattagtggggggaatattaactttatctacagtgtattactgtatattaaactgaaatagtccattaaaggatttttttataaatttattttggattaaaaatatcaacaccaataagtttttagaccaagttgtaatttttccaatatagagtctttgcatca

SEQ ID NO: 15751 - DNA, 1097 bp, Homo sapiens
tggaggtctttgcaattcatagcatagttacttcagaagagacattgaaatttgaattactcacttatttaactggcaactatccatttaggttaggcaaaggcacggtaacatgttgcgcaggatgttttactgaatttcttaataatcgtgggatttactataactcatgaaaactccactttttttctattttataaaacacgattaaaagtaattgcacccatcagtaattagaatgcactgtaaaattgtgaaaacaaataactatgattgcacttccaataaagtgtctcttaaaatacagcaccgctgttgctaatcaactgtattttaatattaaaataaactgtttttaacagcagcattaggtttagttaacttaagctacaggctacatttatataaatgcagtctccatggcaacaaaaacccatttaattctggaatatcattgctaccaagtggcaccttttactcccgagaacgctgacactgccctggagcactctaggatgctgcacacctaaatgccttgttagtcagcacacaagtaagagtttggcacaattggactgtaaatagacatgaaaggaaacctttgattcatgtgaaaattaaaactaattacactatggtagatgtggtactaaagagacttcaattcacattgctcagacaaaaaggaagtaagttatggaagagcacaaagagattgaggacatatatgttatcggatttatccaaaataaatttctagaatgaagaaaactttttttttttttttaaaggaaagccacccaaagattagggagtaagcctttagtttaaatgttcaatttaagtattgtcaagcctaggctaaatagaggactgcattttcttagagtgtggaatacaacttatttatttcatttttgtttctctttctcttgctcttctttttgtcagcaaaaaggggaaaagctattcaattaagtacaaaggaaattccctgtaaggttaaaataaaaaatgaagctaccattcaagggaacttctctgtattcaaccctaatgtcagtggtttatcactgagttggaattaagtgaatcaa

SEQ ID NO: 15752 - DNA, 1122 bp, Homo sapiens
gttactaaaattaaatgagtccattatgaataattcaaatataatcaaatgaactggttaatgaaaactcaattttgacttctgtacttctgacattttggggttttttaatgcatagctacgacacatattttttgaattagcttttaaatattcaaaatatttttattttaaacacgaactttaaaggtttaagtgtaatactatgtcacttgtaatagtagctgtacttccaaaacagaatctgttacttacagctcagcaaaattcttccagtcatcttcactaatggatggtcttgtgtgaccaagtgcagtcattaaatgtgactgactaatagccagtctggttttgattggtcctggttggttcatggattcgtcctccttaagtaaaaaaagaaattgacgaagagttaaattaaggatgtaaaaaaaaatgtggtagtccagttgttacttcttattgtcagttttttcaagagaccatacgttctcttccttataagataatgaaacattgaaagcaaggaagcacataaccatgactgagttaatgtgttctggtcccttgtttataaatatagctcgtttataagtcaaagaaatatatatcaaaagggtgaaacaatttttaagaagttttaacaattataatgagggggaaaaagccatactccactttggctccggtatctgcctttgataatactgatatctgccctcagttgatctctttgttcttgtgtaagttcttggcaaccctcttgtgaagctgtccttaacactggaggctgtgaaaacaactggtctttcccaggaactccaggcaaatcctgagtcatggagcttggtgcagagagacattgtgagctctgcatggtaaattgtagtaatgaaagatggaaggaagagggggagagaaaaaactatctgtttaccaaatataaaaattaaacattttaagcaataaaacattaacatagataagtatacatgttaattaactgaaattaagcaagctgaaaagttgttcatcttttataaaggttcactgatacctgtgttatagaaccaccatcaagtgaaaattgccataacacagggtaggtttttttaactt

SEQ ID NO: 15753 - DNA, 1158 bp, Homo sapiens
cagtgcttgataactctgggagataatacactgcagtcgtactagtggttaagatatttgggaataaaattaatacttttgactagaagcgtctaaggataaaccaacagaaattgaatctggatacatctttaagatgtaatcagaaatgaccagatgactctagttagaatttttgaaggagggattacattaatatttcaaaacccttactctgtagataagtgtattttaattttttcccctcgtatacttttatttacctggggaaggagcttttagggttggggggtggtttgctatctctttagctagcagaatagtgtgcctttgatcctcacacatcctgtattatggacacagtagccatgcttcacggggaggtcagagctggctaccagcagtcttgccctttactgagcttagtgtcatctttggatgctgtcatatgctgctttgagtgaaccagagaaacagccatttgcagcatgagaaagccccaaaagctctgggatttacctccactttagtaataatgaatattttttagcattagaatgtgttatgtcatttgaattaattttgactacactttggcttgggagaggaattattttaaatagacattggtactttttgaacttgatagctaaagattctaaaatgcatgttttatactaagttttaaccagtcaggaaaattttatgtaactagtgatagtttatttttttgtatgaattttgtttaggctgcaatgtttagcttttgttaactcctcactcttgctgtcttaagttcattactatgtttaatggcctacttgccaagatatttagcatgtaaaaagcagggttttgattaaaaaaaaaaaacggcttcatattgaagctgagacttacaataacaagttgagtggcaagcctggtatgctgtgtcttattgccagaatcttagtaaatgtaatgttttaaaagtttgttgtctttgtatattaataacaaattatgacaagttaagtttaaataagagttacattattgctctccctgtgtcatattttactaagattttgtgcctcatgtctactgctgaattgtttactaggaatgttaaaaggaattgataattcattttcattttacatttttatataatca

SEQ ID NO: 15754 - DNA, 1158 bp, Homo sapiens; identical to SEQ ID NO: 15753

SEQ ID NO: 15755 - DNA, 1113 bp, Homo sapiens
tttaattgttttgtgcttggtcaagtattcatcttcttcttcatcaagctctgattcttccagcagttcttctgattctgaagatgaggtaaggtttgcttataatggttcatgaaataatatctcttaatttctttaatgtcaagtggaaacccattgtgaaatatctgttagaaatgttgacttccaggttttgattaattatccataacttagaggactaacatgagtgagtggtaactaggaacttaaatattggtatataatatattttttagattttaaaatttgttttgttgacctaaaaatatcagtagaagaaaatatttgaaaaatcaaatgctatttgactagatgctaggcattacatgtgattcaaatcacttgatctttataacaggaaagtgatgtattaagtattaagaaaaaaatatagaaactgatccttttgtgaaattttgttcactgataaaagttttatattaataaatgtgtaaattagatttttgagacagaaagcaaatgtttctaaaaatattttatgtaggataagaaacaaggaaaacggagaaagaaaaagaagaaccgttcacataaatcttctgaaagctccatgtcagaaactgaatcagacagtaaggtaaattatttaaattattaatatattggatacaaagacatttaattaagtttttctgcctaaagttgctctcaatttaaaaataagatagtctgatatttgtactttgatgttctatgccacttaattgatatacttgataatatcttgcatgtgacatttaataattcaagtgctttcatatatatatatctccatgtctccacatttccatggcaactgacattattgtccctgttttcataaagaagttagagttcagataaaaagcattggcttaaaatgatacagctggaattagaattaaaagttgagtctttatcttctaaaatctggtccaatgtcctttctactataccgtacctaaatttgttctgtactaaccaggattgtcagacacacagttggctttcaaacattactggtcagaaaaaagttaagaagttctcggaaaaaagtgttgattcctgagc

SEQ ID NO: 15756 - DNA, 1113 bp, Homo sapiens; identical to SEQ ID NO: 15755

SEQ ID NO: 15757 - DNA, 1186 bp, Homo sapiens
gcccaggatttcttcacttttaatagatattattctgtatttatattaaaaactcttatttcaaagtaaaatcattgaaaaagaaatccataaagcatggtaatttagataaaagagcttaaaccttgaggaatatacttttaaattcaatgtagttttgttgagaattccttttcgttgattagagaaagattgttttattgttctccagtagtcccacaaattcagtttatataagattttagcagatgcttgaggaaacattaagtagtagtaagagtaagattcattacaaaactattattttgtttcctgtaaaacactaggcatgggttttaaggcatagaaattcacatgttaatatcttggtaaacttgattatagttgctaataaatttacaattgcaatttataactttatttaaatttgtttttgacttctaaatctggtatgatagtaaatgtatttaaatgttaactaaaagtgagaaattagtcttaatgttttcttctcattgccttgaaaacataattccttaaccatgtcttgcttcttcttttaattatataggaacagctggacgtagctctttccaaaatctgcaagaattttgacattaaccattataccaaggttcaacaagcttatcgacttcttggaaaaacacaggtttgttacaaaaggatgtttggatttttccttaatcaggaatttgttgtccttcatgattaagtctgaatattattaatctcatgtccttaaaaagttttatttaacgaagtacatttttattctgaattaacagtgataaaatggttgttcttgtagactcagagggtatataatgtggttaaaacattacagtagtttgttttgaactatgaagtacttgtcaggtttaatattttcacaattttatgtagattttccaataagtatattataagataattcagtgggagacaacatgtagtctcttttaactcagctcttggttctgaaacaggacttcctaatttgcagcttcacgtgttgttagatagccagcatgactccctcaaaatgatatgtcagcattgtacattttgtacctttatctgtaaaacaagtccattttatttatcacatatttcagagggtccttttatccccaaaatgtcataacttctctcataatatatggct

SEQ ID NO: 15758 - DNA, 1497 bp, Homo sapiens
tgataatgcacaaagtacttacatttattgttaattttttttatccacataattggaataacacctaaatagttttgagttgttgaattactctgtggagctgaaagaagtgtttattggacaatgaaagagctttttattcgctgagagtattactgtattttgcatggagaaatcaggctgattatccaaggttatcaacaggctcctgaattgattaaacacaaaactgtcattacaaatgtactatggtaacagttattcaattacttggatatgcatatgtagactcttagaatctaactgtgatattttatttgcctttatctctgataggattcacaatttgattccacaactggatttctaggtaaaactatgggcaaactgaagattttatccagagggagccaaacaaagctgctgtgctatatgatgctgttttctttatttgtcttttttatcatttattggattattaaactgaggtgatgcatgtaattgtgaatttggaatttgttccaacttaatggcttgcagtaccactttgataaaaatcagcatcaaaacattcctagtgttcaaatactgtggcattttccattgaaaattgctgaattttgcttattttataaatcacattagttaatacagtggtctttgaatactgtttcttaatgactcattttagcccctattttcaggggtagtgagagggtgtggctccactaatttccagtttgtttttctattgtttgccaactgtcagattaaatagcattataatattttgttgtaatcataaatgcaggtttatgtcccatgtaaggaaacttagtgggagagtaacagaatgcctggagagcctgactctgagctcttgaagtagtcagccagtttgtggtaaaatggtaattgaattttcctaactgcatcaactgtaatgatatactcccttctcctcctttatttagttaaaattgtaggctgatttctttttacctacaatcttcctaataatttttgatgataatgacccctcatttctttctgcccaaagacctcattctttaaataaaacttgttattttggcatatttctggtagggcccattgcacatgtgtatcagtatagttattatttcatattaactttatgaattctcttgacttggcttataatagttttatgatttttactacataggtagcacatttatcatttgtgacagaataatgtgaagttaagtaattactgaactttaaatggaaatagtatgcaagaaactcaggcattgaacttgaagataagagtattattgctttaatccagtgtatttgtttatggaaagaaaaacacaaaggcagactgttgagtaaaaaatattaaatattgttaaatattctgtattttggaatttatccatttataggcttcaaaagtaaatttttaaataaaatatattagtcgactgtgttacttctttaagtctcttt

SEQ ID NO: 15759 - DNA, 1176 bp, Homo sapiens
tcagcactttcatatttgtttgtgtggcacatgaaatttctcagatcactaatgatcttgcacagattattattcctaaagataactcatctctcttgaaaaggttggcatgtatagctgcatttttttgtggactcctcatcttatcatccattcaagataaatcaaaacattaggttccaaaaattctaaaaaacctaaactcttcaggctacctttgtgtgtctctagaagagaaaagcatctatctggagatataaatgtgtatgtaaatataaacgtttgtggcaagaggacagttctgtgacatctgttgaacatatgtggttgtatatattggaaatgtacatatccaatatgaaatactaaaacaaacaaacaaacaaaaaaccagaatgcattgtataggattgcatgtgaagtcttttctactgaatctatatttccatttgtaagtgattttaagttaacatatgaaggcagggaaatgattacctttccagtaaaaagtatagataatttaattaacttagtgacaccaccaagtgttttgatataactaaatttgtggtaataagactgtctgcacctgtattcattgtggaacttcctctttcattggaaactttcttactcaagaatgacggcagtattgttttcttatatgtgcaatgaagtggaatgataaacagtatgcctttaatttatatgtgttcttgttctgatgttgtttcctgaaatgatttttcttcctaactgtggttttcgggtatgcaagcctaaatctttgtacactttgtctcacagaatagttctgaggctccatgacagggttttgtcattgttgatgttattgttgcttcgttttataaaaaagccaaaattttttttccaatccaaacgttcacctgtttcctttcctcaagctataccagtgtaataccagttaccctgtggatccatttaatatgttatccccactaattaattttcgtatattatttccaatatttggaaagctctttatagccatttggtatttcctattacccacctcctattttaaatatttatcagtctaaacttgtgcagtgtagtaaacatgcaagttgttacgattgagctgtattaccataagtagaattttaagtaaactggtgaatttgggcaataaat

SEQ ID NO: 15760 - DNA, 3583 bp, Homo sapiens
agagcaacagagtatttgccaataaatgatctctcatttttccaccttgactgccaatctaactaaaataattaataagtttactttccagccagtcctggaagtctgggttttacctgccaaaacctccatcaccatctaaattataggctgccaaatttgctgtttaacatttacagagaagctgatacaaacgcaggaaatgctgatttctttatggagggggagacgaggaggaggaggacatgacttttcttgcggtttcggtaccctctttttaaatcactggaggactgaggccttattaaggaagccaaaattatcggtgcagtgtggaaaggcttccgtgatcctctcgctgcacccttagaaacttcaccgtcttcaaactccatttccatggttctgttaattctcaaggagcagcaactcgactggttctcccaggagcaggaaaaacccttgtgacatgaaacatctcaggcctgaaaagaaagtgctctctcagatggactcttgcatgttaagactatgtcttcacatcatggtgcaaatcacatgtacccaatgactccggctttgacacaacaccttaccatcatcatgccatgatggcttccacaaagcattaaacctggtaaccagagattactggtggctccagcgttgttagatgttcatgaaatgtgaccacctctcaatcacctttgagggctaaagagtagcacatcaaaaggactccaaaatcccatacccaactcttaagagatttgtcctggtacttcagaaagaattttcatgagtgttcttaattggctggaaaagcaccagctgacgttttggaagaatctatccatgtgtctgcctccatatgcatctgggcatttcatcttcagtcccctcattagactgtagcattaggatgtgtggagagaggagaaatgatttagcacccagattcacactcctatgcctggaagggggacatctttgaagaagaggaattagggctgtggacactgtcttgaggatgtggacttccttagtgagctccacattacttgatggtaaccacttcaaaaggatcagaatccacgtaatgaaaaaggtccctctagaggatggagctgatgtgaagctgccaatggatgaaaagcctcagaaagcaactcaaaggactcaaagcaacggacaacacaagagttgtcttcagcccagtgacacctctgatgtcccctggaagctttgtgctaacctgggactgcctgacttcctttagcctggtcccttgctactaccttgaactgttttatctaacctctctttttctgtttaattctttgctactgccattgaccctgctgcaggatttgtgtcattttcctgcctggttgctgagactccattttgctgccacacacagagatgtaagaggcaggctttaattgccaaagcacagtttgagcagtagaaaacaacatggtgtatatctcaaattgcctgacatgaagaggagtctaacggtgaagtttcacttttcatcagcatcatctttcacatgttcattatcatctgctcttattcttgcatgtttaaacacttaaaatttttagtataatttttagtgtgttttgaagtggtgactaggctttcaaaaacttccattgaattacaaagcactatccagttcttattgttaaactaagtaaaaatgataagtaacatagtgtaaaatattcctttactgtgaacttcttacaatgctgtgaatgagaggctcctcagaactggagcatttgtataataattcatcctgttcatcttcaattttaacatcatatataatttcaattctatcaattgggcctttaaaaatcatataaaaggatataaaatttgaaaagagaaacctaattggctatttaatccaaaacaactttttttttccttcaatggaatcagaaagcttgtcaatcactcatgtgttttagagtaattacttttaaaatggtgcatttgtgcttctgaactattttgaagagtcacttctgtttacctcaagtatcaattcatcctccatacatttgaattcaagttgtttttttgtcaaatttacagttgtcaattgatcttcaagctgcagggtgcctagaaatgggccgttgtctgtagccctggcatgtgcacacggacatttgccaccactgcaagcaaaagtctggagaagttcaccaacgacaagaacgattagggaaaatatgctgctgtgggttaacaactcagaaagtccctgatccacatttggctgtttactaaagcttgtgattaactttttggcagtgtgtactatgctctattgctatatatgctatctataaatgtagatgttaaggataagtaattctaaatttattattctatagttttgaagtttggttaagtttcctttcactcaattgatttattttgttgttaatcaaatttatgttaattggatcctttaaattttttttggcattttccaacaaaaatggctttattcataagaaaggaaaaaaatcaatggaatttgatatctaaagaagttagaaagggagcaaaataaaaaacataaaggagatagatgaattagtaagcaaatcagtagtcgagtttttcaaactggcaaaattaattaattgacttttagcccaaatttacattgttaattaaatcaagaaggaagaagatctaagagctcccattgataggcaagcctagagagaactagctaaatttatcatgctaggatattgaaacacagaaagtttacatacatttatgaagggtcaatttagtttggacagtgaggtatttgtcttagtggaaaaaaggagaattagtctgatcaaatcgtgaagtaatacagtgaacttgcaggtgcacaaaataagagggccacatctatatggtgcagtctggaattctgtttaagtttgtaggtacctcttggacttctgaattgatccagttgtcatccaccacagacatctcacatcagatacagacagttccaagattgacaacagagaacaacctgctggaaagacctgggcagaaatggagagccctgcgggaaccatgctacattttcatctaaagagagaatgcacatctgatgagactgaaagttctttgttgttttagattgtagaatggtattgaattggtctgtggaaaattgcattgcttttatttctttgtgtaatcaagtttaagtaataggggatatataatcataagcattttagggtgggagggactattaagtaattttaagtgggtggggttatttagaatgttagaataatattatgtattagatatcgctataagtggacatgcgtacttacttgtaaccctttaccctataattgctatccttaaagatttcaaataaactcggagggaactgcagggagaccaacttatttagagcgaattggacatggataaaaaccccagtgggagaaagttcaaaggtgattagattaataatttaatagaggatgagtgacctctgataaattactgctagaatgaa

SEQ ID NO: 15761 - DNA, 1146 bp, Homo sapiens
tccgatgtttttgcttctatgaataatgctgcatcttgatatattttgtgtacatgtctgagtgttgtgggataggctcctagaagtagtgctgctcagagccctttcttgtcctccaagctctccctctcctaagctccctgcaaatccttctagcatgtaatgaaccatattttattgaaagtatgaggctgttcccttcactggaagttcctaggggacacagattgtcatttattcattgttatatcctcagcactgagcacacggtagttaaaaataaatttgaactgaacttgaaacttgaaaatcaatatccaatgttttaattttaaagtcttggcctgtcttttacagacttcttcaatgttgcaataatttttttccctagtataattggatcataacatagatctcctgatggccacagctatcaacatataggtaactcagttctttgcaacttacatttcagaagcttgtcatgacccaattacacaggcgtagtttcttacagaataaatgttttccaagtctcttgagataattctcctaattagaaatcaggggtgagaacctttatgtaatcagcattgtggtagattgaaaagaatacaggttttggagttgatgtttgaaagcatcttctctgtggtattctatagccatttacttaggctgagtttactggtttatgggagatccagttttttcctctgtaaaatgaagatagtattctatattaagatagggcactggaaaggctaatggaggtcttgaatgtgaaatgtttaatgtgggacttggtacaggtacgtacttgtgaaatattagttcccttcccaggtaccatcagagttttcaatcttgaggggagctgggctgacaacatattcactatagttttctatatcagtggggtactctggtagagtagaacaggggtcctcagaccctgggccgtggtctggtaccagtctgtggcctgttagatactgggctgcatagcaggaggtgagtggtgggtgagtgagcattactgcctgagctccttctcttgtcagatgagtggctgcatttgattcttaaaggtgcatgaaccctattgtgaactctgcatgtggagggatctaggttgcaggttcc

SEQ ID NO: 15762 - DNA, 1453 bp, Homo sapiens
tgtgatgtaagtgttcatctgaatttactctgtatttacattctatccatgatgtctgtaatagctatgactataaaagggagggccagcctcattactccttggatggctacactgcagtaggacccagaggatgtgagtatgggaatctgatcctgagtcctgctggttggagagttgccagtgtcatcataacttgtaaaaaaagtcccataagacacttgtaaaggataagtcttaaagtatgtaagaataaatcagaaaattgccttttttaaaaaaaagctttttaaaaagctttttagctggtgattgtgtctttcttttctttaggattctttaataagtaattttagtaaagtgtcattcttagttgctaaagaaaacagtcgtctcctgttttcagtcatcagattcaagcctattaggaaaaacttgaataattattcttacacgtctccattaatatgaagaatcatgcataaaatgtagtccatgcttatctctaaaataaacaaggaaataaaatttccgggttctgttagttgttagaaaacatggtaactcaacttgttattctgcaccttgggaaaaaaatgcttccttgttgattccaagtaagatcatttagaaactaaagtctaccatgtagagtataaaaatgagattgttaaggggatgctcctttattctgaaaactctctaatgagggaacaaaaatataaccctggttttaatatttatgtaactttttgcagaaataatttaaaatagggagaggtaactttcaatcccaaacatagatcaaatacttagtaatttatttgacctataatgctggttctcaaccctggctactctttacaatcacctgggagcttcttaaaattaccagtgtgatcttaaccccagagattctgatttattgttggtctgggttagggcctaggcatggttaattggattccttaggtaattctaatgtgtagtcagaattgaaaaccactgccttagaaacacacagttgaactttcttttatcttcatatggaatcagaaaagtaaagaggaagaaaaggagtgacctgtagattagctacccatctgtacttattctaaaagatcaaggtagggagcaggtgaaggcttggattttgcaccctttgtaccagaacacatgggccagtgtgcagtactggaagtaaagttcttggatgttacagtgtggtggcatttcttgtcaggagagaagggaatgatagattgttttaacttttcttcttctgcttgactttgagtaaaaagttgagcatctcctgcttttttagcattttaggaaaaaaattattgtgccaagagtatcaggtaatctgtcataaaaatatatgaatggagcagatctgtgcatcacttcaaactaaagatatataaaagcattcctttgtgcttttttg

SEQ ID NO: 15763 - DNA, 1186 bp, Homo sapiens
attctctcacagaagtgcgtctgaaaatacatagcaccaaattcaaatccggtaaacaaattccatcaaaaactgcataattaaggctatttttgtgattagcgccatttagtttccctgaatttaccagagcaaacattgctacagcaaaaattactgctaatggttgaacctaacaacaagagaaaatccccagaagggtcatttaggccccagctgcagctgtgtttcactatatttcatcctggaaagctgagattaacaggaaaatcaggctctactgtgctatgcagatgtggctacaactatctgaatttattcagcaaacatttgttcagtgcccactatatgccaagcaatgtactagccacaccgggattgcagggataaattgtacctggcactctctaggaatgttcagatgaaagaagttgatgagagaaggcagatatagaaacatcaaagcattatgagtgatgtcagctatacagtgggagcataaaggagtgaattaggagagtcttaagggcagcagcttcacaggatgttctcatgtacacggttattcatcttgaatccttggggcaggttggggccagtaaatgaggaggacagaggcatggaagttttcttgggcttgggtagaagctggtgcctaccccaaactgggaatataagtagaggaacaggtatatatagaggaaaggaaaagttttacttcagaaatgaccaatttgcttataaaagattcatgtgttgaggtcttctaggaacttacatttatgagaccaaagtttagcaaatgtggttacaagatacagatgagaaaatcgttagcattttgctattgcagtattttgacaccagcagcagcaacaatagcggtcactcgttttgagcacctaccatgtgccagaccttgtgttaaatacataggcaccatctaacttaatcttatgacagctttcttatgctaaggaactgttttgtccttactttatagatgaaaagattaaagcttagatatagacgctaattcccaatgtctcaggaccaggacttgaacacagttctacgtgacttcaaaaccaaaatcctttcattgatccccacttaaccaactccccaatataacagatactctctgttccttctgcaaaacctagactgatatctatagctctca

SEQ ID NO: 15764 - DNA, 1166 bp, Homo sapiens
caataattaacaagcaaacaaaacagaactgtttgaactctaacgcttaggagaattaatcagctaaacctttgcaaggcttaattaaggtcccttccaactctgtgattcattaaactccccttcccttttcattgctctcagtattgggtggcgtattcacaaagagaatttaaagaaatgacttatttccctcagcaacataattttatttggtaaaataatcaaatactcagaaaaaacaactcttgtttctgtattaaagatgccactgatactagtagatttttagaaacgcacttgtatatggcataggtttgtcactttggatctttaaactaacatttgtttataacattggctgcatgaggcatgcttggctgaaaaacctacttacacttttaccatttgggtacatgtcttacttgtcttttataaaatattttcaaataactcacctccacctggggtaaggacagctggatttctgaaatccccttcctttcagacaggagaatatgccacagatgaagaagaagatgaggtaggacctgtccttcctggcagcgacatggccattgaagtctttgagctgcctgagaatgaggacatgttttccccatcagaactggacacaagcaagctcagtcacaagttcaaagaggtatgccactaagctgcaaaatatttctttatgcctgtccatttcattaagtatatatttctgttcaaataatatattaagaataatcagtttgcaaatcaaagctttttaataacaggttgtcttgagtctcattgaatttcaagtagaatttaagtagatctcgttccacggtcattgatttaaacgcttatttgtcatagtgacatacctgtagcccataatttcaagcagtaacttaaatgtgcagttttatgatgtttaagttatattttttcagttttacagaagttttggtaactagtgataagcttttctctcaaggcagagacttcctaaaaagtctctttttgtctttctgttcatgaaataggtttctaataagcatcagatggcatacccaaagggtttacttgaagagagtttaatacacagactttgaacagagttaatagtactaacaaggggtggtgaagtgcacagggactggcaacagcaggag

SEQ ID NO: 15765 - DNA, 1676 bp, Homo sapiens
ttagtgcttgctattgtaaatttttgccatttttgcttatctttgggaaaaaagtgacctggatcacactggaagtttcactgtattcaagagtagaaatagaaggatgattatcttaagttatgtttacactttggtaatatttgaaaatggatgtatatactggaaatgtctgtaagtgtcttgtttttgcacctaatttatgatctattatattgcattttcttaaatatcttagaagtatttttctttataactttgtatattgaatgtttagataaatgtccaactgacaatgttataaatcaaattcttattcctaaaatcatttagtattataagtattttgattttttaagttaaattatagtaattttaggccgaagtgagttattttaacattaccacttaaaacggatgaaattgtaaaagtcatttggtttgattgccccacaaagcataagatgtaaactgattaagggtatgaaagcaaagtgaaagacctcagatcttgtgcacattttgttttcctattatttcttttattgactgtagtgcatgatacctaatcaaggctccaatgtcttgcacaattcctactttaatgctagtggttttcagtgtccttacaatttaacacagaattgttatttcatcaaccttaaaaactgcagtttttattatcagaaaatgaacaaaaagggaatatctggttgctatgaactgattccctaaaggagagctcagtatgattctaacaatagccaaaagtgttttggggtataggttatgctttgttgggagggaatgtgtggtgaggaggccaagctgcagacagaaagcattgtatgagctgtatctgggtcagggtttcccattaaaggatgttagttttataacagattactttgtttaagaccatctcccttcaagtaactcacagtttatgtaatactaatctcattctttttttacctgaatcaggaattttctgcagaatgttaagttagggaagaaacctcatttcatccattctaacactcctgatgaagtccccctttagtttcatgacaataaagctgttctgtggctatcatcctttagctgggattgacaattgatttcacaccctcaacatcacaagctttttttaacccacagcagttcatgattgcagtatgataggtactaaagccaaactcagctttcaactggcacaaaatgggactgtcaccttttgctccattgttgttggaaacaaagtggcaagagggaaaatgaggaaccagatttacctttgccactatctgtgaccctgtaatcatcactagcctgaaatcttaaaatatcccagtcccaagctacaaaaatggtcacaggtggtttgatctagcacctcggccgttagagtttgtgctgaagacaaatttgtctgggttcattgtgcaccagaattagcatgtgcttgaaaattgcattttataaaagggaaatgaaaatttgcatttatatagatactctgattcatgtttaagtgttaaaggttatgcagactaaacttcaagaggagatccagtgtttaacaatagtgttctagaggattctaaaggaagctgccccagcagccctgagagaaccatctatactttggatatgttgtagccccatcattacac

SEQ ID NO: 15766 - DNA, 1987 bp, Homo sapiens
gagaaaaaaataacaccagacaaaacacatttgagtaacttgaagtagcagcatagaataggcccaactaagaagttggaggggcaaagagaaagccgacagaatcagcttctcctggaaagtgaaagcatcaagttctatttatggtagacagagggtccttatttgcttgtccgtggtgtctatgtgggcctattgagggaatggtagttacttgaaggttcacatatgtaagcgtgtggacccagcacagtctgtgacctgattccagatcctcaagagtggagaaggaaagaaatatgatgatttcctatgcttgaccctaacccaaccccaaaactgctagggattcaacagtgagtaagatgtatgcaataagagaacagataacttctcaacaatgtgcatgccgtttgtgtagatgttcagaactacatatgtgtgaatatcactcccaccttacacacgcacacacactgcaatcacatggcattaaaaaatatattgtgtatggaacttggcgaggtcagtcaggacctggagctgtaatcatagccttattgccacttcttgcgttgtgtatacattgaatggctcatagattttaagagatttttttattgtaagtatttctactaaatgcacttatccttctatatgtttatatattttggtaaaattgatttatcagatacttggtattttagtaagaaaatttcctcaaatatttggctaatgctttgatgtcaagattgcatattgctgagttggagctcagaagaaatgtatgcagctaaaaattgcactgtgtgttcttgtgaatttgctcacaattctaaaatgacataattggtggctgtgatgcttacagtcactgcctactggctctcttatgatgaatgttgccatcatatgatcatttatttactttttgtgcaagcaatggcattttggttgttgccaaaaacaacacaagtggttgggagtgtatgttgttggaaggtgtacacttctgtttctttcagctgtattatttatacacccaggttttctgttaaggatgtaatcattcattcaagaaagaacaattggcaagaaataattaaattaccttaaaaagaattaagaggcactccagccagataacacctcccaacaacatgaaatttagttagtgcttagtgaaattccttaaatatatatgtatatgttttcttcaacattatttaatataactactgcttttatattttttaatggtgttgcaaccacttgtacacctgctacaccttactgacaaaactgggcagctgaaaataaaagagaataaattctattccactgtaagaagttgatttcttttcagctttctttgtatatcagtaaagaacacgaattgtttgaaaataattttaagtctgataagtatggatagcatgttacctaagcttttaatttgtacattttgatgtctgatcatttgcatggaagagacaatagtgccacgtctgaattgttctcttgtgcttggttaatatgtacttctctagattgttcaaaaagtttcaaatgacattccttactctttggttttcagaggcattcaagcaaaatatcacagtggtcttttgttttctgaccaatctaacaatacctgtgattaaatttaatttgttagtgtaaataaatttcttgccaatgagtattattgttgttagacaacgaatgcaataaaaagaaatactgaggtctgttgaagcaattttttttccctcttccattttcaccttcaactaaaacaagccttgactgggtaaacctgtatcaattgtcaaagcatatatctgtcaatcaagagcaaagtgcacatttttcatggaaatgaaactaagtcttaactgtggtaaagtgtaaattggcagctagaaattacatttgaaagcacaattatggaactgggcataaagttaaaagagcaaagcctgca

SEQ ID NO: 15767 - DNA, 2762 bp, Homo sapiens
gggggtggttgaatgtgtgagagaaagcacctcctgtgactgccagcagccacagaagaccatgaagaggaaacgcataacaagcttcacctctgaaaaatcggacctaataacttcgcaagtttttgatttcaacaggaaagaaaaagaaaagaaaaccgctttctccacttattctcaaccacttgaagtagtgttattgataaacaatttcttaaaaatatttaaagatttaggaatagaaacaaaggaaatgaaggctgagtgatttgggcaagggaaggtgtgagtctggtggggaggggtgtaggagcagacatcttgcacacaggagaggcatggttgcatttcccatagaggacagcaaaataggcattttattgaatcggatttttaactttctttccacggccagcagttcaaagcacagttatttttatatagtgagaatgtgaccagactgagatggtgttgtgtctctcctgcaggtatgcctgcagcatctttagtgacccctgctgatgttatcaagacgagattacaggtggctgcccgggctggccaaaccacttacagcggagtgatagactgctttagaaagatactgcgtgaagaaggaccaaaagctctgtggaagggagctggtggtatggaaataatgtgttcttaactaactctttggtatcaggtaaatttttaaaatatctaattatatctgtgatttctccatttttttaaagctcgtgtatttcgatcctcaccccagtttggtgtaactttgctgacttacgaattgctacagcgatggttctacattgattttggaggagtgtaagtatcatgctaaatctgctgctaaattttggctgctgctaatgctctgttgtcgtagggaaaggtacctcagtctagtctctataataaaatagaagagatttagggaaatgttgaaattgtgttaacaaggtcatttccaaggggaacatacaactgatgagaatgtatcaactcctttacattaaatatttgaacaggttttgaatgttatttttatcaagttaaaacaaacaaaaaatacagcttcttactctgttttctcttcttttagaaaacccatgggatcagagccagttcctaaatccaggatcaacctgcctgccccgaatcctgatcacgttgggggctacaaactggcagttgctacatttgcagggattgaaaacaaatttggactttacctacctctcttcaagccatcagtatctacctcaaaggctattggtggaggcccataggaagatcagccctgggatagtgctgtctttttgtgggtactgcagtaaagaacatccctcctgggaatgaagcaatgcttcatcccttttacgtccatctcttgtttaaattcaagtccaggcttttttatcatgtgaaatcattcattttctgggtgttttcttaaccagatcattgtgaaattattcataattattatttggccctctgcccagaaacctttgtttgcatctgaaaattgatgggatttggtcaacactaacatgatttggggaaaggagcaagtcagaatagaaattagtactcccctccttgaactaggattgtagtcccaaagaggctactgtaaggcaatcatggtgctcagagcagtgtttcgtgtgtgttttaaactggtaggaaactaggtgcatatttataaaaataaaaaacactgggagaaatgaaaaaatatatatcaaatatattcagcctggcttcaaattgtaagcatgcacaaattctgtctctggattatattatgaagcttttatgtgaaacatgtttctttgtaatgaaaaccacattggagatgtttagtaatcatattgttactggtaccaagactactagggaaatgcctttgtactttagggaagtacttttggcattttactgtacagacagaaaaaactgagatgtagcccctctcctggaagtgctaattttgaaaaactgctcatatgatgtacatgtactgattactgcctattttaataaacactcttgaaaaatgcatgttgccctgttgctgcctgccctattctcctcatctccccatcattggtacccacttgcttttaaaatccactttatcttgaataatgtaagacaaatatgttctgacataagtatttaattcatgttgccttgcataatggtcagaggcgcatgaatttgtgaaggtggaaataaactatttgtaaagtgattgagttgtttggtcttgtgcatgttgcatggtgagtggatacagtaattgtcattattggcctacatgttttgttttgaggggaattttattcatattggcatggatatatcctcagtatctttcaaggtaatgtgttccctcattttcatggttcaaagtgagtacaagaaactgtatttaaccatagataagcaaagaactagcaaactgacaccttagttctagtcattccagcactttcggcagtttattgtgatgatgaaggtcacatagttttagtagaacttagccatgaaaactggtatgaaatggcagtcgtattttctaatccagtctgactcttgcacacaccaaaaccatataccactgtatctaacatttgctattatttggctagcactataatgatttggggaaagaagctagtcttgaacaggatttaaggctattcttagaccgtgatcatgcttccaaagaggctactaattaatct

SEQ ID NO: 15768 - DNA, 1171 bp, Homo sapiens
ataataactttcatctaagtttacgtgttcgctggcagtttttgaatcgttgccagaatcatgaaattcatcattcaagagcctttgtcctcctagtccccgttctgttctgtgtctcctcatttggatacgttctgtgtctcctcatttggatacgttctgtgtctcctcatttggatacgaatgcttttcattttattactgcctttgtgcccttggctttgagtcctgtggtggcagttgtttgtgcttcaaggagcatttgtaatttcagtgtgaggacttggggaggtcaacagaaatctctggtctttgccctccttcagcctccacattaaggacatagggcttcttcctaggcagtaactgtattttgattcatacttgtaatccctaaccgttttgattgatgggacaagggctgaaactacattctcttgaggatagaatatttttatccttgagaataatcattcatctcttcctgacccaccttaccatttctttgctttgatcctaaatcttttttgttctttttaggctggaggctcccaggtgattttcacaaatcctttagaaatcgtcaagatccgtttgcaagtggcaggagaaatcaccactggtcctcgagtcagtgctctgtctgtcgtgcgggacctggggttttttgggatctacaaggtaacttttttttttttttagtcatttatttgattactttctcatctcctaatgcagaaactattcttcaacatgaaatccatttttttttgcatttctacacctggagaagatgttctacccaagctgcagaggcaccttcatgccaattagaaggaggtgccccttcctgccatctgccaaaaaactatcctcatcaatacacaaatctaggatgactatgataggaatcgtgccctctagagttgttcagtgcagctctttgcagcaacactggctagaattttatttggatttgttattgatacgctgagttcagttcaaggagaaacctgtatcataatttattttctgatcctatgcatatggtccgatccatgttttctctatatatgtatgccttgtcttaattattataaatcttaatcatttttcatttagaaaatgttttttcagaatgattacaaaaccaaacttctagatgattctt

SEQ ID NO: 15769 - DNA, 1837 bp, Homo sapiens
tttttgagatagagtcttgctctgttgccgaggctgaagtgcagtggcgtgatctcagctcactgcaacctctgccccctgggctcaagtgattctccctcctcagcctgagtagctgagactacaggcacatgccaccatgctggtctaatttttgtgttatattatagagatgggctttcaccatgttatccaggctggtcttgaactcctgtgctcaggtaatccgcccgcctcagcctcccaaagtgctgggattacaggcgtgagccaccgtgcctggcctcagtgatgtttttaactgtgcattttttttaatgagaatttgaaaataggcttataacatcatttttgtcaaaggatggttttgattatattgaaatttggttttaaacattaatagcactaaaatctttttattaataagaacttatgaaatccattcctacttttttccttgacattttagttgtatcatggatttagaacccaatgagtaatgtttaaagttaatgtatggtcatttttgttttatcttcttttctgtcacctgttttcctgctctctgattcctgtgcatgcaaagcagaaggcctcaggtgattcagctcgaccagttcttctacaagttgcagagtcggcctacaggtttggtctgggttctgttgctggaggttagtcatggatgagagaaaaattttcacttttgttattcctattctcttttctctgattttccatcttgaaatgttaaaggacaaagtcttctctagtctttcccaatgccagttatcagtttctacctgtgaggtagggcaagagtaaagggaactcttttcccatacctgcatgtgatcagggacttacaagtggcattttcctctatctacagatcaggccttccaaagacaggttactaatgaggttgggctgtagcaatgtgccttaatttaaaatatctatgacatccttttattaggggatacttgaatgaaaaccctcaattgtttattaaagatataagaaaggtagtactgttttaaaatctgtatttaaaattcaaaacacatttcttttctcagtcttgtccttgactttaactaccttcttctttcttctgacctatcttactttcttctgagataatgatattgtttaattttagctgttggagccactgctgtgtatcctatcgatcttgtaaaaactcgaatgcagaaccaacgatcaactggctcttttgtgggagaactcatgtataaaaacagctttgactgttttaagaaagtgctacgctatgaaggcttctttggactgtatagaggttagtgccacatgctcaatacctgttaggtgaaataacactcaaaggtttggtttctcatcttagtgcctgacatgaattagcaagactgcgttaaaatggaaatacagcagattttcaattatccatgctaatgggagtaggctggaggcatctagggcttggctaatcaaaacagcccataatctgaaaattatttatagtgctctgttgtatgttttatttcttaaaataataaattatttttataagcatcttccgtgaatttttgaaaggctcacattgtttgcatccttgaagtactctattctccagctaacagggaaaggtattctgccaccaggacaaagcctactcaggattcatgattttcctggaatacaccacaaaaaagataacgaagggttcagtagagctctcttttgctgcttcatcctgaattaaagttgccccttttcttcatctgactctcaacccaatggagttgattcacacacccctctagccaaggtt

SEQ ID NO: 15770 - DNA, 1211 bp, Homo sapiens
tctgtacctaaatgattatttattactggttataagtaacttgacaagtcttgatattaatgttacattgactacttttcatagtatgtttgcattgatacaatacagtttttcatgcataagcacacacatgtgtgcatatgtacttatagtttttgcatgtttaagcctttaagatttgctcattagatgaaataaaccaacttataaaacatttccaattgaaatttgaactctaaattactactagtcctgttataatcctacacatgtatttatttagttttctaggagttgtgtatggagagtacaagttctggtcatgattagttgcagttgcttctaaaaatcatttatagcttttttttaatgcaaaagaaaaatacttatagtcatttcttcttgtacatgcatttttgattactttcaaactagttttagatgtatgtacttctgaatcatctataaatcttttgtatatttttcttctctcttgttttcaatttatttgaggctgctggaggtaccacatcccatcaagttagtttctcctattttaatggatttaattcgctccttaacaacatggaactcattagaaagatctatagcactctggctggcaccaggaaagatgttgaagtgactaagggtgagtgagaatatatctgaattctagcctgcaagtattgtggtgtattattattagggtgaagaaggcaactagtactttattatttttctatcccattgacacatattaactatatgataacgtgtgtttttcatcctttgatcagacaaacaaaagcaaacaaaacaatcttcaccaagttttaaacaaactgggcccagcttggtgactcacacctgaaatcccagcagtttgggaggccgaggtgggtggatcacctgagatcaggagttcgagaccagcctggccaagagggtgaaaccctgtctctactaaaaatacaaacattagtcgggtgtggtggtgggcacctgtaatcccagctacttgggaggctgaggcagaagaatcgcttgaacctgggaggcgaaggttgcagtgagccgagatcacgccactgcactccagcctgggcaacaagagcaaaatgccatctcaaaaataaataaataaataaataaataaactgaagacaccctttgaataaggaaaacatgtaaagtttcttaaatatttt

SEQ ID NO: 15771 - DNA, 1200 bp, Homo sapiens
gggaagagaataggggtacacacgacagccctcccgtaataaagacttaccctgtccaaaatgccaataatggcaaggctgagaaaccctgtgttggagaaatagcagagaagaaccaccactcttttctatctattgttacatcatgtgtttgggtaccaggttgcagttaagaatttttctcttttctttggagagaagttaaagtccctggcagtgtttttcctcagatcatctgcatcacctaagctggggttggccagatctttgaacctacaacacttcattccggttttcattttctttgtgttcatggactctagagagcacggaagtaattgggtttcattgggtagcagagtaaggtagagtgcactttctcaagacatgttcattggtctgagcaaagttctgtctcttggaaggagacagtagcttggtggtgctattaggcagatgagggcttgttagatcaagatgtaaactctctttcttcagtctgattttaaaatgaactgtcatttgtagtaattattaaatgagaagcataaattaagtattttactttctttatttgtaggaaatacaactggagcacgcaaagcaagcctttgtgcaacgggacaatgctaggactgggagagtcacagccatcgacttccgagacatcatggtcaccatccgcccccatgtcttgactccttttgtagaagaatgtctagtagctgtaagttgtaacttgccctaatgaagtggtttaactcagtaaataaggaattataaaaacaattcttataagttatgtagtgttttttttctgttgcaaacactaacattttaatgtgatcacatacattactaaactcaaacaaagagtgtgttttggctagttttagtgggtaggttaatttgttgtctgggtaatacggaatatcttcgagaaatacattagctttttaaagataaaaggaaaaacagatttgtgatctcatgttaattttgttttagattttgaagtatatcaagggctgatttttgctaatcttcttagatgctctaaggcaaaaaaaaaaaaaaaatagtgcacatgtatatcatttgttagagtagttagcacaacagaaactccaaaccttagattccctttcaccgtgtatgtgtcgaggccacagagttacatgtgacagcagagccctgcag

SEQ ID NO: 15772 - DNA, 1197 bp, Homo sapiens
cactagtctgtttctagaccagtgctgtctgcctcactagactagaagtcccttggggtcatgtttcatgtatcatttatctgtattccccttgtactagccctaggtcaattcacaggtggtcagtaaataccagtagtgaatcaatatctgtgaaccgttttttgcatggtgtataaggatactaatgcataacaaagttgctctattttgctgttaggcagtcacatcttagtctaaagtatctgcacttttattatagaacccaaaaacatgcctgaaggaagactgaaacatatatgatgctggataaaacagttatatttgaaattataatgtatttagtgtgtaacttcatggtcaatgctgtcatgtcttttagattctgtgcattattatttcagtccactatatgtaaaagtaaatgctaaatgtttataaatgttttcagtttgaattttatgttttggcagtgatatcttattttttccctcagtgtatgtttgtatatgcttctgttttccacaagctactgacttttgctttatgtttgttttatgttgcagattaatatcttttcaagaatttgttgcctttgaatctgtcctgtgtgcccctgatgctttgtttatggtagcctttcagctgtttgacaaagctggcaaaggagaagtaacttttggtaagaagcatgcttctgtgcacgtctgtgtaagtgtggacttgtgtgagcattttcttttttttttttctaggaacaaaataaagtgtatggaaattctttatagaagatagtatatcccttttagtaaagatacttcaatgttttggagctccagttcaaacatcttcctattcgaaaaaaacaagtttctggcttagtagttttgatactctgatttagttttaaggtgagggagatgtggcatgactgttttcatagagtcatagcatgtgagagccagacaggacttctgtttcttccctgcatcatcagtagtgctttccactgatagaacgaagaagtgaataatctgcctacacacagaagttacttatgcaccctatacttcttgtcttcacgttgttcccatggagtagtttgcggccagagctgctgcacaagatggtggttcagaatggtacatgaaggaccttgttctaaacaacccccgctcccccgacctgactgctgtg

SEQ ID NO: 15773 - DNA, 1146 bp, Homo sapiens
tctagaaaactaaaaactacaatattcttctttatgcatatttatgtttattcttcctttaaaaatataaattttgtatcagttgtattaggcagatactagtggtggcttacagtttggtctacttttaaatatttgtatataagttatccttacgttttgcagttttgaatttcacactggtatcttcctgccattcaacttgctttagggttgttggtgttgtgttttgaaagattgtgaagtcgaccttctaaaaatgagttcaaagaaaaatcagtaaagtaaatatcctcctgaaattgtaagtttcttggcaagtagaattttttgtattaacttctgttttaggttatctgcaaactcaagaattgagagaactagacagcataagctcagatttaaggaagataccatttttcatagatatggttttagctgtttttgaattgtgagtgttcagtagcaagcttttcaaagtttttgtaattgtggaaataatgtatgagaaatatttagacagcatctgtttctatttttagactgggctggcttagatgaagatgaagatgcacatgtctgggaggataattgggatgatgacaatgtagaggatgacttctctaatcagttacggtaagttttaagccagatttttattgtagttcagtattaattataagcatggaatatgtaatttacatagatgattaacctcttaaaagctacttaatctttgaaataggtttttgaactgtgtaaagtaagacatattgtcttcatctcctgtgattctaaacatgaacactttgtgtaattgcatacaacttttattctttctggtctttttacaaaggtagtaaaatagaagcatatttgctatttcttatccttaggaatttaattctgtcaatgttaattttctaccaatatcaaataactcagcagaaattagaatcatagagtgctgggacctaatagattggtgattctcaaactggaatggagattggggttgtgagaatgtactgtgtcatattcatgtataaatctacctgatttcatttatttattgaggtaaaattcatgtaacataaaattaagcatttgaaagtgtacagttcagtggcttctagtacatcctca

SEQ ID NO: 15774 - DNA, 1346 bp, Homo sapiens
tcattttgtatttagtttgaatgatacatgtatttagtttgaatgatacatgtatttagtttgaatgatacatacatcagatatctctctgataggatgtccctatcagagagattcagagtctctgtaaacaattatctcttttgtaagaattacgtaagaattaagtagcatgaaggattataaagtagcatctagaatcgagagagagaggagacttactactaatcatcactgattttcatttatcagatttttgggcacctgctgggtgccagatcttgttaggcacaaatgactaaaacagagccaccaagtattaaaaatatgcatatgagtgttctttaaaaggcactgcagctatccatattatgaatactttagcattttctaagtgatgggtgattcaaagggtctcatacaagttacagtcacgtcttaacattttctgtttcgtgaaatgagactaaacacaagtatttcctgccattttaagccattttgctcttatatgcttattcttacaggttgatgatgcaatgatggcaaatgcagcccagaaatttcccttcaatactcctaaaaccaaagaaggatattactaccgtcaagtctttgaacgccattacccaggccgggctgactggctgagccattactggatgcccaagtggatcaatgccactgacccttctgcccgcacgctgacccactacaagtcagctgtcaaagcttaggtggtctttatgctgtaatgtgaaagcaaatatttcttcgtgttggatggggactgtgggtagataggggaacaatgagagtcaactcaggctaacttgggtgtgaaaaaaataaaagtcctaaatctaaaccattgctgtagtcatttatgttcatgcagtctcttcataagaggtaactagaactgttttgctgtatcacagtaaagtggagggtaagctaggaaaagggaaaatgatcagatgtctgcaagaactcacagccctctcctggcagagctgctttagatgacatttgcatcttgtgcccgtgtggcttccttccagtccttgcctcatcttagggacgtcatcaaaggactacactatttttgttctgcctacattcctaacagctgcctaggcagactcagacttgaatcttctataggagttcatcacagctctattttgcaagatagtagttcatttttttctcttttatgttgagccaaagccacttctggagacttgtcctagagcaggggtcaggctttttttgaatttttaatttgtttttaataaagagccagatagtaaatattttaggctttgtggacctcttttgga

SEQ ID NO: 15775 - DNA, 1093 bp, Homo sapiens
aaacaaggttgagaagaaacactggtttagagagatgtggtgcaggaccaaggaggcaagtttaataacttatatagtctccccagctttatgtgaaatctggtaaatggggagtggcagggggaaaatacccatcaaaattaacactaaaccaccaaaacggttattcttatttttgtgtcataataccactatgaaaggcatgatttttaggtatttgagtcattgttcagcttagcaaagttttgaggtggacattcttggtctaaaaacattagaattttaaaacctgtttagaaaatgacaaaatggttccgggttattttattttacagtagtacttttggattaagtacatataaatggcttataaatacaaggtcattattgtggaaactactttatattaatatgaagtccagtatagtagtaaagctttcaattatttccaaaaatcaaatcaaaggcatttttggtggaaggttatgttgacattaaagttaatttctctctctcatttaaggtatgtatttaatttccaagtatattcggaagaacacagatagcgtggtgatcttctctggagaaggatcagatgaacttacgcagggttacatatattttcacaaggtaaccactctgaagtggagggatattcatgctatattaagaaaagtatgaattgtttgactattttctatcatctttcagtatgacagtgatatttttgagtatcttgtgaggttacaaaagggaatctgatagtgtttgctttctatctcttggggaagaaagaaattttaatgtgtcagataatttttattctttaaaactagttacagctgggtatgagggctcatgctcatacccccagctgctgaggaggctgaggtgggaggatcacctgaacccaggagattgaggctgcagtgagctgtgattgcaccactgcactcctgcctggttgacagagtaagaccccgtctcttaaaaaaaaaaaaaaaaaagttaaaaataaataaataaaactacttaagcttgagaatcccctttctgccatttcttagcatcctgtggaattatgactgttgcc

SEQ ID NO: 15776 - DNA, 1131 bp, Homo sapiens
aaagtaggtaaaagtggatcattgtacttgttaaaggtctgggaaccatggctgtgttctgaaaatacctcagtgatgacaaataaatgactcccagcctatcataacattaggactccagttcatccctttgcttcataagtgtgtcttttccttttgtgtatttgctttagtatagaaaataggttttcttgattagaaatctaagaagaagaaattgaacactggagatttttctatttctttgaattacgaaaagttagtgtaatttggcagtatatccctgtgccattattgtctctcaggtaagtagatggtagggcttaggaaaatagaaaattttttttcctattttgcttatttaatgggtatgtgtttgtattaaaaagggaaaataggaatgtagatgatgttaactaatcgtgaaagttattgggaagggttacctaatttgaataaaggtatcattgtgaatttctaggtcttgttacattgaagcactccgcgactccctttttaaaagtggagccttttcttcctggacactatgaagttttggatttaaagccaaatggcaaagttgcatccgtggaaatggttaaatatcatcactgtcgggatgtacccctgcacgccctctatgacaatgtggagaaactctttccaggtagcagacacccacccacctattccccatccttctccaagggaaaaaaattttaagttgtattctcccatcatttgaatgattttagtttcaagacctacttcctattttgtttggagggaacacattaagatttggcacactccaccattgagtaaataccatcatgatagatgttgatgattgtgtatttcatttcaataactaatccagcccaagattttctggagctgtttgatttactgctgtgtttataggttttgagatagaaactgtgaagaacaacctcaggatcctttttaataatgctgtaaagaaacgtttgatgacagacagaaggattggctgccttttatcaggtgaagtcaattaaaaaaacctaattatatttcatgtgtgtttaattgaaatgatttgtagccatccctttggtttttactataaaatatttactgtatgattta

SEQ ID NO: 15777 - DNA, 1145 bp, Homo sapiens
atgcccaagatatctcacatatatgcaaatattccaaagtccaaaacacaaaacacttctggttccaaacatttcagataagggatactcaatctgtatatatataaatatatgtatgtattacatatatggtatgtatataatatacatttccatccctccacaggttactgttctggcacattcccattatgttctgtttatcagactgcaactaaaattttcatgggttcggctttatgttgaacagaatttgcagaatatgagttgaagcgaaccatagtttaataatgctgtgattctcctaaatcaccaaagtgcatgaaaggattatagagctcagaaatactgaagcatctttgcaataaaaaattattagtgaatgtacaaggagtctaacattttggttttgctttcgcttcctaagatgcaacagcattttgaatttgaataccagaccaaagtggatggtgagataatccttcatctttatgacaaaggaggaattgagcaaacaatttgtatgttggatggtgtgtttgcatttgttttactggatactgccaataagaaagtgttcctgggtagagatacatatggagtcagacctttgtttaaagcaatgacagaagatggatttttggctgtatgttcagaagctaaaggtaataataaatttttctatagattttcattattgtcttggttgtacgttttcttttaaattatatttgaaaatctcttagagagcaatccagaattttacaagtgactaagttatgagtctttacctttttttaaaaaaacagaggagttgtactctccttttcagcacttaaattctgtaatccttgaaggatgattctttagtgcagtcgtttattttttgctgtgctaatatgctctacatctagcttgatcttaagtgcagttttaagttttcctgtgtcatactataatcgtagggttgactctgcaattattgcattgtggtactttgcgcagttatagcacagcaagtgttaggatttctaaaacagctttattgataattcacataccatgtaattcacccacttgaagtatacagttcagtggtttttagtatattcacagatgttggtaaacaacactccaatcagttt

SEQ ID NO: 15778 - DNA, 1249 bp, Homo sapiens
taatatagtgaaatgcttgaaagagctgcgtatcttttacacttacagcagtatgattttctgttgtacccattatatggtacctgcagctagttcagataaagagggcatttaactgtcaagggaacctgagaggagactctagtaatctggaaagtctgttggatctttgagggattttgggatggtgagagtggggctaggatctctggctaggttggagccagcctgcatttgtatctgtatcttggaagcaaacttagaatgcagagacagatgtggcatggacgctgtcagctctagccaaccactaaatcctaaggtgggagagatgcaggctttggctaggtgctaagctgctgtagccggttgaatgtagaggtcactatcttttccgaatacctgtaagtaaattaaatcattctctactcccatgtgcctgccaacctaatgggaaatcgctatagaaaagatggtttaaattttagtctttgaagtggtttatgcacgtttccggaatcaagatttaatgcagagttggattggatattgaatatttttgatttgtctgcttttctctccatagaaagcttatagcttcattgcaccatgtgtggcatttgggcgctgtttggcagtgatgattgcctttctgttcagtgtctgagtgctatgaagattgcacacagaggtccagatgcattccgttttgagaatgtcaatggatacaccaactgctgctttggatttcaccggttggcggtagttgacccgctgtttggaatgcagccaattcgagtgaagaaatatccgtatttgtggctctgttacaatggtgaaatctacaaccataagaaggtgaggagaaagaaaccagatgtctggatgcgattaaacttcagagtttgttggttacgatgatgttacatattctgtatcatgctttttcctttgcaaagcactctatgttcgttatctcatttgctctaagtatgtaaatagggaactgatgaataaaaaggtgagtgaaatgacttggtcacaaaaaaagtgataaaaatggggattacagttcagtttcattgactcttagaattttttctccttctccccagcttttcattttgaaaaaattcctaacatacagtaaagaacagaacaacaagcacctagattaaatagtcattaatgttttgccatagttgcttgatttttctttctacacacacacacacacacacacacatgt

SEQ ID NO: 15779 - DNA, 1835 bp, Homo sapiens
ctatccttctgcctcagcctcctgagttgctgggactaccatggtgtgccaccaatttttatagagatgtgatctcgctgtgtttcccaggctggtcttgaactcctggtttcaagtgatcctcttgccttggcttcccaaagtgttgggattacaggcgtgagccaccgctcctggccccgatttattaatagatcttataaggacattttaggcctcacgcatcagtttcttaggacaagcttttctctgcactgcataataaatcagacggcagtgcaacaaaaaaacggtgatgatttcccgaagaacaaaccaagttcagaagcctccctaattgtcagaacagcaggtagcctgggcggagctctgaggctatccttaaacaggcgcactgagacgcaaggcgctggaaacaaaagagctcctccttgcgcccttccgccgccccacttagtcctgctccgccccggacaccccgcggccccgcccctgtgcgcgctggttggtcctcgcaggcatgatgaaacttcccgcacgcgttacaggagccaggtcggtataagcgccagcggcctcgccgcccgtcaagctgtccacatccctggcctcagcccgccacatcaccctgacctgcttacgcccaggtgagccgggtcctgcgccccgtgccctgcgccccgcgccagcatcctcctcgcgtgccctggggctgctccggaaggaaggggtggaggatgcggtcttcagcctggcacccggcagacgcggttcgcgggcgcctgctgatgctgcggctcctgcggtagggagggcggggcggacgcctagcgattgttacgcacctgacagctagcggaaggacctttctgtcctggttccctgaagcatcgagagggaaccgcggccggcaggccggaccgctccggagaggaggcagcggcagtttgagcccctgtaaatgttatatgtgtacttttttttactatgtggcgtcgaagcctgtggacattttcgcggtccgggtccctgcggcggacgggtcggatcgtgctcgtggccagggcgcagtcaggtgtcgcgtggtcctgatctaggaagagactgcggccttatcaccgtctcggtgtctgctttcaccttcaactgcccccctcctcacctggaccgctcaccctcctcctcccctctcaccccgccatccccaccagtccccacctgtctctgtagactgcaagactcatcaagtgacttgctgagcaaaccctgccgagaagaggtctgtttagggacacaggcgaccaagtacagaaaaaggcaaaagaactagcatgcctttttcaatggctgtcattttgcagggctggcttcagatgattgttatagctttaaataaaaaggacagttttcatctcggcccgtggcctacattatttctttactgtccattgccctgggcgcttgactaataatttaacagcagtttttttttttaaattttaaatcatgattcatagcattgctgtaagagtaattagaggtaaagtagggcttgaacctgtctgtagttggttacttactgagatcttaatataaaagtaaagggagagggtgaagttgtaagtagcactaagtggaatagaaattaaatgcactgaaactgccatgtccagttcggtaggcgctagccacctgtaactgttgagcacttgaagtgctggctagtcctaactgagatgtattgtgttaaatacactggattttgtcgttggagtaggaagaacagtgtaaaatatctgctcgataatattttatattgattacatatatgttaa

SEQ ID NO: 15780 - DNA, 1368 bp, Homo sapiens
aagaaacgccccgtcgggtacccccagactcactcccaacacagggagaaacccagcccacgtgtttagatgttattgtcccggaggactgtctccaccaggacatcagtccagacgctgtgactgtcccggttgaaattctctcaactgatgccagaacccacagcctggataacaggtcccaggactctcctggcgagagtgaggagaccctgcgactcaccgaaagtgactctgttcttgctgatgacatccttgccagcagggtgagtgtagggagtagtctcccggaactgggacaggaattgcacaataaaccattttcggaagaccatcacagtcatcgccggctagagaaaaacttagaggctgtggagactttaaatcagctcaattctaaagacgcagcaaaagaagcaggcttggtgtctgccctctcctcggactcaaccagtcaggacagcctcctggaggacagcttgtcagcacccttcccagcctctgagccgtccctggaaaccccggactctctggagtcagtggatgtccacgaagcgctactggactctttaggatctcacactccccagaaactagtgccccccgataagccggcagacagtggctacgaaacagagaacttggagtctcccgagtggaccttgcatcccgctcccgagggcaccgcagactcagaaccagccaccacgggcgatggcggccacagcggtctgcctcccaacccggtcattgtcatctcagatgccggcgatggtcacagaggcacagaagtgacccctgagacgttcacagctggctcccagggttcataccgagactctgcgtacttctcagacaatgactctgagcccgagaaaaggtctgaggaggtcccgggaacctccccatccgccttggtgttggtacaggagcagcccctacccgagccagtcctccccgagcaaagtcctgctgcccaggatagctgcctggaagccagaaagagccagccagatgaaagttgtctgtctgctttgcacaactccagtgacctggaattaagagccacgccggagccagcacagactggtgttccccagcaggtgcatcccacggaagacgaggccagcagtccctggagtgtgctgaatgcagaacttagcagcggcgatgacttcgagacacaggacgatcgcccctgcaccctcgcttccacggggaccaacacgaacgaactccttgcctacaccaattctgcgctggacaagtccctgtccagccactccgagggcccgaagttgaaggagccggacatcgaagggaagtacctggggaaactcggggtgtcagggatgctcgacctctcag

SEQ ID NO: 15781 - DNA, 4169 bp, Homo sapiens
cccgtgcacccgcggccgcggcctcccaggcagtgctcatgcgctggccgtcgggggaggcaggggcacagcctccatgtgcgcgcgcgtgtggagctgtgtgcaccgcatgtgtgctttccacaggggcgtctctgcgtccacgcctgcacatcccggcgcacgtgtgggcaccacagaggacacgtgaggggaatggtcaccagtgagccatatttattatttctagagaaatcacgaactgctttctgtaattgcactgtggataaatgttccgagagtctccattgttgtacaggatcttcagttattcgaggggaatgaggcaggtcaagccgatgctagccactagtttgattttttttctgttttatagtttgcgctgcatggtacttgtgaagcttaaatattttgagtgttctactgtgtctaggattgttgggattgtacatatggtactctttcataaatgataaatgattctgaatgttagtgttttatgttcatataggaaatattttcattgagtccaaaataccactgttttgttgatggacttgaatgcatttttgtctcttcttgatgaagcggctttgccgcagcaaatgaggcttctctctgaggagctgagaggtcttgcagcctctccttgtcattctcccaccccacatcccattttttaaagcccttttggtaaaaaccaacaggttgtggccgcagacctcagatggacccggcccatccctggggacgtgctggcgtggcaggtccagagagctgcaccctgcacggggcaccgcaccgcttccctccgcgcagctcttctgcctggttttcggaggccaggctgctgggaagcttccgtgttcctgtcagtccttccttcaagaagccggggaactcaggcagactcatctccgcagagcataccagccgtgggggaccgttcgacttgatgatgtgtgcacacttcaggtggtggggacttgagctttaaaaaaacctccacagccgaatcttctcctccgagccactccacgtcacgtccagctgggcctggccagtctgtggttatccatgtgggatgagataacaccacatcctgcagctgtgaagggggatggacaagggacgacggccgacggcagagcatcagcagccgacacatagttcgggtcggggccttgggtggtcctgcatggcccgggactcatctcacggaccctccgttctgcattaagccccaggttctcttctggctttgaaagggcccgagtgctcccagtgtagcttcgtcacatcgtcacgagcccctgtggtcatgggcgacctcacacctccctccctgagttctgctctgacataaggaagtcctcggtggctggtgcagcgcggctgtgctgtgctggggaggcagccgttccttcgggggtccttgggcctgcagtcccctcatactcacccttcacccaacatattttccggtgctgatatgtttccagactccagcgcaacctggggtgctctccagacccgtgcaggggccgcctggggtacacggaaggaagttgagtcctagtgcaaaatgcaggcggacgttgccagagagtgcgcagcaaatgaccttcattgccagttccaccctactcctctcattttttatactaagcaataactttccaaagcaagaagttcaggatggagagagtcccctcctgtgtaggcatggggtggatgcggtgcccacctgggctatgtggggagcaccactgtctcgggatgcgcgaattttttttttttttttaattaacagggcattagaagatgattttgccaaaattgtcatgactctgaattcttgctgtggggacttcctgagttttctcagtttttacatctaagattagtcttggctgaagagaaatgagacgtgattatactactttttcaattgcaggtttaaggagttcagatttaatgaccaaagtcatacagatcatggaatctgtcgtcgtcttatacagtgtcagcctcgagtacatttattaaccttttggggctgtcagttttccactaggattaagattttggccgggcgcggtggctcacgcctgcaatcccaacacattggggggtcgaggcggacggatcactttgagcccaggagttcaagaccagcctgggcaacatggcgaaacctcgtctctactaaaaatacaaaatatatatatatatatatatactagctggggcacatagtggtgtgcacctgtagtcccagctgcttgggaggctgaggtgggaggatggctagagcccaggagatgggtgttgcagtgagctgagaccatgccactgtactctagcctgggtaacagccagaccctgtctcaaaaaaaaaaacaatttttttcataacataattcccatttttatttattttgagtcactcataattaattgccaaaaaagcattttatacattgagttggggggtagtggatcttagtgtggtgttgcatggaggggcgagattttatatttataatcaacacgtgggttaacatgtttttttgaaatccaagcaatacacaggaaatttaagtagaataaaaattgcagcccatttttgaaatgtcagcatgtgctgtgttcagttcaggtttttgttgtttgttttgttattttttaactaataagttggttatcagtggtgggttttcaaaatgtacttgttctaataagttgtacaatgaactaaatcagtggcattctctagataatgtgggggaaggttagaatattttctggccttctatggggtagcaacccagaatcaatctgaattagtcctgttttggtggagtttgtacattttaaatcctataacaaaaataatctagttttcatttccttactagctagatgcgaatttgtctttttgaatgaccctgtcaataagccagaaagggcaacccagaaaaagtgctccccacatccttctgagacttggcctgtgtgtgtggacgagaagccattcaccgtaagggtgcagaaagctcgaccaagccgaattgcaaacaacgttcgttctatttttaaatgtacaggttcgatcgtttctatagaaatgggtttatctaagaaaagtcttggtttgtcttgctgctgtaaaaggcctttccaaacccctccttttattcctgtttcccgaaataaggtatttgtagagttaaggacctactgcatgcctgtccccagggccccggtggaaggaaggcagcgcctgctcttccttaactcagcccatcatctgaaaattcagaagtgaaccaagggttagacgccagaggttgggcttctgttagagtggcttcaaaacatgagccttatgggaagtagccttaaaaaaagaatgggtatacgcagtgacttccgatggaaatctccaaaacaatattcctaagtagcaatggggttggctcaagtctttattaacaaagaacattctctttcatctataaagaaattcttaaagatgcattgacagtgttgaattaccaacagcctgtgaagatcagtttgaccggtgtggacacgtgctggttaagcactcaggcctacgtgggccgagcgggatcttgatcatggggctggtgtatggatccaccgtcggattccgtctgcagaggaggacgtagggggccgtcacacccaccaggcctccctgctgtgctttaacacaggcagaagaggttcatggcaatataatagtcaatgaactttcagtttaaattgtgtacatttttaaattgtaagatttttactgtatattgatgcatagtgtgattcaataaattgcttgtaatttaaaaactatttaatattcaaaataaatatagttatatatttataaactctgttggccgcgtttcttctgtgttttgtccaccgtgcaagggccacctgggtgggtggcctggccctgccctgctgtgagcgcccgcagcctgtgttccaggcccctgccctggtccctctggagcttgtgtgacagacctaaactccccgcactcctgaggacataaagctttgtataaccactggaaaaccaaacctgtttagtgttcctgccaccttgaagcatgtctataaaccatgcctttgca

SEQ ID NO: 15782 - DNA, 1138 bp, Homo sapiens
gcgctctgcccgtggtgccttggatgctggagagtggctctggctccccgaggctttgcctctgcagctgcattgggcatgggatgggcccctgtgccctgtggcagccagagggcgagcagggggctgggtgctctgctgctggcgtgggtggggtgtgtggtccctgggccactcctctctgcgaggagagtggagacggttccctgaacacacaacacacacgtctggccgctgcctggcgtcttggcccgggagacaggataccactcacatgaccacacttcctcctgccccaggtccagcccgccgggctctgtccccctccctgcctggtggcatggcaggaatttgcccaagtcacacatctgttagtccttctgagtgaggcttggccagagaagcccgtgtcccttgtggctctgctgccctggccaggccttcgctgaagctgcctgactccatcttccctttctagccgtttatgaggaagcatttccgcagcctggcggcggatatgtccctgctcctcccaccctcctgcttcacccctgccctgccctgccctgccctgccttgccctgcccaaggcctgggcctccctgaagccaggttctcccttgcccagggaggccagtcattctttgctgggggtgtggttgtacctaggtgcaggatgaggtagctgcgctgggaggctctcctgggctggagcagagcctgcgtcctgcaagcggggaaggcaggagtggggaaggcccctggcctgcaccaggcccccatgagtactggctgggctgtcactgggtatttagttttgggggtgaccagagagagaggaaatcctggaaaggatttcacttttcctagggaaggtgaaaagaacagctgtggagggcggatgtcgctcagaggtccagggtgcggctcagtggccagcgtggaggctgccacggcccttggggggcagaggtgggctgtggagggcacggggtggtgactgtggagcccgggaggggctggaggggaaggagcctgtgacagccttgggcttccagacgatggaggtggaggggctgctccctcctaccacctgtgacctggaagccagagctcccctggttgaggaagtggctga

SEQ ID NO: 15783 - DNA, 1194 bp, Homo sapiens
taggcagcctgccacagcctccagaaccacatgatggtaggggagaaagagaaataggaagtgaggatttagaaacagcattaaaaacaaagattgctggagttcagaatagcaacgttttagatctgtcattttccagaaacatctctgcatgcatagttatttaccttggtgccagaccggaacttgggggctgttttcatttctaggtgaaagctccttggctttgtgtaaccatcgatttactcttaaaaaagaaaaaaaatcctggagctgagttttggtctctacccaacatagaattctaggcgttggttagaatattgactttttagtaagaggagaaaaacggctttttgagaagggaaaattagattcacaagtttcaaatattgcagcaaagtaattcttatctgactttgaaatcttttccataccaaaaaagcatcagtgagatgctcccctgcctgccagtggcaagattcagggcttgcgttttggaagcttctccctgtgtggtcgggccatcacagccacatttcacaatttctttttaactctttctgtgcccctccctcctccccggtggctgaaagcaccagctcagagcaaacgtgtccaatgctgggctgcccggcgacttccgcgaggtgctccagcagcggctgggggagctggagaggcagcttctgcgcaaggtggcagagctggaggacgagaagtccctgctgcacaatgagacctcggctcaccggcagaagaccgagagcaccctgaacgcgctgctgcagagggtcaccgagctggagcgaggtgtgtgcctggcctgtttctctgtctggcagtggcctgattttcaccacttgtggtcagacatgcgattctggttgatggacagcagggattgtgacaccacatgggcctggttcccgagtgtgtgagcaaataataaaggcgactgaacaaggtcatctcaggaatgagctgccagccccactggcattatccagggaaaagtgaaagtgtccaggaccagcttcgataagcaaccacacgggcgtttcagtcctttgttaactagtcctggcagcggattctgtgtatctttctcttctctgctcacactgtggtgagtaagtttctcccacaggagacagagtgggagggatcaggggataattcagattgcgtcat

SEQ ID NO: 15784 - DNA, 1227 bp, Homo sapiens
ggggccacggtggttgaccagaccactttgatgaaaaagtaccttcagtttgtggcagctctcacagatgtgaatacacgtgagttgatcctttttatcattaagaaatgcataaataaggccggatgcggtggctcacgtctgtaatcccagcactttgggaggccgaggcgggtggatcacctgatgtcaggagtttgggactagcctggccaacatggtgaaaccacgtctctactaaaatacaaaaattagccaggtgtggtggctcacgcctgtagtcccagctacttgggaggctgaggcaggaggatcgcttgaacccaggaggcagaggttgcagtgagctgagatcgcaccactgcactccagcctgggtgacagagcgagactccctctcaaaaaaaaaaaaaaaagagaaatgcataaatatgacacatttatctcagctcagatgttgtgtactttgagattaatcgtaacagtaacttttattctcattttccttttctctaccttgtagagaagcaaagtgatgagtaatactggctggagccccaaagaggcacgtgtgtgtgtttgtgtgtgtgtgtatatgcttgtcagtgcatgcacgtgtatgtctgggagtacaaatgggtgcgactggttgtagggaactagctatgtgccttctattaggccatgacagtcaaactgataagatctgattgcttctcttaaattactaaatccaagttttgcattaacataatttccttaacataatttcaattacctgatgcttgttttgccgttcacagctgatgaaacaaagttgaaaatgatgcaagaagttagtgaaaattttgaggtatgagcattatattttctatttttcattttgaggtaaatattcttattcactttcctgtcctgctttgtcagtctttttactagcaactcaaagatcattgtctttgttcaagtaatttagtatatttcgaaactgaaatctgaaactttgtacacagcgttttccatcttcacgctggtgatagcgaaccccataccatgttgaggattgtcagttttgttttggttggtttaaaaacattttttcattttaaaatatggtagctcttttaggctaccatgcctgttgggatgcactcagatttattcttgtacttttctttctttcttttctttcttttttttttttttttgagatggagtttcgctctt

SEQ ID NO: 15785 - DNA, 1227 bp, Homo sapiens; identical to SEQ ID NO: 15784

SEQ ID NO: 15786 - DNA, 1142 bp, Homo sapiens
cagaagttggcttgaaatctcagtggtggctttttatggagtttcttttttttttaatttattttttttttgagacggagtctcactctggcggccaggctggagtgcagtggtgtgatctgcaacctccgtctcctgggttcaagtgattctcccgcctcagcctcctgagtagctgggattacaggcgcctgccaccatgcctggctaatttttgtatttttagtagagatggggtttcaccatgttggactaggctggtctcaaacttctatgtcaagtgatcctcctgcctcggcctcccagagtgctgggattacgggtgtgagccgccgtgccctgctttttatggagtttctaacttcaaggaaaacattggggagttctgcagtttgagggacaagactgttctcacgtgccttcccatctctccttttaggccctttcttgctgccttgctaccaggtgggcagccagcccagcacagccatgtttcacagtgaagaaaatggctcgaaaggaatggatcctttggttctcattgatgcaattgctatttgtatggcatatgaagaaaaggagctttgcaaaatcggggaggtggccctagctgtgatatttgatgttgcaagtatcatcctgggctccaaggagagggtaaggaagggttgaggagtgtcttctgatttggagggtgtctgtacctgagagtggtccttctagaaactgatagtttaagaattgcggccagacgcagtggctcacgcctgtaatcccagcactttgagaggccaaggcgggcggctcacctgaggttgggagttcgagaccagcctgaccaacatggagaaaccccgtctctactaaaaataaaaaaaattagccaggcgtggtggcgcatgcctgtaatcccagctactcgggaggctaaggcaggagaatcacttgaacctgggagatggaggttgcggtgagccgagatcacaccattgcactccggcctgggcaataagagcgaaactctgtctcaaaaaaaacaagaattgcagtaacgtgttgtggtttgttcattttcctctccaggcctgccagctgcccctgttttcttacatcgtggagcgcctgtgtgcatgttgttatga

SEQ ID NO: 15787 - DNA, 1320 bp, Homo sapiens
cccaccttgttaggaagctgcccctgtgggctgttcttggttaaacacaagtcgtctcgttctctccctcacgcaggtggatggcattctgaaaacggttctccgggacgagatcattgcttggcacaaaaaaacacaagaggacacgtcctctcctctctcggccgccgggcagccagagaacatggacagccagcaactggtgtccctggttcagaaagccgtcaccgccatcatgacccgcctgcacaacctcgcccagttcgaaggcggggaaagcaaggtgaacaccctggtggccgcggcaaacagcctggacaatctgtgccgcatggaccccgcctggcacccctggctgtgactgtggccgccacggccacccggaatgtgaagggcgctccgggctctgagcccgcagcttttacgacttctccctgcctcgttccttatattcacagaagccccatagtttcactgggttgcggttattttcctggtagtttgcgtgtaagaaagggagaatatagttttagaggaagctgaactatgacgatgctgggcgaagcggttggaaatggcagagctgaaacttattccaagctttcaaaataatcttttaagaagccaggattctccggtctggaatttctgagtgagtcctttttttatggtgtcctccctctgtgaatgtacaggcggaactgtacgaacagctcccttccatccatttttaactctttcggaaataacacctcacagcagcttcgtgcttttgtacagacctttgtaacaagtgtacagaaaactcattttgtttgagaaacaggagttgatgaacccatcatgctggtttttctctgagcacaaagttttaggctgtacacagccagccttgggaatctcgttgagcgttcggcgtggatccacggggccaggccaccctgcgggagcgccacacgcatccacttcggattcagtgggtgaagacagaactctgagagtctgcaggcggctcctgtgctttttatttctggctcttcggatgtcttctagacatttactatcactgcacctgaagaaaaaatcacttttaccttcctaatttaaaaagacaaaacagaaatgtacgttccttcgctagctttagtctttctgttcccatttttataaatctgagcattgataatgttctatctaaatttgtacagtgtgatttttttttttagaataaatattttataaaagggtttattgtcccttgtttatgttaaaatgcttgtttccatgaggggtttcttccctctcaatgtccctagcccc

SEQ ID NO: 15788 - DNA, 1207 bp, Homo sapiens
agtgactttcagaagaatatatgatgaatcacaatatatagttccccctctttacactaaagattatttttatttaccctgtatgctgttttagttgaatgccatgtagcagactgttggttaatatcatagaatgaggtgtgttaatgaatacagttattttcacacacacaaaaatctaataaagaggaaagaaagaagtaatgaatcttcagatctttagaagtcttagaaatgtgtgaatgggtggaaagaatggccccgtttagttttgtaaagtctgtaattataaaacagctcttctacatgacctcatagacaatcccgagtcccagacgctttgcagagaagcatccttgcctttccttgaggcggtgatcaggacatagatagtgggaaggatgtgcctgggaggaaggtcccaagaccacgtctcatcctggcatgccagtgccacccacctgcctgtgccgcagttgtttgtcattgactgggcaaagcagatgacccatgtctcacttgcaggtattgactgggctcccaagagcgaccgcattgtcacttgtggggcagaccgcaatgcctatgtctggagtcagaaagatggtgtttggaagccaaccctggtgatcctgagaattaatcgcgcagctacttttgtgaagtggtcccccctagagaacaaatttgctgtgggaagtggagcacgactcatttctgtttgttactttgagtctgaaaatgactggtgagtgacatctgaattttttctatccctctctatagaatttacatttgcactgctgtgtgagggctcaccataactccagtttttctcatccggagttgtgtggttttttctctgaaattctcgattctgtctgagcattttcccttctcatgtgcatgttaagttaaatcgcacgttttttatattaacatagagctattgtgtccatgttctgatcgcctaacttgtttcttctgcaagatgctattactgttctcactctatactgcgcaaattgctgttttcttactctcatttacaaataataacattgaaagagtctccgttccctgaggaatattttttctttttttttttttttcacaggatatctatgtaggattcctacagataacaatgttctttttttttttttttttttttttttttttgagacagagtcttactctgttgccc

SEQ ID NO: 15789 - DNA, 1138 bp, Homo sapiens
gggattacaggcatgagccaccgcacccagccttatttatttatttatttatttatttatttatttattgagaaggagtttctctcttgttgcccaggctggagtgcagtggcgtgatctcggctcactgcaacctctacctcctgggtttacgcgattctcctgactcagcctcctgagtagttgggattacaggcatgcgcccccacgcttggctaattttgtgtatttttagtagagacggggtttctccatgttggtcaggctggtctcgaactcccgacctcaggtgatccacccacctaggcctcccaaagtgctaggattacaggcttgagccaccgtgcccagctcatgttttatttttttttaatgagtcaacctctttgcattctgagattccttgtggcagctgcctatggcctgtttctatatacatatattttcatttgctttttccttttctctctgccctttaaacagagtgttttctgcctacattaaagaagtggatgaaaagccagccagcacgccctggggcagcaagatgccttttgggcagctgatgtcagagtttggtggcagtggcactggtggctgggtccacggggtaagcttctctgccagtgggagccgcctggcctgggtcagccacgacagcaccgtgtctgttgctgatgcctcaaaaagtgtgcagtgagtatttgcctttcatttggaaggtggggaacaaggggtgggatctctcaccagctgaaccaggactgcccttcctggggtgttagcacagggcacaaacataaaaaccttaatcaggccaggcgtggtggctcacgcctgtaatcccagcactttgggaggccgaggtgggtggatcacaaggtcagcagttcaagaccagcctggccaagatggtgaaaccctgtctctactaaaaataaaaaaaattatccaggtgtggtggtaggcgcctgtactcccagctactcggaaggctgaggcagagaattgcttgaacctgggaggcagaggttgtagtgagccaagatcatgccactgtactccagcctgggcgacagagtaagactccgtctcaaaaaaaaaaaaaaaaaaaaaacacctcaatgaaaactgcagg

SEQ ID NO: 15790 - DNA, 1150 bp, Homo sapiens
caccatgttagccaggatggtctcaatctcctgacctcgtgatccgcccaccttggcctcctaaagtgctgggattacaggtgtgagccaccgtgcccggccgctcacttttaagagtaagagggggtggggcacgatggctcacgcctgtagtcccagcactttgggaggccaaggcgggtggttcacttgaggtcaggagttcaagaccagcctggccaacatggtgaaaccccgtctctactaaaaacacaaaaattagccaggcatggtggcagacgcctgtaatcccagctacttgggaggctgaggcaggagaattacttgaacccgggaagcagaggttgtggtgacctgagattgtgccactgcactctagccagggcaacagagcaagactcggtctcaaaaaaaaaaaaaaaaaagagtaagagaggcctgtcgtggtgaacactctgccaaggaggtgggcggtgggcagtgcatcctccagggactgactgagtcttgtttcagggccatgactgctgcccaatgctctttaactacgatgaccgcggctgcctgaccttcgtctccaagttagatattccaaaacagagcatccaacgcaacatgtctgccatggaacgcttccgcaacatggacaagagagccacaactgaggaccgcaacacggccttggagacgctgcaccagaatagcatcacgtaggtgccgtctgtagagaggtggtcaggtgacaaggtgccttcctgcccctcgctgtttccttactgggttcctacaaaagctctatgcccctcaggcccagacattctttcagggacaagtgcagcaagaagtctgtatcttcccgaccgccaggctctcatttccagctcgtggtagggagggagtcgccaccacctggtcattctgtccttcaaggtgcagattacaaggcagcagccagcaggagcagtgcagaccttgttgcaatctgaggtggtggggcctcagggcagctgcttcctagggtaccctttctcagctactcgagaacaaaaggagacattcctgaatgctgcgttcccacagtagtgcacacataacagaaagcgaagttacagcctgttggaaaaggtaactgtagctgtcgtttcaagta

SEQ ID NO: 15791 - DNA, 1293 bp, Homo sapiens
gcactccagcctgggcgaaagagcgagagtccgtctccaaaaaaaaaaaaaaaatcctgtctagctgggcgtggtagtcttgcttgggaggctgagaagcaagaggatcgcttgagtccaggatttggaggctgcagtgagctatgattgcactactgcattccagcccgggcaacagagcaagcccctagctcaaaaaaaataaaagaggtgggcagaggcccatccagctgagacatgaagggttccccaggaactagaaccttcaaccgacgcccaggtcatccactggtagcaggtctggaatgtgtctagaagctggggtgtagagctttcaggtgcggctccccgctatgatgtcagcagtcagttgacgtcagccccgccctcccccatggcgccctgtctcaccgacacttgaagtcacaggagccggcagccagcagcacattgttggggtgccagtccaggctgaggacggtggagcggatgggcttcttgatgtgcttgcaaacccacctgggaacggtggtcaggcagacagggagagagggacaggcaggtgggactcatggacctcagcaccagggactccaggctcccactgctccctgcagcccaccaaagacccaggagagaggcgactgggcattgccagcccacaaggccgtcagggccctggggcggcagggatgtgctgtgtcgcttctggagtgggaactctgtgccctctatcctttaggccacacagtcaccctcagagcaggctcagcaaagtgatgccatcaccagaggtcacacaactactaactggccatggtgggatgcaaatttgggtctctcagatgctcctggctggcctctgccctcagccatgcaggggagattaaaaactaagacgtggactggcaatcatggctcacacctgtagtctcagcactttgggaggctgaggtgggaagattgcttgaggccaggagttcaagaccagcctggacaacgtgacaagaccctatctctacaaaataaataaataaatgatttgggcctgtagtccgagctactcaggaggctgaagtggtaggattacttgagctcaggaggctgaggctgcagtgagctatgatcacaacactgcactccagcctgagcgacagagcaagaccttgtctcaaaaatatatatatggccgggcgcagtggttcacgcctgtaatcccagcactttgggaggcggaggcaggaggaccacctgaggtcaggagttcaagaccagcctgaccaacatggagaa

SEQ ID NO: 15792 - DNA, 1223 bp, Homo sapiens
gtccaggaagggcactgctctccctcccctccgcccacatctgtcaagtcccttttcacccctctgcaaacataatgggggtgccagggccaggtcaggcttgctttttgcctagaaaagcaaacagctgcaggggtctcccctagagcaggtgtaactggctgggcaggacagaaggcgcctgagctcccagggagtcccaacgctggccttgctgggggaggtggcagcccccagcatcacccccggttttgatacacctgcaattcgggcctccctcgctgtggcccgtctgtatccttgagctggcatctgcctcccgggcggccagacgcccgcctggccttccctccggcctcggtttcccctccgcggcgctccaatggcccccgccctccgcgcagggccacgactgcttcccggtgctgttcacctatgacgccgccgcggggatgctgagcttcggcgggcggctggacgttcctaagcagagctcgcagcgtggcttgacggcccgcgagcgcttccagaacctggacaagaaggcgagctccgagggtggcacggctgcgggcgcgggcctagactcgctgcacaagaacagcgtcaggtgagagcgggagccgggccggcgggtgggcggggcctcggctcgcccagaaacagcgtcgggtgaggaaggggcctggagtcttcctcctggggcattgtgctgggaccttgaggactggggacccggagggagggtaggcgtgccctcaactcgctgcgccggaacggcgtctgatgagcggcgggcccggacacgaggggacggggccgatttgtgggcggggccttggcgccgtactaaaaccgcgtggggcggaggccggcagaggtcgcgtagcgggcccagggtagggagtggctttgactcgctgcggaataacatcgttagttgtgggcggggcccatcttgatctcaccatagcagcccaggtgctagtggagcctgggagggacacggtgcgaccgacataagacggggtcgacctctttaggttgcataaaaatagcatcagatggggctgagcagctagcctcgctctgcatttccgggacttaggtggggactgtcgtagggctggcccctacggttctctggggtggccaggcagtgaccagcgggcttcctgggcggggtcacagctggggcgggtctattgctagcacttagcgag

SEQ ID NO: 15793 - DNA, 1231 bp, Homo sapiens
gcccctacatgtccatctgtcctgcctcctcaccagaccatgaggaagcaggcctggaaaggggaaaccaattgctcagggacattgtcacccgcaccagaaatccagtgatcccaacttcccattcaaccctgcttcacaaaccccaagcaggaaaggacttcacatgtaactgttggaatgtttaaattttagacttcagaacccgtggagggaggttagaattacagggttctgctgggaggtggggtgagaagtttccgtttgcccacaagagtgtgtgttggtggggctttgtggaaggaacagctttctataaggtggtctggccactgaagcgtgtcgggaatgtcggggggcccggggttacagctgcagcagaaatcctctcccacgcctcggctcttctctgttgcacagaatgttttctgcagcctttcagacctaaagttctagggttctggcacgtgtgttgggagggggtggggggttgctttgttttaacccctgcccttctcccacccctcagcaaaagacgatgccacattgtcaggaaaacgaatgcagtcactctccctgaataagtaactgcgacccgtgggaggagatgccggggacctgggccgcgctgccaggacctctgctgtgtctcgcccaccctgtgccctggcgccgctgcaacagcccctcatggccaggagccccccatggcctggggcctcctcttcatcttggcacagaaattgtttgggggatggggggggggactgggggaggggtagctgctatctttgagacagaaagatgcaggacagcatttcatatgtaaccatttgaatgtttttgctgtttttagaattcagagcccttgctggggggtgcctgggagatggggtaagaagagctttcatttgtctggtagatagatagcatgtaagggggtggttgtcccaggaggcagctgctgacaggtttgctacacacagccccggactgtgttgcctgggtgctcattcagagaggggctatcatctgggagcctgtgcccctgggtcctcgagggtcatggcttgtccctggtcagtcctgtctgactgacctcagggcctcacctctctgcccttccctgcccggttcctactcacctggctagggccagtgcccattttcagccctacccattgatcatttcaagaaacctctgtttactgtgtggcacccaggcaaaaca

SEQ ID NO: 15794 - DNA, 1168 bp, Homo sapiens
cagagcagtcaaggcagctgcttccgctcacctaaactgcgggtctctgcaggaagaaagggaggccacaaaggccgggcgaggcagtatacaagccctgaggagatcgacgcgcagctgcaggctgagaagcagaaggccagggtgagtacgtgcctgtccaggccacgccagtggcccagggtggcgctttgccaatttggttcatagagaggccaggcaaggactacccattcgcagggacaagccagcacgtgggggtcgggcgggcagtgagccccaggtgtgagtctcagaacaaccaatgacagtcagggcgtgggcatcctctgcctggatgggttagaaagaactgtggctgctctgcagcagctgctttagtggggccctgttcttggtcttgtgcacctactttcaggaggatctccctcctgcaggacctgtccattcacagctcgagctcccagcacccctgcttgtctgctgcagccacacaggatgatttgccacactgcacatgacatatgccctgccttcccacacccccagcatcagcatgctctccatccctggagacgttgtttagcctctcctcctctgtgactcatgcctcacctccagccagagctgatttagtagttccctctcctctgctcccatagtacattgtccaggccaccgttaggaaatagaatacattcccatcgtcagcatctgcatcttaccatatcattagattgatgcctggatcaagggcctaagggagcagtcagggccagatgggtacacagctgtgacgtaccccaggagtctcaagaagggaaaggccacatccagctgtggggtctgggaggggtccttgggggagccagcagctgagcaggacatggagaatgtgtgggcaggtgccaagaggtgaagggacatgaggttcctataagggacatttttggtgggaaggcaagaaaggtggagggaagcagccttccgaggtgttgttctggggagctggtgcaggaggtcacctgtgtgggtgggtcggggggatgacttgccatggagtgggagtggagtgcggagaggactcgcctgggaatgccagcatgatttggcagctgcatgtggcaggtgggagctgagtaggatggtggttttcagcctggtggct

SEQ ID NO: 15795 - DNA, 1131 bp, Homo sapiens
atggctccccgagtcacagccctccttatactctattgtaattgctttttctcttgtctgtctctttgctaaaatgtcaccttctaaggggcaaaggcttaacttttgttctgtgttcccaacatccagtatagggttaagcttttagttgaagttagctaatgacaacagcaaatgtctcttaggcacacattatacaccaggcatgatagatacaattctaatgaagtctttgcaatgaccacataaggtagcttccattatccccattttacagatgaggaaacagaggcttaggaaggttaagtacctttctgaagatcacagcgggtaagtagcagagccaggatttgaacacagtctgggtgctgagccctgtcccatagctgtgaccctatgctgactcaaggaagtcagcctgtaccgaaataatggctggcaaaggcctttggggatttgagactcagaaaccaattcatttttttcccccagatctttgcagattatcctgtggaaggaaaatgcctaaagtcaaaagaagccggaaagcacccccagatggctgggagttgattgagccaacactggatgaattagatcaaaagatgagagaaggtgagtaggggagttcctgtctgggtgggctgggtccaagggtcacaggcttagatgcccccaggggacaggcataaatgcaaatataaaaagagagtggtctactaacactgacatgttgtgtttgcttatgaacttggggaaatactgtaagtgcccgaaaataagataacattaatgaaaaggtcctcagaaaaggtgtttttttttgtttttgtttttgccaactcgaatataaaaggttatgaaatatagatcaaatagtctacctatagttatttactattttggttagatatatatttaaaatcatacaaaatatatttacttggaagtgctattccttttcagtatcatcgattagtctttgccgcatctgttttctgtcacttccttgtaaatggcgtgtgatcctgctttgtgaacccgtgtcctatgctgtctttggaaattttatctgaagccacaagcatctgttggccttatatgatcacagtgtggccacttaccaattga

SEQ ID NO: 15796 - DNA, 1206 bp, Homo sapiens
tgggcactcccttagttgaaaactgcatttgaacagtgttgttgtctgtctctcctcttcccccacttcctgctgttcccagtgtggcgagaaaggacactacgccaacagatgcaccaaagggcacttggcctttctcagtggacagtgacagcagctggagccagctccgagcagcccgggggccccgctgttgggagtgtgcatttaactgtttcatgcgcttgttggcgcgactgtggctcgagctggcccgcagacacgtgggtttcatcactctgaggggccacgtctgttagtttcctatcattttgccttagtattttttgaaaaagggacatgtgtcctgtgggtccctgcagtcgacatcatgtttggctgggcatcgatgcctcctttctgggactcccggcacaactcccctcatccagggagggaggcagctgctggggaggggcttggctaggtagttctgtgtggcggtggtcattcccctcattaaacaccagttcttggtgacgccaggggctggtaggtcattcaaagctgtggccagctcacgcctgcttcctccctccctgccctgctgaatcctaaagctgtgcctatatctgtgatttgaatgagggagccctttggggcaaattcaggtgcccccattgcctcaggctggccctggtcccaggtggcagcggttgaggaggggtacagggctctcaagcctgaggttttcttctctgggcttaattttctcttggggtacgtgcctgacagtgtttaaggtgtccgttgaactggagttgcagacttttaaatagatgaccccttcagatcatctgtgcctacctcctgcccatcaggcgtctacactgtcactcagacacctgtggcatgtggaggagactgccctgtcctgagcctggaaaatgtgaaactgtctcctgcaacctgctgggcatgtgggcctggctgtgttcaattgcaagaacaatttttatgaaatggattaaagcttgttttttaagccatgtctcattaattaagggtctcatgccaacccttttacactggctgcaatcacggcgtagctttcttgtccctttcaacaaatgtcagcctcacaaagggaagtgcagctgcccagaaggcctgcaagcagctggtcaagtctgggagtctgatctgtggagccagcaggcaggtcct

SEQ ID NO: 15797 - DNA, 1275 bp, Homo sapiens
atgcagaaagagaaatgagttgagtgggataatctggtaccccagaaaagcatggctgttccggctctgaggcttgagaggagcttgtctggtgggagattggcgggaggtgtcggtggcagcctctgactaggctgtttctgacagtgtagtgtacaccccctacccccacctcactcccattctgtggcaccagggcggtcctgcctctgaaggacgggttctctggggctgtttgtctgagcgtgtgttccctctgttccttctggaaagaaagtggttggccaggtggcaggttggctcctgaggtgtctttgtgccccccgggtctgctgattctgcagagacaccggcaggcgggtcatgggtcatctctgaagggaattctcaggaaggctttgtgtgatctcagcctgcttcctgccatgctgtgccttcactgtaaccttttaagatacttaccatcttgccttcctgacttcagagcacgagcggctccgcaaataccactgaagaggacacactctgcacccccccaccccacgaccttggcccgagcccctccgtgaggaacacaatctcaatcgttgctgaatcctttcatatcctaataggaattaacctccaaataaaacatgactggtacgtgtgctgattgcctgcctgtctgccgtagccattatcccatgttccaggggctcctgtggcacaaggtggggggaggtcgtctttccaggccgttgaccggtgaaggcctttgtggacttcccagaccaccactctggtcgtgtcccagctccctggagggcagggtgtcatccagaccttcccgaagcagcagtgccgaagtccgtcccttgccatgagtgctgtgggcaggtgcatttgcagacattctggcctttagttggctggccctttatggtgtaacacaaaggcttgcgtacctgagagcgccagatcccaccccggctgtcctgtggctccaggcagggatggcccgcatcctgtgtttctgcatcaccctggggcatcaagggctacagggtgaggtgacccggcactgtctggagagacctcaggcagcactcacgcccaggctgcagggattgtggccctccggctgaggcggcttctctaacaggaggcttagtgggttgggggtgatggggaaaagtgaggggctatggcggcccctccctgcttcctcttcatcagagcctcattgggggtgggatactgtgccccagaaataggtgccaccagacatctgag

SEQ ID NO: 15798 - DNA, 1262 bp, Homo sapiens
gaaaattgttgattatttgtttatgaaattgttaatacatagtcccaatctttttcattgcacaaaaatctagggttgacttggtaaatgcagtgacattttctcatggagttcctttatttaatatgtattctaagtaggtacgtttatttttacttttttattataattttgatattaaaaagaacagagatggggtcttgctttgttgcccaggctggtcttgaactcctggcctcaagcgatcctcccacctgtcctcccaaagtgctggggttacaggcgtgtgtcactgtgctgggcctattttatttatagaactcatttaagctgtttttattttaatatgccctataaacatttttatattttttgaaattggttcttagtgttcacaacttccataagatactgctaatgcaccagtattaaaacacatcgacgtaagtagctcatttagctttttctgctgttcttggcccaagttctttccaaaaccaactcttaggcctgctctttactagggatcttatgtcgtattgctttacagccacaacacttggattcctgttgattaacttctccattctcttaagcacctttagaagatttagaagtttcctagttttaagtgtttcaccagcaagtattccatacctacttgatgttgctggtctggtgtcttatttcctaaagtgaagcatctttttttaaaaaagaatttgattgacaatatatccagtccaatataagtatgaaggattctctctcctgagattgtagcaggcagccaaacattttcaaatgatgcccaaggttttagctgtcttgtgtgcatccacagtctgcgaagaagacatgataaggacatcagggagccaacaagactcctaatagcctcactacattcatccagtgcctattctgcatgcctaagcttagagttcttttatatacctctacggccagcaaaatgctcaggtctgctcttggtagggtaaacataaagaagatacacaggccgggcatggtggctcacacctgtaatcccagcactttgggaggctgaggcggatggatcacgaggtcaggcagtcgagaccatcctggccaacatggtgaaaccccgtctctactaaaaatacaaaagttagccgggtgtggtggcacgcgcctgtaatcccagctactcaggaggctgaggcaggagaactgcttgaacctgggaggcggaggttgcagtgagccgagattgcaccact

SEQ ID NO: 15799 - DNA, 1816 bp, Homo sapiens
agaaacatagactgagaacaaacctcaagactatcagtgtgacctccccataacaagagaaccccatatatagtttgagactttcccttgagaaacttatactaaaactattactcatcagtcattcactgatcagcagctaaagtccatgagaccaaatggttttatatggaaccaacgaagtgggagctaaaactgcacagtggtcattctttggcctctccttggctttatgacttaaaccaactacaacttccctatagcttctaagcagtttcatcagcattacttgggaaaacgtgttgcaagtcaaccagtcactaggatatttctacccatgcaacggaagaaaaacccattactccagaagagtatatctaagtaactaaaatggaggcagaaaatgttttaaggattttcttcaaagaataagccacagcaatggttttgtagaaaactcctgtgcttttgagcaaggacttttgccctctagaaagcaactgaggccaggtgcggtggctcacgcctgtaatcccagcactttgggaggccgaggtgagcggatcacctgaggtcaggagttttgagaccagcctggccaacatggtaaaatcccgtctctactaaaattataaaaattagccgggcatgatggtgggcacctgtaatcccagctacttgggaggctgaggcaggagaatcacttgaacccaggaggcagaggttgcagtgagccaagattgcacactgcactccagcctgggtgactagcaaaactccatctcaaaaaaaaaaaaaagaaagaaagaaactgaaaagtgaggtgtggaactccaggcaacgacccaagcacttattttttaagagggaaaggactttggtcatgtttacattggcctttggtttttttttttctttcagccacaactatatgctgatataactcagccatcacttttgagttttgtttttaaatgaaggttaaatgtgacctgtgccctcacatttaattccgtttcatggagacatcttcctgactttgttggatagctgccactagggttgcttcgatcttcagccacatgctgtccttgaagcagctatttgaagatgtgttttctgaggaaaacaggctacaactgtttattaaaaccacttgcagtgcattcgtttatcagatgctcagtgcaaagtgtaattgggtcatggtcaaaaacgcttgcaacatctaattggcgttcaagatagtcattcaaaagttcttggcccgctgaagtctgttaacagttgaaacattctacagttaaccattagcatgctagttgtcctaatggaaatttttgaagagtttttcaatatataccctacccttgccaggaagagaagtaaaatcctcaggttgtggggtatttgtttctactccagcctggcaggcaaggctaaaacctgagattatcgatctatgagacatcttgatatgtaaagcacttaatattaaaggcataaaagtgaaactgctaaatatgtatagagaggttgacgtgtgatacgtgggacagttcacatagacatcagagaatttattccagaaaggagcctcctgaatgtgatgaatacggcaaagcctttaatcacatctcagcccttagcatcggaaagcttatactgtaaataaacttgatgaatattatatgtgaggaaaactttcatgtatagcactcattgcttcagacagaaaatgaattccgtcggtatgttccaatcgtgatgaatttgagaaacattgcaagagggagctcaatcttggccgggcgcc

SEQ ID NO: 15800 - DNA, 1232 bp, Homo sapiens
ggcagatggggcaaatcgttgaattttcccagaaatcacaccagccttagaaagcgtcaaggcaagtggatggcgtgctgggaatagaaagcagctctgggaccagttaccccatttaggaaaggagtttgcactaaactgtttttctcacagcagaggaacctttccaaggtggggatggaagcacagtcgggacagaattcgatggattcctttagttggagtccgcgtagtcagcacagacagcagtggaaaggacgctctgggtcctgttatttgctagggagggtaaagggagactatttcaaagctactgttcctagtccagctttaagtttcggtaagaaacatgctgttttgtttcatgatttcgttaattatggaaatttggcattgagggattattttattgagggtagaagagattccagaatcatcatctgtgatgatggtgtcctttagggctcttggagcagccagaccatgtttccaagagaaacctggtgatattgccagcagaccccctgccatcccccccagttgtcctggggctgaatgggcaaatctgtccaaacagctagtaaccggctgtgagggagagggtcagaagcacttagcgttggcctctgattgctgtcctctcttgtcctcttcccactccaatgatgaaaatgattttctctaaatgcctgggtaaggatgctttcaaggagctcacttggcctgcttgccctgccctctcacctctgacacccagccccaggagccagaccactcctgcctccacctctgactcttcagcagctgaagattaatgcagagaaagagcaaagcccaaaagggagaaaaaaaaaacaaaaaaacaaaaaaacgaagcccagagaaggcaggctgtgcctgagcctggtagcagagctcgttgctgggtgaggatggcactccccgagttttcccaaccgacgggatgaccttccattgtgttttcccaaccctgctcatcctgtagcataaatgaagtgcactattaaacagaatagtttttcagaagagattgagtgtggttttgtgcaatgtttggaccatatatttcagttaaaacaagacatgttggctgggtgcagtggctcatgcctgtaatcccagcactctgggaggccaaggcaggcagatcacctgaggtctggagttctagaccagcctgaccaacatggagaaaccccgtctctactaaa

SEQ ID NO: 15801 - DNA, 1221 bp, Homo sapiens
gaggggattccttggaagtggggttggaaggtgtggccacatcccgtctcaacctcctcctgtcctcatccccttgcagtggctgaacacctgatagcacagcacagcgccatcaagatgctgcacagccgcgtcaagctcatcttggagtacgtcaaggcctctgaagcgggtaggacaggggcttccctggcattcttcctctccctcctggggaagtgacagcatccaaactaatgtagtctctttttgtgcctttaggagaggtcccctttaatcatgagatcctgcgggaggcctatgctctgtgtcactgtctcccggtgctcagcacagacaagttcaagacagatttttatgatgtgagtgtaaaacccggatggggaggcggggcttatgctgtcactttcacgtgcaggactggggactgttgttccccgggcatgccacgagggatcccgaggaactggtcctttctgttccctcccagcaatgcaacgacgtggggctcatggcctacctcggcaccatcaccaaaacgtgcaacaccatgaaccagtttgtgaacaagttcaatgtcctctacgaccgacaaggcatcggcaggagaatgcgcgggctctttttctgatgagggtacttgaagggctgatggacaggggtcaggcaactatcccaaaggggagggcactacacttccttgagagaaaccgctgtcattaataaaaggggagcagcccctgagcacccctgctggtggctctgtcctctgttaggcaccacactggttggtcaacttggatgttcatcgaggctcattctggccttgctcagaagcccttctgatgctcttcagtgagggaggcactaccatttgaagtgaccccatgtcagtcacatggactggtctttagcaaagtccaaggctgcctgcttccacctaagtggtctctgttctacactttaatgtcaccctctacatcatcttacctagcccacccaaccttataaacatgataattgactactttcctgagctaaattaacttgtttttcacatacgcaaaaaagaagggatagtaagcagatttttattagaaagaagtccaagccttgatcctgtgggcactgtgaattaccaggagggagagtttctcaatgaccgtttactacatattttggagaggcagctaggaagtggtctaaaggttgggattgctg

SEQ ID NO: 15802 - DNA, 7789 bp, Homo sapiens
tgcactgccacgggctctttattcttcgctggttagaaacagacttgtgaaaaagagttatgcccactttggggagacttcggtaggtttatttaaatgctcatattattaattagttcataggtcgtgttttaagcgaaaatgggtatctaagatttgtcttaaagtttgtgtcttacggttttacatttcatgttacagaaaaggttaagaagttcttacaagagttctaccaggatgatgaactcgggaagaagcagttcaagtatgggaaccagttggtaagtctaagattgggtaaagggaatggggagcggggtgcttaaggagccataagcagcagcttggcttgttttattaaagacataacaattagagggtttgagggctgaaaagcgagtatcgctctgtgtggcgctgcgttctcccctgtggatgcccagagcctgtgctgagttctcagtgatgcattttcacatatgaacactggtgagcaaagtgaatgtggctctgaggtgtttctgtctcttccccacttgaggttcggctggctcatcgggaacaggtggctctgtatgtggacctggacgacgtagccgaggatgaccccgagttggtggactcaatttgtgagaatgccaggcgctacgcgaagctctttgctgatgccgtacaagagctgctgcctcagtacaaggagagggaagtgagtggttagagaacaatggcaaacaaagggcgaggcgtttaagcttctgtagagaggctgctcagatactgatgttttctgagcaggcagaaaggaggggcacttctgcctggtgttctctgtgctctcctttccccatcctgttgctcttttttttttttttttttgttcttctcctttaggtggtaaataaagatgtcctggacgtttacattgagcatcggctaatgatggagcagcggagtcgggaccctgggatggtccgaagcccccagaaccagtaccctgctgaactcatgcgcagattgtgagtggtctctgtcgggaaagatgtagggattggttctccaggatcttgtttgtgactgttttctccccttagtgagctgtattttcaaggccctagcagcaacaagcctcgtgtgatccgggaagtgcgggctgactctgtggggaagttggtaactgtgcgtggaatcgtcactcgtgtctctgaagtcaaacccaagatggtggtggccacttacacttgtgaccagtgtggggcagagacctaccagccggtacgtgtggagcaagaagcaggaaagcacttacccattagttgttttgtagagattaatttgatcctgtgatgcctattgttttatttggttgtaaaagttgcctgtgtgttcgcctttcattcttgggtatgtagtggtctttctacctattttctgggtgtttgttgttgacccagagtaagttcagagggttcttgacacttacaagatgtctgccatgaagagaaaatgtgattcaaaggaccgacccaatggggctcttttccttctgagttcctttggtgtttctgttctcacatcctagatccagtctcccactttcatgcctctgatcatgtgcccaagccaggagtgccaaaccaaccgctcaggagggcggctgtatctgcagacacggggctccagattcatcaaattccaggagatgaagatgcaagaacatgtgagtttggggtacgtggccctgggcaggtggatcgggagtccacttgaatcctgtagtcacttgtggaatggcaggaagaaagaagaacaaaagagggaagtgcaggagggaggtggaactagaatttcctgggagccttgggaaggggaaaggaggtctcagcacccctgctgtgggcttgtctgtggctgggtagcctgggagcctttgagtgggatgcctagggagggaaggttgggtccttgtccatttctcctagtcttatgtgcctttccctcccctagagtgatcaggtgcctgtgggaaatatccctcgtagtatcacggtgctggtagaaggagagaacacaaggattgcccagcctggagaccacgtcagcgtcactggtattttcttgccaatcctgcgcactgggttccgacaggtggtacaggtaaggaagagtttgacatgaggaatggatcatccccttttccctcacctactcattctacccacacagagaaaagagcagcaaaaccccaaacaaaacagaacccagggatttgtcaagaaattgttagggaatccagtgatgggcaagttgaagggattacatctgtatcctggcattttcctgcccaagggtttactctcagaaacctacctggaagcccatcggattgtgaagatgaacaagagtgaggatgatgagtctggggctggagagctcaccagggaggagctgaggcaaattgcaggtgaggggcaggggagagagaggaaattccgtttacatcctagctcccttttcccccagaaaataaaacaaccttaacttctctacagaggaggatttctacgaaaagctggcagcttcaatcgccccagaaatatacgggcatgaagatgtgaagaaggcactgctgctcctgctagtcgggggtgtggaccagtctcctcgaggcatgaaaatccggggtaagaagaaacaagggagaggctcagggtggatgaagtcatttaggaggaaaaaaggatgacaagtgtccctgtaggtcacagtatgagtggacatcttgccttcgtggacacagggagggcttagaaatagtgctgggtgttaggggtaggcagaactcaaaattgctctgttgttggccaagcactgggagaagagtcattccagggctgccttcccttcctccaggcaacatcaacatctgtctgatgggggatcctggtgtggccaagtctcagctcctgtcatacattgatcgactggcgcctcgcagtaagtagttgggctttgcgggaggtgaatatagtgacagacaggaccacagtgtttattcaaaaagtaggggtgcatgtttgctcacgcctgtaatcccaatgctctgagaggctgaggcaggagaatcatttgaggcgaggattttgagaccgcttccatgtctactaaaaagttttgtttttgtttttgttttttttgagatagaggcttgctctttcgcccaggccggagtgcagtggcgctatctcggttcactgcaagctccacctcctggggtcacgccattctcctgcctcagcctcccgagtagctgggactacaggcgcccgccaccacgcctggctaattctttgtatttttaatagagacggggtttcaccgtgttagccagatggtctcgatatcctgacctcgtgatccgcccgcctcggcctcccaaagtgctgggattacaggcgtgagccaccgcacccggcctaaaaagttttttttgttgtttgggtattgttttgttttttgttttttttgagacggagtctcagtcacccagactggagtgcaatggcatggtcttggctcactgcaacctctgcctcccaggttcaagcaattctcctgcttcggcctcccgagtagctgggactacaggcgcgtgccaccacacttggccactttttgtatttttagtagagacagggtttactgtgttgggcaggctggtctcgaactcctgacctcgtgatctgcccgccttgttatcggcctccgaaagtgctgggattagaggagttagccactgcgcccggcctctactaaaaagttttaaaaattggttgggtgtggtagtgagtgcctatagtctcagttacttgggaggctgaggccggaggatggcttgagcccaggagccaaggtttcagtgagccacagttgtgttctgaagagaaccagtgggaggggaagggggacattgccagtgccccacagatcctcgggcatctcaagaaggcctggtggagggagtggaatgatcccagcgcaggcctcgcctccctggcccgtttgttgtcttttgcttgttctctttcttgttctttctctctcatggttccttatttcttctcttccaggccagtacacaacaggccggggctcctcaggagtggggcttacggcagctgtgctgagagactccgtgagtggagaactgaccttagagggtggggccctggtgctggctgaccagggtgtgtgctgcattgatgagttcgacaagatggctgaggccgaccgcacagccatccacgaggtcatggagcagcagaccatctccattgccaaggccggcattctcaccacactcaatgcccgctgctccatcctggctgccgccaaccctgcctacgggcgctacaaccctcgccgcagcctggagcagaacatacagctacctgctgcactgctctcccggtttgacctcctctggctgattcaggaccggcccgaccgagacaatgacctacggtgaatgaagctcaacacccaaagagaggtcccctgtaatgatctgtgtagggaggaggagaggtgaatcagaaaacaaattccacgctcctggaaaccccagagcctcccctttgcagcaggggctggtccatggttctcagggaaatggtgggttggggctgaaatgctgatgaggatttcccgggaaagcttgtccctcctacactgtgaggaagtggcagagccaaaggagggacacctaagaggacatgggtgcgtagccctaaaaagggtgttccttctaaccttccctctgtccaggttggcccagcacatcacctatgtgcaccagcacagccggcagcccccctcccagtttgaacctctggacatgaagctcatgaggtaggagagctgggtgcgggtgggcaaacgttggcgtgggccgtgcgagcctcctgaaaaagtgcttattagtcttagggtgtgtgtttttcacaccaccacttcccgctacagacatgtccagagcctcagatcagcttttaagtggaaaattccacacttcatatcatagggacacaggaaattttgtttcctacactatttattttttttgagacgaagtcttgctctgtcacccaggctggagtgtagtgatctcagctctctgcaacctctgcctcccagattcaagcgattctcctgcctcagcctcctgagtagctgggattacaggcgcacgccaccacgcctggttaattttttgtattttagtagagagcagtttcaccatgttggccaggatgcccacctctgcctcccaaagtgctgggattacaggcatgaaccactgctcctggcccacaaaaatatttttaataaaattaccttcaggttatgtgtatcagttgtatatgaaatacaggtgaatttcatgtttagactggagtcccatccccaagctatctcatgcatatgcaaatactccaaaatttaaagtttaaaacacctgctcccaggcattctggatgataatctctatcgctattttcccatgagcctccagtgttctttccggtttttactcccttttaaatattctgtaaacagttctctttaaataaaatatatgttttgccatgtcatgcgctcagaggaggggtctggatcctctcttaatgacagacggatttgtcttacaaaggccattttcccgaaaaaaataggaaataacttggaggatactggtgggggctatacgtttggtgaaatccatcagtgatattcaagccaagcaaataatcacccactaatttgtgttttccacttaaaattcttggaggggaccatgttaaatggggagccctggtacagaaaacaacatgggctcatattcactcccttccccatctccctcttctgcttccccatgaaccttcccccacaggcgttacatagccatgtgccgcgagaagcagcccatggtgccagagtctctggctgactacatcacagcagcatacgtggagatgaggcgagaggcttgggctagtaaggatgccacctatacttctgcccggaccctgctggctatcctgcgcctttccactgctctggtaagtgcccaaattgctggagggccatctgttttgacccttaaaggggtagctccttaccgtgctctcattgccgcctccccacctcccgctccagccctgccggggctaaagtgctgacagtgcagatagtggtcctctccgtgctaccgcactgtgggtacttgctgctccagcagggcacgcacagcgtccgtggagggaaaggccttttccccacttcttaaccttcactgagagggtggttggggtctgtttcactccatgtgtcctagatcctgtgctacagaccttcctttctgtcctcccgtcttggacctcagtcctgggggctccaaagtgctgttcgtgcaggtagtgtgattacccaacctactgctgagctagcacttcccgagcccccgggacacgttctctctgccaattgtcttcttggctgagctccccaagctccatctgtcatgctggggagcccagtggcgttcaaaagggtctggtctccctcacaggacagctgaactccgggactggccagtgttgagaggcggagacttgggcaattgctggacgctgccctgggcattgcacttgtctcggtctgacagtgccggcccaacactgcggatgctggggggaggggggattccactcctgttttgtgagtaggcgacccatgggctgcccagccttaaagccagaacaagggtgtcccctgacctcgttccactgccctcctcccgttcccatctttcccccctaccttccccttaggcacgtctgagaatggtggatgtggtggagaaagaagatgtgaatgaagccatcaggctaatggagatgtcaaaggactctcttctaggagacaaggggcagacagctaggtgagtggtttagtgaaggacaaagctgtgtcactttgtcttctgtggccatgtgtctgaggttggcctcaattctaacactggccaccattgttctctgttgatgtcgagcattcctgtttgtatcctgaccttacacacccactcatttccttcaggactcagagaccagcagatgtgatatttgccaccgtccgtgaactggtctcagggggccgaagtgtccggttctctgaggcagagcagcgctgtgtatctcgtggcttcacacccgcccagttccaggcggctctggatgaatatgaggagctcaatgtctggcaggtcaatgcttcccggacacggatcacttttgtctgattccagcctgcttgcaaccctggggtcctcttgttccctgctggcctgccccttgggaaggggcagtgatgcctttgaggggaaggaggagcccctctttctcccatgctgcacttactccttttgctaataaaagtgtttgtagattgtcatcttctagcctgggcctgacttccattaaaacagggttttgtgcgttttttagattcctgttcgtttttatgctatttcatccactcagtaaattacctgagtaaagtgcatctccctgccaggcccccagtatagacactggggatgcggcaaggactaagcggtccctgctgtttggagatacttaagatggggctccactttttgagccccccgactcccttatttggtcttatactgcctgtgtgcaagtcaggctctggggatatggcg

SEQ ID NO: 15803 - DNA, 7789 bp, Homo sapiens; identical to SEQ ID NO: 15802

SEQ ID NO: 15804 - DNA, 7789 bp, Homo sapiens; identical to SEQ ID NO: 15802

SEQ ID NO: 15805 - DNA, 7789 bp, Homo sapiens; identical to SEQ ID NO: 15802

SEQ ID NO: 15806 - DNA, 1160 bp, Homo sapiens
gcctctactaaaaatacaaaaaaaaaaaaaacatagctgggcgtggtggcgggcgcctgtaatcccatctactcgggaagctgaggcttgagaatcgcttgaatccaagaggcagaggttgcagtgagccgagatccggacaccgcactccagcctgggagacagagcgagactccctctcggggtaggtgggggtggggaaaaaaaaaaaaagagtcaatgggcgccagcaacacaccaggcccagctccctgcgtgactccatcctcagcaactcggggtagttagtgtaattaaccccctttccacattgggaagctgggcccaggcatatgtcatgtatctcccaaaggcactgctgttgtgactagtaagaggcatcgggatccgagctcaggtctcctgggttctgatcactccacctccctttttttaacgcctctcttctccctgcctgtgtctcagcatcaccatggccgtcatttcattcacatcagacacagcggcctctatttggtggtcacaacttcagaaaacgtttctcccttcagcctcctagaactgctctccaggtgaggagggttgggctgggcacctggtagctaggaggggtctgagaggaggagaaaatacacgctccaagtgtttcctcaggttggccacccttctgggcgattactgtggctccctgggcgaggggaccatctcccgcaatgtggctctggtatacgaactcctggatgaagtgctggtgagaatcaacaatccccttctgtggcccctacccaattcccctgaagatacatctgctcttctactgtgggatgccgtggttaggaggccaagtctacctttttttttttttttttttttgcttttagagacagggtcttgctctgttgcccaggctggactgcagtggtgcagttatagctcactgcagcctggaactcctgggctcaagccgtcctcctgccccagcctcccctgtgcctagctaattgtttattttttgtagagactagagtctcactgtgttgcccaggctggtcttgaactcatggcctcaagccattctcctacgtctcggccttccaaagcgctgagagtacaggagtgagtcaccatgcctggccccactccccctctttaccccttcc

SEQ ID NO: 15807 - DNA, 1146 bp, Homo sapiens
ggaaacgatctacaagaactactaccgaatccaattgaagccagagcagttcagttcctacctgacatccccagacgtgggcttctccagctatgagcttgtggccacaccccacaacacctctaaaggtaaggctggtttattttgtcagggaggctggtcctggctgaaagagtgcagacccccatggggattcttgaggtgctgccaaccccttctgatcactctctctcccctcaggcttccagcgtcctgtgtacctgttccacaaggcccgatcccccagccactaagtggccccctaaacagaaagtgtgaagaggctgccctcgctgctcataaggacctgggggaagaggaaagtgtcccaaggtctttcctttctgactccaaaaatagtttcctttcttggatctgcaaagaaagcttttcttccgtcgctgcctcagcctcctccctatgcctctggcacctgcgcagcaaggctggctgtgctggagtcaccatcatcttcctctcccccagcctcccaggctggatggcatggactgtttgctgacctctgttctcttagggcatgggaggtgggaggatatcaaattctctagccctttcctcctattctcccaaggagagagattcccatttctcctcggccattgtacctagctcttgtccctagctgcatttcagtggaccatggatagagggactgagggttagacggggaagactggcagggaggcacgcaggtactgtgaaaatccttccctttgccctcccccagtgggagagggggttgggttttcaatgtgagaacagcacaataaacttgatgtctagggcagtggcccccacacctgtctcggtactgtctagctggtgggggatgggtggtgcctcccaccagaacctgtgctgtttatcttccatctcaaggaagacacgtttttcagtggttgagctgattgttgaacactagtcaagtccacacgcaagtacacagaagcctagtcaggaaaaggtgtgtaatgcaaattttggtgtggaacttggagtctgccttccctccccagaaaaaccccgtagacgttttgggcagaaggctaactttttggtttttgtttttctgagatggagatttgt

SEQ ID NO: 15808 - DNA, 1229 bp, Homo sapiens
ctttgatgctgcgaaggccgtggaggaacagctgagaaagtcgttccagatccgctgcggcctggaggagagcgtgtccgagggtgaggggggcgggcggccggccgcgtgcgggagtcggggtgaggcgcgccactcacctccgtccccgctgcgctctcagggctgaacgtgccgcgctccaagcggctcttccgggacctggtgagcctgcaggtgccggaggaacaggttctgaatgccgcgctcagggagaaattggctctcctgccgccacaggctcgagccccgcacccaaaggtgatggggtctgggcgtggggcttcctccatgtacccccttacccggatccttcctcccaaagtgtaaccttgctttgggcccaacctcccaacaggagccacctgggcctgggccagacatgaccatcttgtgtgacccagaaacgctattttatgaatctccacacctgaccctggacggtctgccccctctccgacttcaactccggccccgcccttcagaggacaccttcctcatgcaccggacactgaggcgatgggaagcgtagaccccaaagatccctggagggctagttcgtatttttgtgttaaactatttgttagaataaagtaattttgctaataaatgggactcttcttggaggcctaaaatggggttaaaagctctctagggggttatccacttagcctcaggttggaagctgcctggaagtcgggtttgggggcctttttggaacttggtagagtcatggcaagtggaaaacactgtccacgttagaggtttacttagatacccctccgttcacaaccttacctgcctctccctgacttcagccacagctactgcctgtttttgatcaggtagcgattgttctctgcatcacttattctgatctctcaaaatgcagagcccagcctatcacacttcacgaaaaccttccatgattacctgtctcaaggagcttgcaagccagctgtctgcactgagttactgaaattatctccttgctttttacctttaagagccttgcccatcctgtttacacctgacctgaatactcagtatgttcgaagttccagtaacacctaacaagcccccgaagagcttcatgttgttaattgcctgtaagtctgattccacagcacaaaaaaggtgctggcccgtccctgggcatttgatccaaagcacttttgcctacctccacc

SEQ ID NO: 15809 - DNA, 1195 bp, Homo sapiens
gcttggacaacatagcaagaccatctacaaacaacttaaaaattagccgggcatggtagcatgaacccatagtcccagctacttaggaagctaaggcaggaggatcacctgaggccaagagttccagaccagcctggacaacgtagtgagactccatctctacaaaaaataaaagataattaaaaaaaaaaagtagatacatcttccttgttcaggcttctccctggaggacctgggctgggcaggagtgggggctgcagcatctgatgagtcttgtttctcagacccccgccagcaactggccaccagctccttcctcctcttcttgctgacggggattgtgtctgtggccttcctgctgctcccactcccggacgaactcggcagccagctgcctcaagtcctgcacgtctccctgggacaaaagttggtggccgcctacgtcttgggtgaggacagtagtggccagggacccaggccccaggaaaaagggagaagggacgggaggagagctaacagagccccagggctgcccatgcgaccctattctttctttgtcccccctccaggcctcctcaccatggtgttcctccggacctgagctccgtgctcaacccccagcccaccccaccctccctgggcagggtcttgaggcagccactgtgatgctcataccttaccttgcctcctaccctcttctctttcctgcctactccccactcctccctgacaaaaaacacccagggatttgtactcattttccaagttgaataaaatacatttttaaaatgataatcagaaatgtagggtacttgcccctgtcttcccacttcttttttggtactcagacatcctctagttctcccacccctgttcccaggggacccaggcacttggggcagtgatgaggcccagcgaggatttagaagagttaggtcactcctggtgcttgcgctgaaaaactatgtgaccatgagcaaattatttaatttctctgagctgtagattctacctacaaaatgagagcattgggcaagttgattctcaagatccccttcagccctggaataggatcctgtccctaagccaatgtattaacctaaaaagaaatgaatgaaaataccacctaatcctgcctgcggtggaactcctgtcccaccatctggaggcaacaaagcctttcaccagggttacc

SEQ ID NO: 15810 - DNA, 1309 bp, Homo sapiens
ccatgtgccgacagaccttcatcggccatgaatccgacatcaatgcagtggctgtgagttttggggcgagctaggccaggccctccccaccaggctcccggccctgctcctcaccctcaccctcaccccatctgggtcccgtgtcctgcagttcttccccaacggctacgccttcaccaccggctctgacgacgccacgtgccgcctcttcgacctgcgggccgatcaggagctcctcatgtactcccatgacaacatcatctgtggcatcacctctgttgccttctcgcgcagcggacggctgctgctcgctggctacgacgacttcaactgcaacatctgggatgccatgaagggcgaccgtgcaggtgacagctggggcccaggctgggtgggcagggacctggagcccaggcccaatgggttctgacttctctcttcttcacaggagtcctcgctggccacgacaaccgcgtgagctgcctcggggtcaccgacgatggcatggctgtggccacgggctcctgggactccttcctcaagatctggaactaatggccccacccccactgggcccaggccaggaggggccctgcccatgcccacactacaggccagggctgcggggctggcgcaatcccagcccccttccccgggccacggggccttgggtccctgccctcccacccaggtttggttcctcccggggcccccactgtggagataagaaggggatggaatgggggaagaggaggagcaggaggccctcatccttctgctgccctggggttggggcctcacccctctggagggccggaggcaggaggtggaaaccccaggggctggcttttttaaaactggttttattttaatttttattatattttcagtttttccataaaggagccaattccaactctgtacctggtctctgcccttgctgtgttctccttgtttctggactttgttgcctgagggctgctgagggggtggatggtggggaaggtatggggcctgccaggcagctggggctgggggtggggtccccactctccctcagagcaaagctgaagccccagcccagagccttccgtccagaggttctcggataagcagccctcaccatggtttcccccgtcaggctgctgaccagagccagcctgaccaggcgggcactgctcagagctcctagttcccagctctgtgcagagccactcatccccatggctctccccagataacgagcagtggaggcggaacgggagaacacacaccaagttttattgggagaagggagtatttacaggag

SEQ ID NO: 15811 - DNA, 1174 bp, Homo sapiens
cagctggctgggtggacaaccctcgccaggtcccctcaccatgtccccctcttaggtgcggcagcaggagctattgctgaagttgctacagcagcagcaggcggtccctgtgccccccgcacccagctccccgcccccactctgggctggcctggccaagcaggggctgtccatgaagacgctcctggagttgcagctggagggcgagcggcagctgcacaaacagcccccacctcgggagccagctcgggcccaggcccccaaccaccgagtggtgagcaggccgggaacctcccgggctccccctacagtttccagggtggcacagggagggggatactgaacccagacttgtgcagccccagccccagtcccagcctctcctgtgatggcaacagctcttgtggccctcacctcacctgtctccctttgccacctaaacaagcctccccatccgcttttctggggtgcctttgtttgagccactctgatcttctgccatctgtagcagcttgggggcctgggcactgcccccctgaaccagtgggtgtctgaggctgggccactgtggggcgggccagacaagagtgggggcggcagcagcggcctggggctctgggaggacacccccaagagcggcgggagcctggtccgtggcctcggcctgaagaacagccggagcagcccatctctcaggtgggcgtggcacctggaggctccgggatggccctgagggggaaggtggcagacccccccaacccctgccagctgatttccaaccctgactcaccctcccccttcagtgactcatacagccacctatcgggtcggcccattcgcaaaaagacggaggaagaagagaagctgctgaagctgctgcagggcattcccaggccccaggacggcttcacccagtggtgcgagcagatgctgcacacgctgagcgccacgggcagcctggacggtgggcgagcggctcccaggaggtgggcgggacctgggtctccagacccggccagggggccctgacagccttcgctcatcctgcagtgcccatggctgtagcgatcctcaaggaggtggaatccccctatgatgtccacgattatatccgttcctgcctgggggacacgctggaagccaaagaatttgccaaacaattcctggagcggag

SEQ ID NO: 15812 - DNA, 1217 bp, Homo sapiens
gaaggatgttgaaagtctaacaaatgtaaaatggcttcaaactcacagaataatgcttgcgagtttgggatggttactgctaccgtgcgcacctccagtcttgcatagtgtcaaggatgtcggggcacgctgtcggagcagcttcctccttcttttccctggctggagcccaaggctgggcaagtgggcaaaagggatcacaggaggtaaagagtgaaaatcctttgaaaactgttaacttgtagacaattgccaagcggtggtgtgatttgctgggatggctcagagaggagagagctgggataaccgaccagccgcgaagaatgcgggtttgcatctcttttttaagcctcagcgtcctcaccctaccacgcttggagaatctccatcctgagaaagggccaggtcccctccagcaggcctggggctgggcggttgttccagtgttgaggaattggggactgtgcttctgtttaagtggctctgttctgtgccaaggcacagtgctctgtgttggagctaattttaggggtgatggagtgaggagataatgttcttagctgaatgtgcactgggaccgcctgttctctgtcttttctttctctcttgagttctgagccccagagagcaggctccctttcccgcgcgccctggcgcctactggagcacccgggcccagcgtgtcctcgccccttgtctccggcagggggcagtctttcaaaagcattgattcagatgctgggggagtgagggtagacaggcccgagaaagagaaggggtggggaaggggcgaggagccgaagtaggccgaggcttgagggcagggccagggcgggggacaggctggaaggggcctgtgagaaggagaccctgagctgagaaagctcagccgggtaagctgagacgggcaggtggcagtaccccagcccccgccacctcctgctcttaccttcattggacagggatcagatacctggccctgagagcttgcaatagacaaacttaggcagtttttcttaaaaaaaaaaaatctattcttttctcaaagattttctcctggcaggatttcagatttccctcgtgggacagtgtaattagggaatgatgtccctgctgttcagagaggagaatgacccagcgtgcacacacctgccttcccttgccttccccttggcccagtagacccccaagggctgtgcccatgctcgtggcgcaga

SEQ ID NO: 15813 - DNA, 1219 bp, Homo sapiens
tttgtggttgtgagaggaagggggatatgccctgtctttcctgggccccttcccacatcctggccttggcttccaataactgttttgtctttccctcccccgcttcgttcccaggtttcggtctaagtaccacccagatgaggtggggaagcgtcggcaggaggcccggggggccctgcaaaaccgactgagggtcttcctgtccctcatggagactggctggtttgataaccttctcctggacatagacaaagctgatgccattgtcaagatgctggatgcaggtgtgcggatttggaggggtggcaggcatctgggccccatgggggtgggggtgtctggggatcaggtagaagccggttgacaggagccagggccctggggtcatgacctctgttccctttgttggtagccgtgattaagatggaaggaggcacggagaatgatcttcgcatcctggagcaggaggaggaggaggagcaggcaggaaagcctggggagcccagcaagaaagaagaaggacgggctggagcaggcctaggggacggggagcgcaaaaccaacgacaaggatgagaagaaggaagacggcaagcaggtccgagccctgggtctcctagtgttgtccctggcagcctgggggaggggggcgggtaggggtccataggagctagaagtagggggctggggaaaatgaacctgtggcctcagctgtgggggtgggggccctctgataaaggtgggaggggaggtttgacatccccagtggttgtctcttaccataggctgagaatgacagttctaatgatgacaaaacaaagaagtcggagggtgatggggacaaggaagagaagaaagaagactccgagaaggaagccaaaaaggtgaggtgtctgtggcctggggtcagagtgttggggctggggttctggcacgctgacttgtcccctctgctgtggctcacacagagtagcaagaagcggaaccggaagcacagtggtgacgacagctttgacgagggcagcgtgtcagagtctgagtcggagtcagagagcggccaggctgaggaggagaaggaggaggccggtagggtttcttttctgctttaaagtgcgttctcctaatgcgggtggggaggtgagaggttggcgacattgacgggagggtgggtggcttttaggggaaagcttctgtatcctccccaccacaatcagtaataa

SEQ ID NO: 15814 - DNA, 1190 bp, Homo sapiens
acatcaacggcatcacccagcacaagcagattgtgcgcaacgacatcaagctggcggccaagctgatccacacgctggatgacaggacacagctttgggcctcagaaccagggacgcctcccctgcccacggtcagtgactccccaaaggactttgtcagaagcaactggtagtgcctctgctgtgggcacctctgaccttacctatctgtagccttgaacccttgcacccactcgcctgctcactcatttgccccttcgtgtgtgggtagcagcacctccagattccagcagaactggggggatgctagtgatcatttgtggctggggtggaacaaaagctaaaataaagacaaatctcaagggggcaaaaggtgccatttatgtccggtgaactcctgtcccctcgctgctctttcacttgtggaaagtctcaggttacctcctctgaaggtcttctctgccttacttgcttctcttcctcccatcagagcctgccctcgcaaaacccgatcttgaagaatatcaccgactacctgatcgaggaagtaagcgccgaggaggaggagctgctggggagcagcgggggcgctcctcctgaggagcctcctaaggaagggaacccggcagagatcaacgtggagcgggatgagaagttgattaaggtgccagtggcagcgcggggcacgtgggggctcgggcggtgagggcaggagctgaacgctcgcattcacttcccttaggtcttggacaagctcctcctttacctgcgcatcgtgcattccttggattattacaacacctgtgagtaccccaacgaggacgagatgcccaatcgctgtgggatcatccacgttcgggggcccatgccacccaaccgcatcagtcacggggaaggtgagctccaggttcccctttgttcccggctgcccctggccttggtcctccagccccttgccaccatccttccttctggctcccttgccaaccttccttcctctgttcccaaaccacagtgctggagtggcagaagacttttgaggagaagctcacgccgttgctgagtgtgcgggagtcactctcagaggaagaggcccagaagatggggcgcaaagacccagagcaggaagtggagaagttcgtcacctccaacacgcaggaactgggcaaggataagtggctgtgtcctct

SEQ ID NO: 15815 - DNA, 1167 bp, Homo sapiens
cgaggagtttgagtctgcagtgagctatgatcgcaccactgcattccagaccccatctcgaaaaaaaaaaaaaaaaaaaaaaacagaaacaacagaaaaagcaggttatccatcacttctcagctaagatcaagtgttaaaataaataaataaataaataaataaataaataaataaataccaagttatgagtgtcagagcaggggagccctccacgcagccacggagccagtctgagggaagaggtacataggatagaaaaatctctaggctccaacgcttctgcttcggtgtctttccatttcccagggtctatgtgttgccttctcttcattttccagcaaaattccttttgagatatgttggccttcactcggctgaactagggggtgaaggaaggttgtcctctgtgggccactattgctggggaaacagctaaaccctgcaggccaagtggaacttggaggtgccaagaaaacctagaaggtgcaatggggctgcgacggatagaggtgtcaaaccagaagggaggaacccgtcggaggtgggctgtgaccaccggaccttttcataagtggtggcagtggtagaattgagggggcaagtaggcttggagaatgtttttagccaggggctgttgagagatggcagaagggggtcttaatgtggggactgtggacagtggggcattcgtgggaaccagagggattttggacaagtccagatggaatgtgcagggcataggtagagggaaaagaaaatccctttctgggaaaaccatttcttgtttattgaaacaatgcaggacatcatcaaagtccgggtggacacattccattatctacaaattacaaaggtaggcacagcaaagaataatgaagattataagaaaaccaagcgccaggcacggtgactcaagcctgtaatcccagcactctgggaggctggggtgggtggatcactcaaggtcaggagttcgagaccagcctggccaacatggagaaaccccatctctactaaaaatacaaaaattagctaggcgtgggagcgggcgtctgtaatcccagctacttgggaggctgaggcaggagaatcatttgaacccaggaggtggaagttgcagtgagctcagatcgcaccattgcactccagcctgggtaacaagaa

SEQ ID NO: 15816 - DNA, 1118 bp, Homo sapiens
caggctggagtgcagtggcatgatcatagcttactgtagctgctgcttcttctttttttttttttttttttttttttttgagacggagtctcgctctgtcaccaaggctggagtgcagtggtgtgatcttggctcactgcaacctctgtctcccaggttcaagtgatcctcctgccccagcctcccaagtagctgagattacaggcgttcaccaccatgttcagctaattttttgtattttcagtagagacaggtttttcccatgctggccagcctggttttgaactcctaacctcaagcaatcccgcccgccttggcctcccaaaattctgggattacgggcatgagccactgcacctggccaagtatcatgaatctttatgtttactttaaatctgctgacagcctggttcatctgggctcactgttttggccatggagaataacatctgaaccagtaactatgtgaatattccagaagtttggttttcagagtttgacaaacagccatcaccttggctacagagataagtgagaaaggggggaaacagacctgttgtattaactctttcctcccactcttgaaaaagatatctccagacccagatagtttcactggagaagtctactcatagttaaagaaatatcgacactaattacacgtaatctccagaaaacagaagaaggaccacttcctgactgacgaggccaatacagttgacccttatagctgcaggttccccatgcatggattcagccaaccacagatcgaaaattttccgagatatggacgccaggcgcggtggctcatgcctgtaatcccgagaatcgtttgaacccaggaggcggaggttgcagtgagccaagattgcgccactgtatcactgcactccagcctggatgacaacagtgaaactccatctcaaaaacaaaacaaaaaaaaaccagaatatcaccctaggtgggcatggtggctcacaactctaatctcaacattgtgggaggccgaggagaaaggatcgcttgagcccaggaggttgagaccagcctgggcaacatagcaagacactgtctctacaaaaaaattaaaaaattagctgggtgtggtggtgcacctg

SEQ ID NO: 15817 - DNA, 1162 bp, Homo sapiens
tccatgggatccaggagcctgcagtcaccgatgagcctggaggaccacaaggtggccagggcccttggagagctgtgctgcggaatcgtaaagctaccatccggagctggccgtcccagagggaaggcttggtcatctcttcccctccacctggtcctcagccctggtcccgcagtttgtcatcccgcagtttgtcagcatcgatgtgggactgggagaggaaggatattgccagttatggttgaatgtcattgtcaggggagtaagaagtagtttgtgattgttttacgtggctctgtgttggtatataattatgctgtcatcttaaaacgccctgataccttaatgaaatctgtgtgtgtgtgtgtgtgtgtgtgtgtgtgtgtgtgtgtgtgtgtgcgcgcgcgcgcgcagttagtcttcggggctgcttattgtgtgtgagagccaagtctttctaacacacgagctgagtgcgtcgtcttttacttgtttcaaaactgcccattcgaaacaggtcgcaatccattataaatgcagctgccagattaatcttcccgaaccattgatttcatcatgccattcctctccttaaacatccatggtggcccacttaggcacagagtggagaccacatttcttagggtagcagacagagttcctgatagtcctttctgccccacctaaaccttttccatcccagctagaatgactccagaatcttgcttatttgggggagctccctcctcctccctctgtacatctgagcttcaagcctacttcagaatttttttgtttttttttgtttttgattttttgaggcagggtcttgctctgttgccggctggagtgcagtggtgagatcatagttcactgaagccttgacctcccgggctcaagcaatccttccacctcagcctcccgggtagctgggactataggcatgcaccaccacgcctggctgatttttccatttttttttttagagacagggttttgccctgttccccaggctggtcttgagctcctgggctccagtaatcctccctccttggtctcctaaagtactgggattatagaggtgaaccactgcgcccggccttcaagcctatttcatgcattcctttttcttttgcccctgtgtgcccggcagtagtgatgg

SEQ ID NO: 15818 - DNA, 1498 bp, Homo sapiens
agccttcagatttaatgctccaatgaacagagcaaagactggggcattcaacatcagtgagaattaacccccacatgaccacagcagtgccctctgattttcctaaagagggttgggaaaaaataaaaattatgtagtgttggccgggtaaggtggctcacacctgtaactccatcactttgggaggctgagatgggtggatcacctgaggtcaggagttcgagaccagtctggccaacatagcaaaaccccatctctactaaaaacacaaaaattagctgggcgtggtgacgggagcttgtaatcccagctacttgggaggctgaggcaggagaatcgcttgaacccaggaggcagaggttgcagtgagctgaaatcacgccactgcactccagcctgggcaacagagcaagactccatcttataaaaaaaattatgtagtgttgagaatccttgctatccaaatagcctgaagcacaaaagcacagcttattcttgaaattttatggaatagcctatattttgacctttttgcttcttctaagttggacgatgtgtgcttcgaagcatttctgtgatcttcccacccttaaaaaaaaaatctctgcaggctgggagtggtggctcacgcctgtaatcccagcactttgggagactgtggtgggcagattgcctgaggtcaggagttcaagaccggcctggccaacatgatgaaaccctgtctctactgaaaatacgaaaattagccgggcgtggtggtacacgcctgtagtcccagctactcagaaagctgagtcagcgagatcatgccactgcatttcagcctggtcaacagagtgagactccatctcaaaaaaaaaaaaaaaaaactctccagtttgtaggatttaatgaatatatagatgaccggctgttctgcggtttccgtggaaagcccaaatgtaattagaaatccaatttccgatcgatttttccaatggaaaaaggaccagttgtgttaagtggctaattctttttttatgcagatggttgattgtcattttcttatagtagctttctgaatttttgcagacgtcaaaactaagaaaaagttgtatataaaaattgctcaattggccaggtgcagtggctcacgcctctaatcctaacattttgggaggccgaggcaggagggtcgtttgaggccaggaattcaagaccagcctgggcaaaacagcaagacataatttctgtttaaaaaaaaaaaaaaaagtttgaacataaaaactgctcaaatttaagtacattaaagaaggacagagtctttagtaaatggtagaataacaagccaactatgtagaagccagtagaatcagagctgagccccatgcaaaataaaatctatttagttatttttatttattttttattttatttatttattttttttttttgagacagggtcttgctgtctcacccaggctgaagtgcagtggcgtgatcttggctcactgcaacc

SEQ ID NO: 15819 - DNA, 1293 bp, Homo sapiens
ctacccctactcccggtatccactacctcctagccccaccccatcacatggtacacaccccccttccccaacacacacactcggcctcagcaaagcttcccgtgtcccccaggttcgctgaccacctgcacaagttccacgagaatgacaacggggctgcggctggtgacttgtggcagtgataccccggggcctcccccgtgacagtgacggctgcgcctccaccccgactgctcagtgcatctaatcacttagactcccctgaagaatcccccatggaaactgcccttatccgctgtccagcagctgccagaggccccaggtcacctcgggtccccttgaaagaatgtctcggtcacatcaggcccgctaggtccagagagcgagcccccaatgcccggccaggctaagccgcagagaccctctcagcccccacctcaggttagggctctgcccgcagcctgacctctagccctggtggcagaggtccctcagctgcgaggctaattgggtgaccaccgattccagctgcggttaatccagcttgggcctgtctgcactgcgatcctcttgggctctcctaggatccccccatgccccgtaagaggtggaagacgcttccttccaggacagcaggctttgagtccagcacccccagcctgcctttgccaccagccccaccctgcagagtatatgaggcttgacagagtctgccccctcccccactgcaccccaagagagagagccccagccagcggaacagtttctattaccccctccctgcccccagacccatgtgatttctgctttcttctttagcaagatattctggtttctagataaggaagagtctctaatgagcccccgagccccagtctcttcagactcatggattggtctgaggggtctgaacgtctcctagccaatcagaactggctgtggaccaccctagcacggccacctctcagggccactggcaggccttcctgagttagatttgtagttgcatatttagctttgcacatttgaaataaaccacggttgcagccaccctggtgccctgtgctctgggacgctggagggactggaggctggtggggatgcctgcggtgccacccctgggagctggggctggcctcacagctgggcacacagaacattcctccccctcttctcatctccaggaattccatgagtacattcagagctctgctgaaacccagatccagtgtccgagtgcttttgagaggacaagtagcaccatcaaaaagggaaacccattcctttattcaa

SEQ ID NO: 15820 - DNA, 1155 bp, Homo sapiens
gccatggcccaaggcctgacggagaagctgcgatagtaccctccccgcgctgggactaggggccgggcgcgtgcgggcgttgtcccggcaaccagggggcggggctgggcgtggcaccgccccgcgctccgctgccaggggcgggagggaggaatggttgcttcacgccccgggggaagagacgggaagctcggctctgggttgcgggccccggcgtctccgcgtggggcgcaccgtccgacccccccctcccggtgtgcagcgccccgcaccgccccgcctcgcctgggagaagccgccgggacgcgccgggctggagtgggcggttataggctttgagctaggccgtttccgggaggcggagctcagaccccatttcctttctccacatccaggtcaggtggcgtttgctgtggcggctaggcccgcgtgcgctggagacctccgcgctggcccccgcgagcctcctgccctggcccggcgctgcggctctgccgcggcggcagcatgggtggcccccggggcgcgggctgggtggcggcgggcctgctgctcggcgcgggcgcctgctactgcatttacaggctgacccggggtcggcggcggggcgaccgcgagctcgggatacgctcttcgaagtccgcaggtgggaccccggggtttccggcaggtgggcggggactgggcaggggggctccccaggccggggtggtggcttgcgtgtgctcggggtaaaatgaggagccgagctagagggagaggcagtacttgtgtgagtgcagggtgctgcgccgcccccgccgcccctttgctgactatactggtatgaaaacttgccctggctttcctgcctgagctccgcgtcacagcggaggattagatttcttaaaaacctgttgatggcctctcattttaaagcttgctccgggcctttgtgtaactaaagggattctcccgattgtggaagggctgttgaggggcccagagccataggtcaatctctgcttgcaggtgccctggaagaagggacgtcagagggtcagttgtgcgggcgctcggcccggcctcagacgggaggtacctgggagtcacagtggtccaagacctcgcagcctggtgtgtgttttggaaatgggaacagttgtctgcgcgaga

SEQ ID NO: 15821 - DNA, 1169 bp, Homo sapiens
atatataaaatagtgtgatcaatcacaatgtccatctttagacagttggttaaataaattatctggtctttgaaaagaccgtgctgggcgcggtggctcttgcctgtaatcccagcactttgggaggctgaggcgggcagatcacctgagatcgggagtttgagaccaagcctgaccaatatggagaaaccctgtctctactaagaacacaaaattagctgggcatggtggtgcatgcctgtaatcccagctacttgggaggccgaggcaggagaattgcttgaacccgggaggcagaggttgcagtgagctgagatagcgccattgcactccagcctgggcaacaagagcaaaactctgtctcaaaaaaaaaaaaaaatgatggagctccgaatgtgcttaagtggaaagatatctatgaaatatggtggttttttaaaacacaaaaattatagaatatgggatcccgtgtgtgtgtgtgtgtgtttgaatgaaaaatgcttatgtattgacagaacacttctagaatgatacccaaactcctggagtgggagtggggaatgccttctacgtacacactgttctactgtttgaattttttaatatgagcccaaattgtataatctttttttaataaaggggagaaaaatcacttacaaggttatacatattttttcccttgacagtactttattaattttcatccatattttacttgactaaaaatacaatgtatgaaaatttatctttaatagcattttccataagctactataacaatttattgatacatctgggattcagccaggtcttatagtatttaaatttataacccctgccatgcttagcattaagtaaatcagtatgcaagcagtatttaaggcaaagctttaagaatactttaaatttcatttgtaaatacatagatgcaagactgtttccataggaagtcacaaatcctcaaacagaaatatgtgtgttctcaatgttaccctgatacagaaatcaaacttggaagaaatatttttacattagaaaaaggactcagtataaggtgaaaacaaaattcccagtgggctagacatgaacaaaagtattcattccccaaaaggcacatttctttataacggttttttcaaatctacctccctatttaatgaaagcatatt

SEQ ID NO: 15822 - DNA, 1219 bp, Homo sapiens
ctcgaactcctgacctcaaatgatccacctgcctcggcctcccaaaatgctgggattacaggcatgagtcaccatgcctggcccctgttaaactttctacctagcaatgtggttagtcttcccatcccactgtatagcagtttcaggatgatgctgcctctctaacttggagtgctgaacaggaagtaagagttggctttacggtaggcagctgccaggctagcataaattctggcataccagaaaatccctttgatccttcctaaatgcttgtcttactttgtgccaaatgactaatgatttaaagcagtggttctcaaccctgcctgtatatcagaaacacccacagaacttttaaaaattatctagagaaactgccccacctgacattttgattcagtagcctctggtgtagtttaaaaagctccacaggggagctctttcctttcgctgctgtggctgcagccttgagtatgctcaggcttcagaagaggcttgcctctagtgtcctctgctgtggcaagaagaatatctggttagaccccaatgagaccaatgaaatcaccaatgccaactcccgtcagcagatccggaagctgatcaaagatgggctgatcatccgcaagcctgtgatggtccattcccccgcttgatgccggaaaaacaccttggcctgccggaagggcaggcatatgggcataggtaagcggaagggtacagccaatgcccgaatgccagagaaggtcacgtggatgaggagaatgaggattctgcaccggctgctcagaagataccgtgaatctaagaagattgatcgccgcatgtatcacagcctgtacctgaaggtgaagaggaatgtgttaaaaaacaagcagattctcatggaacacatccacaagctgaaggcagacaaggcccgcaagaagctcctggctgatcaggctgaggcccgcagatctaagaccaaggaagcacacaagagctatgaagagcacctccaggccaagaaggaggagatcatcaagactttgtccaaggaggaagagaccaagaaataaaagctgcccctttgtgtgtacatactggcctccgtgattacatagatcagccattaaagtaaaataagcctttatctgcttgcaaaaaaaaaaaaaaaaaaaaaaaaacaactccacaggtaattctgatgtacatttgaggtttcagggcttgtacccat

SEQ ID NO: 15823 - DNA, 1168 bp, Homo sapiens
ttctggccgaaaagccagtcatttgcattttgaacatcgacccatcttcctatcctctctctctttttttttttaaccatttccaaaccctgttgcttttcttgaacaatgaaaacccgagtgtcagttttgtcttgtgtgtaggtagttttacatagtttccctctctttttttttttcctgcttgttttctccataatgaatataaaacatttctaggagaggtagtgaaataaagtcaatttctctctgggtaatgataataattgctcatcttccctgagggaagggcatgtttataaacacgttgctggctttaggacagtggctggtgacagatgtttctaggccaggcagagatctcagtggaaccaaaattcaagaagaaagattcttttatagagacagcctatttaaaatagatttggttttaaaagcaacatttaatatcagattagtaatgtgttttgctttgtctcttccacttcctacccccaaccagtcattatattttggagagaacagattaagaagtacacaggctgctacccaagttgttctgaatgttcctgaaacaagagtaacatgtttagaaagtggactcagagtagcttcggaagactctgggctctcaacatgcacagtaagtgactcaggcaaccttctctaagtgacccttcatttagcgtagcaaattgttgattttaatctttagctttttcgttggctggtggttcaaaaagggtgacagttattttgccttgacagatttccatgagttgtgaaccttttcttccagtggtacttagttacagggtgcatatgtatcctgttgcattgtctgcatcttgttcttgtagcttattattgattatttattttcagtagtattgataataatgaaagaaatatgtttgcagggctactctgccaagtgtttttactgatgtcttatttgataaaaagcaattgtttgtagtgggcatcctcacacctgttttatagttaaggaagtgagagaagttaaatggttttgttcaggtaactcagctaatacatgacagagccaggatttcaaccgaagttttctgacagtctctgatgttcttgatactacagttattaattggctggattaatgagttgggcaaagaatcctcattgaagg

SEQ ID NO: 15824 - DNA, 1099 bp, Homo sapiens
tgtagaagatggcatcatcattcttaggtcattaactcatgaaatacaacattttccaactactactgtttttccacgttttttaggatgcgactctgtacaagtgtcacagaaagtgaggttgcacgagccagaaatcttctgaaaacaaacatgttgttgcagcttgatggtaaaaataaagatataggttctgttttcatatggttgatctgtattccaatagttaatttttccttctctttaaacaggttcaactccaatttgtgaagatattggtaggcaaatgttatgctataatagaaggattcccatccctgagcttgaagcaagaattgatgtaagtagtcctgagttactattgggtcatgtgtaaaaagatccttgttacaaaagctgagaatatgtatctttcatcttgctttagttttaaaaagttccaggtatagactttgtttttactacaaacagctgaatgacagtgtcttccatatttcaggctgtgaatgctgagacaattcgagaagtatgtaccaaatacatttataataggagtccagctattgctgctgttggtaagcctggcttcttttcttctatgcaaaaagttggccaagtacttttaattaactcttctttttaatccttaggtcccattaagcaactaccagattttaaacagatacgcagtaacatgtgttggcttcgtgattaaaatgctcctaatcaagattgtttgaacacatgtatttataaaacagagctagagaaaaataaaaatgaacatgtatatacatttggaaatttgaattaaatactgtatcatactttcaaaggataaaaagactacccctctgaaggttgttttgtattaatggtcagtctttgttctctgagaaattatgttggaagcagcatactttcaaattattaccatgagtataattttaagaatgaaaatgtttacagtattttcagttttattataaaaatgcacacacaacaaagattgtcatttcttggctctacttgcattcagcacttgttcttgagcagctttctttgcttttaccatctcgacaagttcctaggaagggag

SEQ ID NO: 15825 - DNA, 1197 bp, Homo sapiens
ttacttttttttagaaaggcaaacttcgtgcatggcaaaaaaaaaaaaaaattaaaatattgtgttcctaataacattttaaagaattaatgtcagtcctatcagggtgcatttgatagcactataggatttttagcattagtcatgaattattttgcatgtgctttccagaatcatacaaagctgagcaatctaggggtgagaatgctaacatattatctgtttttgtttttaggacggtgaactttgacataataaaatacttgtatgatttcttgtgaaaacaagcttcaaagccatatggacactgtgacaatgactaagccaagctgtgttcatccagctacttagctggccaaggagaggagttctttggctctattggatttgtccaaacaggtgctggcccagcatggaatctgatgaaaatattctgattggtctgggtggatgtgagcagaagactatttaccagggaccctggagtatttggaagcaacgtgttaattataaacagcagggtttgagcacaatctgttctactcttaatgatgttatcttaacactgaaattgcctgaaacccatttacttaggactacattttgctctgtgaactatcccctgcgctttgaacgtgccagcagcccttgtttatatgcccattcttttcacttcctctccacaggagcctctgcagtcgcttgccaaagcagattttcctaaggccactgttttaaaagatcatagttgcaaaatataataaatacaagttctttttaaaatccaagcttgtgtgtatttatcttttcacttgcttttctcaaaaggcaaggtagtttgatcagaaacagaccaactttccctctttcagcctacttgataactgtggtatgcttgtataaggtttatctggtcactttcttaaaattagctacccaacccagttttttttttttttatcagtatcatggttttattttctttctttctcttttttaaaatcactggcctttaagagttccacaataattttttttcctgttatatcacttgtgaactttggttttgattttcttgtccatatttttgaagaaattttcttttagcatttgaatgcttgaaaattattttaagcagacttaaagttcttagttatagaacctagtgtaaatttcagtggcattttatttcttcat

SEQ ID NO: 15826 - DNA, 1153 bp, Homo sapiens
ccgtatagatccgtccttgctgggctctgtcttaagaacgatacaatttaaagtcaaagaggaatcgctagagttagctctagagtaaacctcgttttgcctattttgttccctttttagagatgtgaataaggtaaggtgtttggagttctggagaccttggagagaattaagtgaggtgcattcaactcgaggctggagacatgaatacctatttggaaaatagtctgtttttttccttcaatttctgagatggggagtaaaaactgaaatttccctcttttgtcctttacagattctaaaaatggcggccccaggctgatgttgtggtaatctaatcagctcgggtcctccacaccccatgcagtgcgtttgtctgcagcatattacaggcttattatgtttacatgaaaagactgggctgtttttccttccccgagccagttacaaaaatgtgttgattttttactgcaaattacagtgctgtgttttagctgattaatttgattcgtttttcctgaaaggcaaataaaatgtctccacttttgaaaaaaaaaaacagccttgcaaatttcagtggtgatgatgggtgcgcttcaacattaaaaaaaaattatttgggtaccaataatagtttttgtttggtttaatccaaccatcttttattcaatatgccaaagtagattaaaatgtttagtaactgtataagtatcatctattttatatgattaaatgtttcaatctagagtaagacatttcccaaccacctcttgacccattttgtggattttggtttttgtattgtgttttagcttaaattttagggagctgtacaaacaagcttaaacctgttacttcattgggtgtagagatgccattatattttgccatccatttttcccatgtatttaagctttccttaagaattttcaaagtttattgtgtatttggtaaagtgaagcttcatgctgcctttaacaatcgtcttacagcatactatcatcattatgtaagttaaaagtaaggctccgattctggatttttttcctcttcaaatatgcccatttacctattataggattgtggaatttagtctgttttaatagaccttaaataaaaacattaccataatagggtcttgaatccattttat

SEQ ID NO: 15827 - DNA, 1604 bp, Homo sapiens
caagcacttcctggcaccacaagccagcaaacagttccaggacaccacgtgactccagggcattttttgccctctcagaaccctaccattcaccatcaaactgctgctgccgtagtcccccctcctcctccaccaccacctgctccaggaccgcaccttgtacaacagccgaattcccatcagcaacactctgtagcacatgtagtagggcctgttcatgcggtcacccctgggtcgcatattcattctcaaactgctggacaccacttacccccacccccaccccctcctggtcctgcccctcatcaccatccaccaccccatccatccacaggactccaaggtctacaagcacaacaccagcatgttgtaaattcagcacccccaccaccccctccgccgccaccttccagtgttttggcttctgggcatcataccacatcagctcaagccttacaccacccacctcatcaaggacctccactttttccttcgagtgctcatccaactgtaccaccgtatccctcacaagctacacatcataccactttgggaccgggaccccagcaccagccttctggaacagggccacattgtccattacctgtcacaggtcctcatctccagccccaaggaccaaacagtattccaacacctactgcttcagggttctgtcctcatcctggctctgtggccctgccacatggggttcaaggacctcagcaggcatctccagtgcctggacagattccaattcacagagcacaggtgccaccaacatttcaaaacaattaccatgggtcagggtggcattaaaatggactccaaaaacatttttttaaatgttctgtaagataaactgtatatttcatatgtacctgttaaggtactttttaaagcttgtacatgaacctttgtataaaaaacaccagtgctctttcgttgtatttttctcatttttgctttttaaaattcctttaaaaaatgtgctgttaagccagtattaggtatctttattttgtaagtgaacattccagctgtttttttctggcagatctgatgctgatttgatgctgtatgatcttttttttttttttagttaaattcatttagtgaatgttctattattttatacatacacattaagtactcagctaagtaatggcactatgaggattttttttttctttcctgtcagcagcagttctgtgaatgcatcttaggtataaaaatgcaatacagatttttatattttggtgtggacatggctcattttgttttaccagttatttgcaagcaaaatgtaatttaatgtatagatgatttctaatgtctcctgacaaactgtaaatactgcatttcttttgcgtatataattgcttacagcttttctcatttgatatatagcattgtacatatgacaagtcttttgcaaaactgtgtgatctttgtgaaagtagtacagtatatgacctttaatttcttttttattttaaatatactgtcacactgaagcactggttgggcattttaattcatgttaataaatcacaattatgtcagttttaccagattgtcctgtacaacttctaagatcgggatct

SEQ ID NO: 15828 - DNA, 1290 bp, Homo sapiens
ctgtctgcagctgccttcattttctgactgttttctttcttgccttgcagaaggcaaatacagggctctgaaaatggatttttctctacccccttctacttacgccaccatggccattcgagaagtgctaaaaatggataccagtatcaagaaccagacgcagctgaatacaacctggcttcgctgagcagtaccttgtccacagattagaaaacgtacacaagtgtttgcttcctggctccctgtgcatttttgtcttagttcagactcatatatggatttcaaatctttgtaataaaaattatttgtatttttaagtttttattagcttaaagaaataatttgcaatatttgtacatgtacacaaatcctgaggttcttaattttagctcagaatataaattagtcaaaatacacttcaggtgcttaaatcagagtaaaatgtcagctttacaataataaaaaaaggactttggtttaaagtagcaggtttaggttttgctacattctcaaaagacagcaggagtatttgacacatctgtgatggagtatacaacaatgcattttaagagcaaatgcaacaaaacaaatctggactatggataaataatttgagagctgccacccacaaatataaatacagtactcatgctgactgaaataataagacatctacaaatttataaacaaaaagtgattgtcattatcctgcttatgtactagattcaggcaagcattatagactttttggttgcggtggcttttgcatttatattatcaatgccttgcaggaacgttgcattgataggcccattttatttttttattttttttttcgagacaggatctcactctgtagcacaggctggattgcagtgcaatcctgcaattctcaatcttgcactgcagcctcgacctcccaggctccagtgactctcccacctcagcctcctaagtagctgggagtacaggcgcgcaccaccacgcctagctgatttttgtatttttttgtagagacgggggtttggccatgttgccgaggctaactcctgggattacaggcatgagctgtgctggccgggtttttttttcttgatgtaaacgtgtacagctgttttattagttaaggtctaatttttactctaggtgccttttatgttcagaactctttccactggactggtatttgctcaaaaataaataatggtagagaagaaaactataaaaatggacaaggctttcttctatcagtagcgtttaccctttgtcaccagtggctttggtatttcc

SEQ ID NO: 15829 - DNA, 1103 bp, Homo sapiens
gactacaggcacgtgtcaccatgcttggtaattgaaaacattttttgtaaagacgagttctcactatattacccaggctggtctcaaactcatgggcgcaagcagtcctcctgcgtcagcctcccaagtgctgggattacaggtgtgagccacctcacccagcgttgcatcagatttttttttttttttttttttttgagatggagtttcactcttgttgccctggctggagtgcaatggcgcgatttcagctcactgcaacccccacctcccgggttcaagtgattctcctgcctcagcctcccaagtagctaggattacaggtgctcgccaccatgccgggctaatttttttatttttagtggagatggggtttcaccatgtaggccaggctggtctcaaactcttgacctcaggcgctccacccacctcggcctcccgaagtgctgggattacaggcatgagccatcgcacctggctttgcatcagattttttttaaaggaaataaaacattacagataaagccttttccttactgaggtaaagttacatttttcctacctttcactattaaaaatagcacacaaatattcttctgcagtgtgtgaaggcttctctaagacctatcactagaaatgggaactattggaatgtgagatgttcatgttttccattgtaacctaggtattccaaattgttcagcaaaatgtctgtaacaagttagtctcccaccagcaataagtaagatttcctcttgctccatattgccaataacttgatgtttttggactattgccaatctgataagtttgaaattgtgtctttgatgctttaaaatttatgttactctgattgctatttaggttggtggtcctttcctgtatttattggccatttggtttccaccaccctgtactgcctattcatatcctttgcaaatttttctgtttggtgctttttcctgctgaattgacgtgctctttatgtattcttggtattaacctcttgacatttatagaggttgcaaatatcttctctctgttcctggcttgcattttcactttgtgatttttgtcatataaaagttctttatggccggggt

SEQ ID NO: 15830 - DNA, 1230 bp, Homo sapiens
ttatttgtttctaataaaagtaatggctttgtcaatatattggtgggtttaaaactttgctgcttttttacataaagcctgtgcctttcctagaaagttaagatgtaaatgtattctcacatgtaaatttgaaagttcaggggtctattatgaaatgatacacatttttaaatgaaccataatttttttcactaagctgtttgccttccaaagtgtttacaccttaagccttaacatgtatcttcattcagaaaacagttatattgtcataccatagtaggaagaaaaacctttatttggaatatacactactgtaagtttgtacagatcatatacctaccacctgtctttgcttaaagagccttgattacataaatatgtaggaaaaaacatattgagttcaaaatttatatctaacattgtttatgttatgatttttttttaattgcaaagactaggtgtatatttttttctgtttttctaaatgacccgtggtacttaataggtgtactaaaattgtgttgggagcagggatttggaaatttctgagagatgtgtagttaatttagtaattctgtttcatgagatatgatctgttatgctagtggtttaataggcttgctatgtaagtagaacgtggctcaactagatatctttatatgtatgggcattactcttagtgatatttgtttcctgtcctttgttgctcatgctgtttaagtgcaggctgagacccagcctctttgtaagtacagtaaaataatccaccgttttttacagaccctagtcaaagggttaaaaaaattaagattgctttccatgtttgaaatttaccattgagagtcaatgaagttgctattttgagtttagcattgatattgtgaaaataagtgcaatttggatttcatgtttcttaatattcattcttgtttcacaaatgaatgattaaggaattatgcatcataaaggaacctaagtgaggtatatgatgagtgtattgtctttgcacacacatataggtatattctgaatacaagcttattcacattttgcttcctaatctttttgttgtacagggattcaggtttcttattcttacaacatgattgtttatatgtgaagcacatcttgctgttgccttatttttgatgcttttattcatgacaagaattgtcaatataagaatgtatatcttttttgcaaccaatttaataaaggagttgaaagaaa

SEQ ID NO: 15831 - DNA, 1269 bp, Homo sapiens
atgtgtggggtttgtgttttatgatacattacagccaaattatttgttggtttatggacatactgccctttcattttttttcttttccagtgtttaggtgatctcaaattaggaaatgcatttaaccatgtaaaagatgagtgctaaagtaagctttttagggccctttgccaataggtagtcattcaatctggtattgatcttttcacaaataacagaactgagaaacttttatatataactgatgatcacataaaacagatttgcataaaattaccatgattgctttatgtttatatttaacttgtatttttgtacaaacaagattgtgtaagatatatttgaagtttcagtgatttaacagtctttccaacttttcatgatttttatgagcacagactttcaagaaaatacttgaaaataaattacattgccttttgtccattaatcagcaaataaaacatggccttaacaaagttgtttgtgttattgtacaatttgaaaattatgtcgggacataccctatagaattactaaccttactgccccttgtagaatatgtattaatcattctacattaaagaaaataatggttcttactggaatgtctaggcactgtacagttattatatatcttggttgttgtattgtaccagtgaaatgccaaatttgaaaggcctgtactgcaattttatatgtcagagattgcctgtggctctaatatgcacctcaagattttaaggagataatgtttttagagagaatttctgcttccactatagaatatatacataaatgtaaaatacttacaaaagtggaagtagtgtattttaaagtaattacacttctgaatttatttttcatattctatagttggtatgacttaaatgaattactggagtgggtagtgagtgtacttaaatgtttcaattctgttatattttttattaagtttttaaaaaattaaattggatattaaattgtatggacatcatttattaattttaaactgaatgccctcaataagtaatactgaagcacattcttaaatgaagataaattatctccaatgaaaagcatgacatgtgtttcaatagaagaatcttaagttggctaaattcaaagtgcttgacatcaaaatgttctagagtgattagctactagattctgaatcatacatcacatctgactagagaccagtttctttcgaatgattcttttatgtatgtagatctgttcttctgaggcagcggttggccaactatagcc

SEQ ID NO: 15832 - DNA, 1559 bp, Homo sapiens
tttactattagaaaatactgctttcttaaaggtgattttaaaaagctagctgatatctgatggctcaagcatccagaaaatgtatgcaatgataagacattgactaggatgaacagaaaagggatacaggaaaagtccgaacacatgaaattctaaattaaccaagaactgccaaaattcagttcagccaccctctcatctgactactgactgaccactatttttaaagaaattgtgaaaaatttaaacagatatgacctgcattttactaagaaacaggcacatgtacacaatgaatttaaaacatctttggccagccctcctactataaaaatattgatatcttcccttcatctttcaatgatacttcaaattgaccccactatatcacatgtaatttttttgcaattaatctaaaaacgctgaacctaaaagatgctagtttagtaatggaaaagttataagaaacaagtctatccaagatagcttatcatatagacttgtttgccaccattcctgggcctatttcttctcctccttgaaatttttcaatctagaaattctgtgccaatggcacaagtccccatgaatgacagctaacataccccaacacctccagccttattggtccctcaccaattaaggaaaaaaagctgttgagacaatcccaaaattattagagaaattttctactgtgatattaatggattaataatgcttatctttcaacccaactagaaacactgcattccaaaattatttttccaactcaatgtttagaacaaacattcttttgaagtttgcctgagatttcgacttgccatgctatgagagtaaatgacccttgaggaaaggcagtctttatatgatgatgtgataacattattaggttttgaagtataaaaatgctagagacagcatcaacacaacctcttaaaggttgtaacaactgctccaacatgccagtacacctgcacggataaggcaagataattttaaacactatttattgaaacatactgaattggttcttttcctcttccaacagtcaggatttaaacgtttctgttcttcagccaaagcctttgcttctaatgtgtacattcttctctcttcattcttcattttcttccacctgtcaccaaggatcacacttatggctctgtaaaataaatatttacacaatgctgaaagcacacatttttcataaatctcatgtcaagtgctgctacttcaggagaaaaatgtgaagttaaaaaagatgaaaatcttgtctatcacagagatgggaaaaggtcaaggccataatgctcatttccagtaaaatcccgaatcaaataatccattgttccgtatcagcagcatgaagtattcaacttgtactaaaagctaatctatttgtgcccgtaacctatcaaatagttttgataaaggtcttttctcattcaatcatagtggaagtgtagaattaactatgcatatcttactatttctctctcaagagaaaaccaaataaacctttagacagtattttttattacttgagaaaactggataaa

SEQ ID NO: 15833 - DNA, 2011 bp, Homo sapiens
tggggtcaatttgaagtatcattgaaagatgaagggaagatatcaatatttttatagtaggagggctggccaaagatgttttaaattcattgtgtacatgtgcctgtttcttagtaaaatgcaggtcatatctgtttaaatttttcacaatttctttaaaaatagtggtcagtcagtagtcagatgagagggtggctgaactgaattttggcagttcttggttaatttagaatttcatgtgttcggacttttcctgtatcccttttctgttcatcctagtcaatgtcttatcattgcatacattttctggatgcttgagccatcagatatcagctagctttttaaaatcacctttaagaaagcagtattttctaatagtaaatttataaacatcttatacatcttagctttcatatataggattactatgtattgatttgtaaacattcactgagtttaattttatttccacagggctcacaacaacattaaaccaggatgcttatgttcttaagtctatatttgcatatacattgactcttgatggaaagacttaagaagatcaaggtctcaccatttgtcctcaattcgtgtgaccataagatactgatagcattgagtcttgaaatgatttaataatatgagtgaggatttgctttctccattagagcattaagctaaaactatcaacattttaaaccaaattgccttatttttcttccaaacttcatatatgtctatcaggtaataataggcttgaaaattgatatcctgtggtgctaaagtacagtagaaagagaggagaagtgtatacatgttttattttaaattgtacgaaaggggaatttaaaaaatatgtaactgctgtttatacattggctccttactgcttattaatctgtattgtacacatgatgaaatgaagcagaagctgggagtcggcctttcctctagtaaccaccacatggctcagcatctgtgccaaacataggcgctcctagtctggtcagtgccaagaggctaccagaacatggggcaggtggctggtgttggtgtcccagcctaagagccacctgctgcagttaccatggcatgctgagttgatgcaccaggtggcagcagccatccgttattatttccaatggagacctagcccaggccaaggtaaagttagttaatagcattgggatatagtcactgtaatggtgctattaacaaacagtcaacaccattgtattttttaacttcgtgttctgtatctcctcagccatgtatcttaaatatattttgtcatcataatctttatggtgggggcagactttgcacttactgcagtgcaacacttgcactttaattttcctccaactgtctaaaattagagcaaatacattggcaatacagctgcttttgctctgagctacaatcatggcttttcatgttacttaccaagtggtgtttctggttaggaatcacagctgtaaaattgatttcagttcatcacacttcttcatgatgttgcccctaaattttgcacactatattcttgtatattatttcaaataaatggaaaaaaaagttgcttatctctgacgtctactgattgattgattgattgattaatcttggctgaattttatttatgagttctcagaataacaggttcaggagatgagatggaaaacataaggcaaattcctaacactgctaattaggaggctgctgataggattttaaaaattaaaaacaatgttaatagtggaacaagagccatcagaaaataaggacttagattatctactatttatagagaattgctatacaataaaaatttttatttttcacgtggcatttttgttacacggttaaacagcccaaaggtctgcttttaataacatgacaaagtgtaacaaaagccttgctttatttaaagatccagtatgacatacttaaaaaggccatttaaccttgtatcttagcttgggatgtgccagtggttcctcaactttgttgt

SEQ ID NO: 15834 - DNA, 1131 bp, Homo sapiens
gttaggaatttgccttatgttttccatctcatctcctgaacctgttattctgagaactcataaataaaattcagccaagattaatcaatcaatcaatcaatcagtagacgtcagagataagcaacttttttttccatttatttgaaataatatacaagaatatagtgtgcaaaatttaggggcaacatcatgaagaagtgtgatgaactgaaatcaattttacagctgtgattcctaaccagaaacaccacttggtaagtaacatgaaaagccatgattgtagctcagagcaaaagcagctgtattgccaatgtatttgctctaattttagacagttggaggaaaattaaagtgcaagtgttgcactgcagtaagtgcaaagtctgcccccaccataaagattatgatgacaaaatatatttaagatacatggctgaggagatacagaacacgaagttaaaaaatacaatggtgttgactgtttgttaatagcaccattacagtgactatatcccaatgctattaactaactttaccttggcctgggctaggtctccattggaaataataacggatggctgctgccacctggtgcatcaactcagcatgccatggtaactgcagcaggtggctcttaggctgggacaccaacaccagccacctgccccatgttctggtagcctcttggcactgaccagactaggagcgcctatgtttggcacagatgctgagccatgtggtggttactagaggaaaggccgactcccagcttctgcttcatttcatcatgtgtacaatacagattaataagcagtaaggagccaatgtataaacagcagttacatattttttaaattcccctttcgtacaatttaaaataaaacatgtatacacttctcctctctttctactgtactttagcaccacaggatatcaattttcaagcctattattacctgatagacatatatgaagtttggaagaaaaataaggcaatttggtttaaaatgttgatagttttagcttaatgctctaatggagaaagcaaatcctcactcatattattaaatcatttcaagactcaatgctatcagtatcttatggtcacacgaattgaggacaaatggtgag

SEQ ID NO: 15835 - DNA, 1215 bp, Homo sapiens
agacacttgcaatatactgtgtcaaaatgataattttgttatgttagcctctagaaaatttaagttcagaaaaatgcactatgaccggttcgtaatttttttaatgccacacataggttgtattgtaatggcattatcaaaatatttgatgatgtttcagatatattgcaaagtctgtattccagctcttaagaaaaatataagcatgttaaataccatatttacatattgataatgtcattggtatatggtggctgtttaccaataaaaggaaaaaattcattaaccggttgcttccaaaattagaagttttaagttgcatgaaaccattaatagccttgaaagctttgataagttttcagtaataataacctatttaatcagatgatgatgtgtttgaaaatagtgttcaatatcagcaaatttgtacacagggaatgtaaataaggataactgatcagagttatccactgtatttataaggaagagtcggaaaaaacaatgaccttagttttttttaagcctgatgatactatggtttactctaataagatagctatattgataattatatttttgttactgtgcccttgcacattttggtctttttgttaatatttttattaataacacataattagtaaccactctactgtttcaagttaatctagtaatagagcttacatatatttgtataactgctataccactgaactgaatttattttacaacagtgtagaattcttgaaaagttaacgtagaaaatatccaaaaagcagtatttctagaaagtgtccaaaaagcagtatttctttcccttggttgtgagagtaactaattatataaatattacctcaaaaatacatacactggtatcacacagtctttctacaatgtttctgtattctgaaagctaaatattaagtactatttttccattcaaatattcatttagaatttcctttagaagatggcagtgattataatattaatatgatttcatttgttccagtgtttagacatgaaatcatcttccttgtctcatgaaaacctaaatataaaaaaaaggaaaatactggagtttttatttctcttgtctttgttacatcctctgtttattataattttagcaccaacttcacacctagctaatttttttcatcataaagtggatgaaatgagcaagtacctaaaaattttatttcagataaaagt

SEQ ID NO: 15836 - DNA, 1130 bp, Homo sapiens
tttttcttgtgatacattttgttaacctgtgtaaaaggattaaatttcaatatggttgtaaaaatgctatttttatgtgaatttaagtgcagccacatactgttttttaaaccatatgttttaccactaatttcccaaagttataataaaatcctgaaagtaaaaatctactagaatttgctgtaaggcagactgttaaatgatagagaattatttcacattttaggcactgaaatgttgaggtttcgaggtatagtaagtatacaatgcacttcacttggatgccttttcatttttaggcagcctcaggagcaccaaaatacattggaattctagtactaagatatatttgttcgtaatgttaaaagacattactaattatttggaaagagatggccaaaataatcaactctacaggcttcaagctggtgggggaatgctgttactcattaatgcttttttactgaatggtcggaatcacatatgcaccacacatactgatcttaagtaacattattttatagaactgtttaaatgggtttaaatggtgttctttagatgaaatgtgttctgttttgttcattgtcttaaactgaatagggctgaataggctttatgtaattcttcatttcatggtagagtttgatgctgtgtttaagtgggttcttgtttataggattttcaactacagtttgaatgccatggaggaatttgaataatatattaatgaaggacatattcttgtaatcacaaatttgcatttgctcaggtttcattgctgtgtgataggatttttcctctaacttgaaatttaaaaacttttatttcctattccttttgtcggtaaagcagtctgaatttggaacattttatcatggagtcaacagtgaagactaccagataattttgtattggagaagaggaaataacagctaaattgtggatttcagtgctttacatggtgcctttcgagtcagcttttacattataggggcttgttatagtttagctaagatgaccacttaacagtttatacagaactcatatgtataaatcaacattcttaggatattatttatatcctttgaataaatccctgtgaagtttttcctccccactaaaatggtgca

SEQ ID NO: 15837 - DNA, 1276 bp, Homo sapiens
ccttggaagcaaatttacttggcttgttattttaaagggtgctggagaaatggtaaatgaagctgctcttgctttggaatatggagcatcctgtgaagatatagctagagtctgtcatgcacatccggtaattattaacaacatatagaattgatggttgcctaaattttcttctgacccacaaatatttggattttaattttaaatttcttcccttgcagaccttatcagaagcttttagagaagcaaatcttgctgcgtcatttggcaaatcaatcaacttttgaattagaagattatatatatttttttctgaaatttcctgggagcttttgtagaagtcacattcctgaacaggatattctcacagctccaagaatttctaggactgaattatgaaacttttggaaggtatttaataggtttggacaaaatggaatactcttatatctatattttacataaatttagtattttgtttcagtgcactaatgtgtaagacaaaaagctacttattgtagcatcctggaatatctccgtcaactcatattttcatgctgttcatgaaagattcaatgcccctgaatttaaatagcttttttctctgatacagaaaagttgaattttacatggctggagctagaatttgatatgtgaacagttgtgtttgaagcacagtgatcaagttatttttaatttggttttcacattggaaacaagtcagtcattcagatatgattcaaatgtctataaaccgaactgatgtaagtaaacggtctctcacttgttttatttaacctctaaattctttcattttaggggtagcatttgtgttgaagaggttttaaagcttccattgttgtctgcaactctgaagggtaattatatagttacccaaattaagagagtctatttacggaactcaaatacgtgggcattcaaatgtattacagtggggaatgaagatactgaaataaacgtcttaaatattcatttactggttatcatgagtacgtgttgagatggtcatagttttttttatgactacttctagtgtatattctaatttcttttctaggcctgaatgtatctttattttcatgttataggacaatattaaggcattttaaaggtcatcatcctttcatctattttagatacacctactaaatgtttaatatatacttttggagaagtacaacataagggagtctttaatctgtgttttccttggctgggttaatgactgtttatttaaagagtgttgtaaaattgg

SEQ ID NO: 15838 - DNA, 1135 bp, Homo sapiens
tttgacatagcatattgcaaattattgacacccatatctgcacctcattggactgtgtataacatatacaacatatagtccactggctgatactaaggaggtagtcatacctttattgaatgattaaatgaacgaatgaaggaacgagcactcaaacttgccactcatattacagtggacatggtgactaaatatacgaaagtgtgtttgctatttaggcctgtttataatcagcttctaaagagaaacagtttacttatccagtagggtggggaaaagtatacattttagaggttagacattttccttgcaagaagagtctctgtggaacagcttgaattatttgaaatccagccacagtctgaaatacaaaccatatgcagttcaagtttgtggcatgcagttgagtgacatttttacctgagattaaaaaaagtagagactaccaataaaaaacatcaaatgagatttttgctcctgcctttagacattccgtccagctgctatgctgatagaacgatcgtccgactttgggaaaacctggggtgtgtatagatacttcgcctatgactgtgaggcctcgtttccaggcatttcaactggccccatgaaaaaagtcgatgacataatttgtgattctcgatattctgacattgaaccctcaactgaaggagaggtttgtttgcttctgtgttttacattctacttgcaaatctactttttgattattgcagaagtaccaattactcttgtttccatttttaggtgatatttcgtgctttagatcctgctttcaaaatagaagatccttatagcccaaggatacagagtaagttcattttcaaacaaaagtgttttttgttagtttgtttgtttgttttgttttgttttttgagacagagttccgctcttgttgcccaggctggagtgcaatggtgcgatctctgctcattgcaacctccgcctcccgggttcaagtgattctcctgcctcagcctcctaagtagctggaattacaggcatgtgccaccacgcccagctaattttgtatttttagtagagacggggtttctccatgttggtcaggctagtcttgaactcccaacctcgggtgatctgctcacctcagcctccc

SEQ ID NO: 15839 - DNA, 1150 bp, Homo sapiens
cctgttgtcacctgccagcttgaccctggctggccatttgtcctccctgggccctgtcactgcatttatgatgcagtggccctttccctgaactacctaggtgggtgataccttcttccttgtgcaccttttaagcaattatcatatatttctgggatatttccctatagataatgagttaccttatatttacactcatgttatatatgacatgagcctctgcagcttcaactattccttaatccaggaccttttcttggggaggaaggatattttgctagataagcacacttttggagttccttagcagactgtgtgcttctatgggggtagaaactatacccaattcatcctggttttgcccttaacaggttggcaaactttgccttaggaatcatagcatctctgtcataactactcaactatgccattgtagagagtgcagccacagaggaggggtaaataaatgggtgtggctgtgctccaaggaaactttatttacataaacaaaggctgtgtcagattccacctgtgggctgtagtttgctgagccgtggcccaaaactatcaacataatctcaacaaatggttaaattttaaaaaaagattcagtaatatgtagtaaaaatgagcttgcattttcaagaaatgaccatacttggtataagacttcatattaatgtataggcttctaaacaactgaagaacttgggaaggtttggtaaattttccctaggtgtatcattgaaaaaaatatgttgtttttgaaactaccatacttccaattttatatctttcagctttactgagtttgggcttccccattaatgactgtctttttgttacaatcaatggcatctggaaaaatcacatataatcctaactaggtgagaaaaaagtagacatacatgatttccagctgttttttttttttttttgagacagagtttcactcttgtcgcccaggctgcagtgcaatggcatgatcttgggtcactgtaaccttcgcctcctgggttcaagcaattctcttgcctcagcctcccaagtagtggggattacaggtacctgccaccatgcctggctaatatttgtatttttagtagagagggggtttctccatgttggccaggctggtgtagaactcctg

SEQ ID NO: 15840 - DNA, 1228 bp, Homo sapiens
aaaattgtgatgagtatatgcttatgttctcataaatgaaggtctgtttagaagatcaaccacattcaataaggaattgtggggttcgacatgagttaactttgaaatacgtatgaattctggagaatcctgaaaaagacggtgcttcaaccagcttgcatagcacagagaatattcttggttacagaattcatatgggaactaggcttttaagatgttaataattagctaagctttagtaacccttactgtgctagtagattttagtagatattggtgttatattgtttgatgtttgaaaatatattaatatatgtgccgaacaagaaaccgaaagctatattgtactgtgtatttttactttagtcctcataatcatgttgaatttatgtgatcattgattttatttcatatggaaaagctaatttcttcttaaatttacattacctaatattctcactagctatgttctccaatccacactgccttttattgtaatatcatctaaatagatgcagaaaaatggaattttctctattaaagtattttacatttgacataaaaaagaaccagatacagttttctattcagatatgtttattttaacattgtttggttaaaaaaggtgaagttccagtcaaccactttttacccctgaaatttcaagataatgctatattaacttttccagatctaacactagcttattcttccctgttataaaatggtttgaacttactgaggagatattcctatcattaacaaaaataaactatttaaataatctgttgttaaaaggctaatgtcattttaaaattaatttttgttcataatgtagctcccctttagcctttgaatacacctggcagcagtatgcttaaaaataagaagttagttgcctggcgcagtagctcacacctgtaatcccagcactttgggaggccgaggcaggcagatcacctgacgtcaggagtccaagaccagcctggccaacacggtgaaacctcgtctctaataaaaatacaaacattagcccggcatggtggtgcacacctatagtcccagctactcgggaggctaaggcaggagaatggcttgaacctgagagacggaggttgcagtgagccaaatagcgccagtgcactccagcctaggcgacacagcgagactccatctcaaaaaaaaaaaaaaaaaaaagaagaagttaggcttgttttaccttattaac

SEQ ID NO: 15841 - DNA, 1198 bp, Homo sapiens
tgtatgtcccgtattaaaagtactttgaactctgtttcaaaggctgtttttggcaatcaaaatgaaatgatttcacgtttagctcaatttaagccaagttcccaaattttaagaaaagtatcggatagtggctggttaaaacagaaaaacatcaaacaagccatcaaatctctgaaaaaatatagtgacaaatcagcagaaaagagtccttttccagaagagaaaagtcacattatagacaaagaagaagatataggtaaacgcagtctttttcattacacaagttctataaccacaaaatttggagactcattctactttttatcaaatcatattaattcatatttcaaacgtaaggaaaaaatgtctcaacaaaaggaaaatgaacatttccgggacaaatcagaacttgaagataaaaaggtagaagaggggaaattaagatctccagatcctggcatcctggcttataagccaggctcagaatctgtacatacggtggacaagcctacaagtccttctgcgatacctgatgttcttcaagtttcaactaaacaaagtattgctaactttctttctcgtcccacggaaggtgtacaagctttagtaggtggttatattggtggacttgtccccaaattaaagtatgattcaaagagtcagtcagaagaacaggaagagcctgctaaaactgatcaggctgtcagcaaagacagaaatgcagaggagaaaaagcgtttatctcttcagcgagaaaaggcaagttgttcagtgtgcttttcggttctattactttttgtcaaatttataagttttatttcctaatgagaactaagaaactttcattgttctttagagcagttttgtattctaatcatatctatttaatatgtctttgtagattatcgcaagggtgagtattgataacaggacccgggcattagttcaggcattaagaagaacaactgacccaaagctctgcattactagggttgaagaactgacttttcatcttctagaatttcctgaaggaaaaggagtggctgtcaaggtaatttctaatttatttaatctagttttgtcttggaatagaagtactaaaaaaaatctaaaatggagaaggcaaagcctttcatttttccatttgaattttgtggtttttattatacatgtgatgtgtattcagtaattaccctat

SEQ ID NO: 15842 - DNA, 1120 bp, Homo sapiens
gacttttcagtattgtgctgatactttacagttgttttctttattcatcacaaccctctaactaggttttattacctatatttcacagatggaagaactaagctcctagagattgatacaatttctcccaagtttcagaagggggaagtgagagagttataatttaaatatggtgaatttggcttcaaaatctgtaagattctttactgtattgctcccagtggacatcaatttctatggattaaaaccacttgattgcattagaaaaggttttcgtgaaaggacagtatgggattatccagtgagtgcttattgaatgcctattatatacttcattttggagcacaatcattttactttactagcactattccagtggaataaattttgaaatttgagactgtgcctcctcaaaattgaaacctttgaccaaggagaggagagttccctcacagtcctcttcagccagcctgtttcttagatttctttggtaaagatcagaccagtctgtccactgtgctctcagatggcatctcccagtagctcttttcatttctcacacttccctatgggggcggtgggactcacggaacagcagttaatttcccctaaatatttactgtcttcagtccctttatggcctcagtgtgggtgctgaactgcaaaacttttgactgcgtcctttgcaaatcctgcaaaaatggtcttgcattttgcctttgctttggaatttgttttggaagtatttgacaaatagttttttgttcttaaccagtatttcagatgaactaggacaaagagagccaatttaatattctgttgctacgtacacttttaagaaaaaagaaaattttctaagtatgtagaatttaaggggtggatcaaagggaatagacattctgaagtaatgacaacttcctacaaagggtgatcaattatctggaagtttaaagaaactaaaaggtcacttagctataggctgaagttttaatatcccttaatactttttagaagtatcataaaaatcggccgggcgcggtggctcacgcctgtaatcccagcactttgggaggccgagacgggtggatcacgaggtcaggagatcgagaccatcctggat

SEQ ID NO: 15843 - DNA, 1160 bp, Homo sapiens
agattgtattctactactggattagcctttcagtaaatgtgtttcaaaatggtctcattagccttttaataaatattataattaaatatgcataaatatgggaaggtctactgtgtaacaacatggttattatatgtttcaaattatcttgtattcttatggaattgtatacctgtttctcatgcagaataactacacccttaagagagtatactaacctgtttttatgtttgtaaagactgcaagtcagctaggtggcttgaattaatctgaattcaccttcatgatagagctgaagaaattgatactgcaacttatcatgtaacaagaagatctcaagtttaataagtctttgagctgattcagacaatggatttgttgctaacagcttttttgttaatactgatgtgagaatgcaattggatattataaacactcttcagttcaactgtttagtcattaaaataattttgatataacagatattgattaagaaagggattttagagatagaaagacttgacttcagttctctgatttgccagttacaactacagcggtgcccttgggtgattataacaatacctgcttcatagaattgctttgaaaaataatttagataataagatttagtaagtactaataaatgtgaagtattattataaaagtcatgaacatttttgtcttaaatatatttaaatttgctggaagttttatcaatttttatatttgtgacaattataaaatgttgactaactggattataagtatgctaagctataaactttttgggtggtcctttgagtgccaatacaatccacatatcagaaaacattatacagttgacatttaataaaattgaattgaattttcatggcttcaactggtataagatgattatcatgcaattttgcttacatcctgacatataattgttttataatttttctatattacctgccaaactacattgtaaacaaaaattgattagagattatatttcagttttttttatattatctaaagttgtgttaaaaaacacgatcttcagctaccaagtctattccataaatatttcttggattttaacatgattttttttaatggattctccgtattccccttgattttaaaagaaaaatgaataagtaaaactaagt

SEQ ID NO: 15844 - DNA, 1166 bp, Homo sapiens
aaataaataaagttaataaatgtattttttacggttttaaagagttatttttaatcccgtatttatttttaaaaatgttggtagggaaaccctgaaggtttacctaatggactgtgtacatccgaaatgcttaggagattaattcaagggcaatttgagcactgtttatatgagtacattaaggagtttgaagatagaaattggcttgaaacacatttagttgaactgttaaaataatcccttaagatagatactaatctccattttacagatgaggaattctatttagagaataagagtaactaatcgatgatcatttggctaataagtgggatctaggatttgagtgaggtctgtttctatagtttgagctctttagcctaagtttgtaacttacatcaaagcctggagcatggggtttcaaaaatggtaaatgctattttgtcattgatcaaatttgggaaataactgtcttagtaagttagtctactgaaaagactatcgtgattgcatcttggctgcttttataggtaagagtgatgagcaacgtgcagctgcagcgttagcatctgttctttgtattcagctgggccctggaattgaaagtgaagagattttgaaaactcttggaccaatcctaaagaaaatcatttgtgatgggtcagctagtatgcaggctaggcaaactgtaagtataagatatttacatttatagatctgtctattcatgacacccagacgtggtgcgcctatagtactgtaccagctactcaagaggctgaggcaagagagaggatcttgtaagtccaggagtttgaggcagcggtgagctataatcatgccactgaactgtagcctgggagacaaagctacacactgtattttaacaacaacaacaaaaaagataattctatatttatggatttgggtagacataggaaactgaaattctgatttgtgaaagtcttctaattttggggtttgagaaagctttcattctctaattgttggatgtttacctcttgcaacacttgactttagattttgggttttgggggttttattttttgtttttggtgcggtaataagtgatacaagtgatcatatggagatgttttactgtgtcacagaaaacagaagacactgaggtggtcttagtggatttg

SEQ ID NO: 15845 - DNA, 1986 bp, Homo sapiens
gatattgaagaagctgacccgccacagctaggtgactttacaaaagactgggtagaatataactgcaactccagtaataacatctgctggactgaaaagggacgcacagtgaaagcagtatatggtgtgtcaaaacggtggagtgactacactctgcatttgccaacgggaagcgatgtggccaagcactggatgttacactttcctcgtattacatatcccctagtgcatttggcaaattggttatgcggtctgaaccttttttggatctgcaaaacttgttttaggtgcttgaaaagattaaaaatgagttggtttcttcctactgtgctggacacaggacaaggcttcaaacttgtcaaatcttaatttggaccccaaagcgggatattaataagcactcatactaccaattatcactaacttgccattttttgtatgctgtatttttatttgtggaaaataccttgctacttctgtagctgctctcactttgtcttttcttaagtaattatggtatatataaggcgttgggaaaaaacattttataatgaaagtatgtagggagtcaaatgcttactgtaaatgcataagagacgttaaaaataacactgcactttcaggaatgtttgcttatggtcctgattagaaagaaacagttgtctatgctctgcaatggtcaatgatgaattactaatgccttattttctaggcatataataatagtttagagaatgtagaccagataaatttgtttactgttttaagaaaactaccagtttacttacagaagattcttttttccaaacagtaggtttcatccaagaccatttgaagaactgcaaactctttctcttagaaaagaaagagggcagcctaaaataaacgcaaaatttgcttatactccatcacattcagatgtcttggttgtgacttattaccagtgtggcagagaacccaagttacattttagatcaaaatattctttatgtaggtattgttaaaaggctagagcctacaagttgctcttccatgcgttggtcagggggccctgaaaacactggtaatattaagagtctttctcagggtaacttaatgttttcttaatgaacagtgtttccagctacaaattcttccaataaattgtcttcctttttgaaaagtactctcatagaagaaatttagcaatttctcgttgactgactcagtctattttaagtattcagaaaagattttgatccccattgagttaatgctctgccttgaaaattatttttctgatccttgttagtgataacattttttttctactgaaggtcagaggataggaaacaagtatttctcttctggtatacatgtaatgtattctgtaaaaaagtattcatattggcaattttagttaggcataatattgtggttgtaatttttaaaacttagtgttttgtctgattaaagcaggcactgatcagggtatctcctaagaggtaattcacttcttattcctttccaataattattacattctaaattttcatctatgagaaataacaaacaagaagggaatagaattaaattggggtataatctaatcttcattgtttaaatggtttgccttctcaccattgaagccatttttttatagcctcagaaagaggaaataatgcctccaccattttctacctggtgacttgaaaattgaacttttaagttaggaagaagttagagtcagggaacttgtataccactatctatgcagcattgttatagtctgattatttctgtgttttgaatatgattttcctaatgctctaaataaaattttgttaaaaattaattttttatttaatgatgtgcaaatattgaatattttagtatatttattaaaagtggtagtcattaaaaatgcccatgttttagagttcatgtttggaagtttccattataggttaaggatttatattagtattgtccaaataaaatagtata

SEQ ID NO: 15846 - DNA, 1105 bp, Homo sapiens
aaagtctatgtactaaagtggaaataatcttgaagttcttaatatgccttgttttctgtttctgcagagtgtctataaatgtgatttcctgaacttacagcttcagcaaccactccagcttgcacaggatgctatagatgcttttttgaagcagctgaaaaaccctattgattctcttcctggagagcttttccatgtggttgttttctctctccttctttcttattttccatctccttaccagcgatggatttgctgcaagaaagcccatgaactgttagtgttaaatggtttattactaatcatcacacctgattcctcccatcagaaccgtcatgctatgatgatgaaaagctggaagattgctatagagtccctgggctttaaacgcttcaagtactcaaaattttcacatatgcatctgatggcatttaggaaaatctctctaaaaaccacaagtgacttggttagtaggaactacccaggaatgttatatattcctcaagatttcaacagtatagaagatgaggaatattctaacccttcctgctatgttcgatcagatatagaagatgaacaactagcatatggtttcacagaactccctgatgcgccatatgactcagattctggagaaagtcaagccagctctattcctttctatgagctagaagaccccatattacttttaagttaatatagaagcaaaaagcccctttcagtccaggctcctaaactaattgcttacaccaattggaaatactaacatgaactcagtactgaaaacctggtttgcataaaagaaatgcagaggtttacagagtttgctatttttttctacttctcaattttaaaatttattcttatatagaaagcttaaagtttcatgcagagtgactcatgtcatagcagaaactactgttactttagcatttagcactatcatagaaaggtacctttttctctttagtgctattgtgaaaacaagcataatttgctatatgttttccttttcaacttttcagtgttgactataaaccattgaatggaaaactttaagatgtagaaagctgtagattgcactttgatgactcacaagttaaat

SEQ ID NO: 15847 - DNA, 1773 bp, Homo sapiens
ctactaaaatacaaaaagttagctgggcttggcggtgtgcgcctgtagtcccagctactcaggaggctgaggcaggagaattgcttgaacccgagaggcggaagttgcagtgagccgagattgtgccactgaactccaacctgcactccagcctgggcaacagagcgagactccatctctaaataaataaataaataaataaataaataaataaataaataaacaaaccagtctttattttaaaagaaactttaggaaacaaacccacataatagttgggaaccagtgttgatctctctcccttaccttctccacttgttcaacagactctgaatgccgactgtgtggactctcttcctcagactgtggggacagatacaattccactcctgtccacaggaacatgagatttagcagactaaggagatctgtaaagaatgaaccataccacaaggcatactgaagtgaggattataagagaaataaactcaaaatgctgttggaatatgcagagaattgctaccagaatattcagtaaggtttcagggagaatgtggcatttgaggactctcttagaatgagtgattcacctgctatttaaatgaattatttagatttttgacaaagatttaggtggacaccctaaactgtgtgtgcctttaaccagttaaaagaacagtgccttcagcatacttttttattagttgtaggaatacagctttttgaaaaagctataaagtttaaattaactaaaaatatgcattttcttacacataatttaaatgttatcatacttttttgatgaaaacataatgccttagtaaaatagctctatttaataaagaagattgagtactctgacacatttcatttaaattaggaaatttttaatattaaaatcccagtgttctgagttattgaaaggctttcttttattttgagagctttaggtctttttgggatgagaacattttagttgtttagtttgtttcttaagcagtgctattttttgtaaacacagataaatggaaaccattcttttcaatgcagaagaaatctagatatcccctactgtgaccaaatttctgtattacgattttatgttaaattaaactaatatggcaggttataatgatccttaagtgtaaagaaatcagtcaattacaagagtaattgtatagttattgagacctatagtgtgtggcttagatgaaagggagagtaaattttcataccatgctctctcctactcagtttgatctctctaaaattgtagtttggtttgatttaatataattcttagtagaaattttgaaagtatgctttgggattaataattatttttaatttttctggctgaatatcaaattgatagtaacaacagaagcataattttaggaaggctttcgcaaacctagccttttaagagaggtttttaacctgaagcatgagaatatatcacctgtggtttttcctttgagatgaaacgtagtttctagttatatcattacttaaagggcttaaaaagaaaaaacttagcaaacttttgaatctttcttttattgctatttacacatacatacacacatacaaaacctttaaattttgggatctgaatataattctggtaaacagctgtcttcatttttctcctctaaagaacttaattcatttgttacataaaatataaggaaatctttatactattttacagtaaccacaatctaaatatttacatatacccaaaattaacttatgctcatatattaggat

SEQ ID NO: 15848 - DNA, 1149 bp, Homo sapiens
tgcacatagcacaattgttctggtccacactgaaaaacaggtaacattatatatttttttaaaaaactgagctctttttgaaaatgtttctgatagaagatggagatgcagcctgcaaaagttaaaaaaaaaaaaagcagctgaatgaaagatattctcataaaggaaaaagtgaagtatgttagaaaactttagccatgatattgggaacacggtacttggcaagagaagccagaagtgaatgaatgaatggtatttgctagatagaagaaagtgccaagttaaatgaatctagaatacttcaaaaatgtccctgttggagggatagtgtgctagatataagggacagtcggcatttgctaaaacacgtgagtgacatgtcccagagaatgaaggaaagtgcagggcatagtggcagctggcgtagagactatggacagcaggttttttacagagcaatgttgttcatggttagtggtgatctgtggaaaatgtaagtgaacagttttgacagagcagcatgtgaaagggaataaactaactagaatatctggctgccatgcaactgactaagagaaagctatatgggtacaaaatcaagatgtaatatatttgaaaaccaggcagtaagtctgagaaaggaaaagaagaaatatattctgagccagaattgagaggcatagcattttcattcaatacatttaactggcatttgtatgacaatcatttatatcagaaaaaaaagtacaatgtttgcatacttcaaaaacatcatgttgtacaaagtaaatacaaacaattgtatctgtcaacgtaaaataataataataaaacagtaacaactgaaaatgtattgtagaatactaatgaataagttacaagaagttatagtgtgcaaaaatttaccatttgcttatttcactgtttaacaacttttcttcccttggtatggacattcttaagtaaagagcatttgccgaatgagcaccatacacagaacatgtttaaaggacttatggagagagagaaataaagtggaggtgattctgataatgagaaataagattctggtttaaataaaatgtataaacaaatagcacagaccactgaaaatgaatataggtgttggggtctaacataaatatatct

SEQ ID NO: 15849 - DNA, 1150 bp, Homo sapiens
tgatattgagcatgttttcatatattttttggccatatgtatatcttcttttgagaaatatctgttcatgtcctttgcccattttttaatggggttgtcttttgcttgttgaattgttccttatagattctgaatattagacctttgtcagttgcaggatttgcaaatattttcttccattctataggttgtctgtttgtcctgttgccagtttcttttgctttgtagaagctcttcagtttaattgggtccctctttcaatttttacaacctagcttttaaaagccttatcaagcaaagtcgtgttttgtttccttcttgcttaaatatatggatacttattctccctcctaaaaaaggacttgcctttgcataccatgatatagaataggcctaaaagtattttatgaactataaatgtatgaacataaatatcaattaggtacaattaatcattttctacttattttcaaaattatagaaaaatatgtcgtaactgcaagtgtggccaagaagagcatgatgtcctcttgagcaatgaagaggatcgaaaagtgggaaaactttttgaagacaccaagtataccactctgattgcaaaactaaagtcagatggaattcccatgtataaacgcaatgttatgatattgacgaatccagttgctgccaagaagaatgtctccatcaatacagttacctatgagtgggctcctcctgtccagaatcaagcattggtaaatgatatggaacagagagtttctttattgaagttcctggagtatttatttggggcagtttctttgatgacctaatcaacttcacacatcccagatctgttattcttccggggttctcattactttgacttctgattcctgttctagtcttttgaatgtaagactagatacttcataaaatttttccaactccctagatatgtttacctttttgagggaatggtctaacgttcttaataattagatggaaatcagatgttttatatcaatctagtaactcttctagcttagtcttgagaggatttatcttaagatggtaaagaagagaatttttgtcatagtttagaactgaaaaaaatattcaacattatctttgtgtttttttcatttcctttattaatactatataagac

SEQ ID NO: 15850 - DNA, 1211 bp, Homo sapiens
gtgtagtatgcagagctgctgttttaatgcctatgcatttactctttcctgatttaggcagaggtggcattttctttattgcatttctctatttttttaatgtaccctaccttcagtattctctttgtaagttggtgacttgcatctgtggccttgaatattttattatcacatgtggcataacagtatccacactttttagttctttatttttttttttttattttgagcaattctcctgcctcagcctcccaaatagctgggattacaggtgcatgccaccacacccagctaatttttgtatttttagtagagacaggttttcaccatgttagccaggctggtctcaaactcctgacctcagatgatccgcctgccttggcctcccaaagtgctgggattacaggtgtgggagccaccatgcctgacccacacactttttacttgtatagatgatttttggcttggacataaaagccaagccacccatttgcttttaatccaaagaacatgtatagtttttgtacccagagactatgatttatattgattgcacttgcctgccatgatttagataagattttttttgcatggtttttattctttcctaatggatcctgttttataatacttccaagcctgtccatggatatatcaaatgtcttcacttgtatattttcatggctaggtatttctaatgtttattcttccctgtgtacttctacacatagctatgcactatgaaaattaaatggaatgaatgatatgtatattactcaaaataaagtttctttcactttaataatcattgtatctttttattcatatccttttttgagtgaaaaatgcttctgcaactaagcatgtgttacagcagggggcgatgtctccaaggataaaaattacccaaacgaaaataaaagtctgcctctgacaggacagcacagaatctagatgtttcattatggagaaaagataaggtttatgaaactttcaaatcaggacttttaagtttggtcatgcaagagtttttttctttttcaaagaaagggaaagtaattttaattaaaatttgggagagcttattttctattcagttggatctaacaagccttttatacttgggtttcaactctggtttctttatatgtaaaaaatattaaaagaagaattttttcatggaaacttatcgtgagacagaaagcaaatgg

SEQ ID NO: 15851 - DNA, 2193 bp, Homo sapiens
tttggtagagacagggtttcactgtgttagccaggatggtctcgatctcctgacctcgtgatccgcccacctcagcctcccaaagtgctgggattacaggcgtgagccaccgcgcccggctcttctagctgctgttaaacagcttttaaaacaatgttgggattttatttgactgtttaaaaacagtgaaacaggctgcttaaataaaacttattctgaaaacatctatgtgctttataaattgttctgttctttgctttactttaaacttctaactattgtttttcatagactgccatcagtgagaattatcagacaatgtcggacactactttcaaagccttacgtcgacagttgccagttacacgcactaagattgattggaacaagatccttagctacaagattggcaaagagatgcagaatgcataagatgaacattgcatgaccggatcattttagtgtctttgcgttaaaaaatcattgcaaaagtattctgaactgtcaagctgcccagtcagatgggctgttgccatttaaaatcactgtaattaattagtttgattagagcacaaagcttagctaatcaaccattatttttcattttgtttgttctaagaggattgaaaatcagtttagtttaaatgtctttctgttaggcctttctttcttacaatgaagagatgattcttctagtttatggttaaaagtttttgaagtgtctcaaaaatattttactaactgtaaccctaaaattgatgtcttttggtttatgaaatcagtaatttttgatatttccccagttctttttaatggggtcaataatggacattctagtttaaggtggttgatggatttagccatatatgctgctaaagaaattgtctaccttttcttcctcacctgttccatttatgtaaagttgagattagagggaaagcattttctatatcaattgtgtttaaacctttcaagaaggttatttagctagcttagtgttgaactaaattttttttaaacaaggcaaggtctaatgctgttttgagattctgaaattaatgaaaatacttatttcagaaatgcatttaatgctttttttcttgtgacagttacgcaaatcagcttgaattccatatgtccctgagttatttttatcataaagccacaaatgtattataacaaggcaaattgtaatatatataatcctgaactcatgaccatgtctcggtttattttttttttcttggattgaaaagtactgaaattcaatgtgacattaaaatgcaaattttcctatttatttgagtagaaaatcacttaccagtgagcatatatattttaaaatactttctttggatattgtaattcttaactggttgtaaattagaaaagctgggattacatatggtgtgcggttacagtctaaattttttcatcctcctatgcatcataagcatgtttgtaatattttcaaaaatagttctactgatgctacaggaatttcaagcctgtggtgaatgttagtatttaccatagggagtgaagtggagttatggtttcattcaatagagtattgctgattatacttgagtggaatcctttcctcacgtactcccacagacgtctgggcctggaaattttttttttattttattttattgtttttttttttagaaaaacaccacttttattatgtacaataaaatatttcattagcttgaattgtatagatttttaaaaattcaatgaaagcatgttgtttaatttctttttaaaatcactgttgggctttgaaagcattgagaatataatatgaaattatgacattttgtctaaatcatcttttctttagttttaaaatacaagttttggcacattgggattcctaaagaaaatgaattggtaacattaattatctgttcctttttaaaatatatatatttgaaagtttgatgatggtgaactaaatactagatctaattgacaagcttagttgtatcagttaggccatcatgagtttctatcccatgaaagtcatcaatttcctatctctgttctagtctggaatgcattactgaaaatgtatgcaactgtttttaaggtgatttgcttgtgagacggaagatttatcaaaaataatttagaacaggctgggcgcggtggctcacatctgtaatcccagcactttgggag

SEQ ID NO: 15852 - DNA, 1149 bp, Homo sapiens
tcttgagttttgtgacttaaatatgcagttcactgactcacgccaatgttgtttgctttttaccttaattctttttactgtgctctctcagttttattttttggaagaatggtactcagtgctttgatttgattagtaagatttttgaaacacatgtaatttatttcagaaatgtgattgttttaactctgacttttttagtgcagtcattggagaaatcgatgaagaaacagattctgcgcttgatttggggaatattcgagcagaacctttaaattctgtagcacactgaggaaaaactacatacttggacatctgtaaatctttgtacagaaactgattattctgaggatgatatatggagtttttatgagtgtgtcactggattttgactccttattgattcattgtaatatgtaaattaaaatatttctacattttattgaaaaaaaaacctttttttttgcctaaatataagtttggtagcttggtttcttttttttattaaatagtgtgaaaatataatgggcattttgaaaacttttagaaaaaagtagtactttttgatactttagtatttatggaaactagtggaaaagagaaattagtgtgctatataaatcaggcattcaagtaacagtaatacaggatatatgtgttttctttccctgatgtttaggaaaatcacaggagggtaaatctttgctggagttatctgaatcattggcatttatccgattccactggtggtagtttgctagtgcttctaaaagttgctccctagcactgagaggtgtgggtaggtaaaaatgtgtttgcttgagaaaagcaaaaatgctaacaaggttttgatagattggcccaaaattctaacttgaatattaagaatgactaggaatggtagaattgacagagatgattagtaaagtctcttgatgcccaattggttaggtatgaaagtaatatgaacacattaatgttgaattttacagacagtatatttgaaaaaaattgattccatgtagtcttcaatttttaatttttaagaattggagaatttctaatgttaaagttagtttataaatgtgagtaaataaactctaagtttgtattgaagtagtgctagctattattgtcagcaattttcca

SEQ ID NO: 15853 - DNA, 1219 bp, Homo sapiens
tcttcacataaatgtttacaagcattatgattcactctcatgccttagagtaatagatgtatagaatataggaacttctttgtagactgaggatctttcatcattctaaataatagcttttatcgtatgacagtgtggatgatggccttataagcaggaggagattaggctctaagtaatcacagggcatattatgaaaagtgaccagcctccaccatcccctcctcccattctctaatccctaatcagttttgctttaattttcatgtcctgacttctgaaaatggagtatagaacatttcctaacaagttgagagtctgggtcttagaacttaaaatttattgaaggagacttgggagattatttagcctaacaccctcattttatagattaaaaacctctgaggcatagattaattgacttgctcaaggatactaagcagattcactaaaagaaacaaaaatttaggtttcctcattaagctgacactttaacagtgtcccaaattttggtggttatctttgatcttctttgaaacaggtagatcgacacttgagaaagctggatcaggaactggctaagtttaaaatggagctggaagctgataatgctggaattacagaaatattagagaggcgtaagtaaaatttacagttttccatcaatattggacagtacatgtgcaaatcgctgagaagaccttgtcccacagaggcttttgaaatcctgcccttcaatggatggtggcatccaggccagatagcttggaccctaacagttggaaatgtttgggtcatgcatactgagagagataatataggatatcatccactcactctttatgaaacaacatattaaatcattttatatccacatatactagtaagttgagtggtaagaacaaatttaaagaaatgtaaccatcgggagacaaattaaccatcttgcattaagtgtgttgactttactctgcctctttatacacttaagctttgaggaaagttgttagtttctcttcttaagaattactttatggcttttccttaactgcatatactgaaaaagactcacattggtttcataacactacctctttttcttaaagaagtgttttcttctttcccttagcagcaagaaaccattttgatatttctttgcaaggctctatttgatctcctgctataacttacccctgtcacttctttggtgtgacttccc

SEQ ID NO: 15854 - DNA, 2126 bp, Homo sapiens
ttaaatgaacttattgttgacatgagtattactgaaatgagaagtgtgtaaaatgttacggcaaatcagcagtttacaacggttttttaaactgtatattattactgtgttccaatagcacataaagaacaataaggatacaaacaaatatgaaggatggcctgaagttgtagaaatggaaggatgcatcccccagaagcaagactaatggaaatgtggagagaattgaagaaagcgcactttcactcttaatgggagagctataaatggcagagctatgtgtaaatattttaagagcatgcagccatcttggtgtgtgcatgagtattgtctcttttgatatcaggattatttattgctaacgtaaatagatagcattgtaaataatcatcacaatgatcaaatcactgaaccatgtctccgcacatttccctaaaagtacaatgtttagactgctatggtaatacatattttaaattctaaaagcatacacaatgtgtaactgaatggtttgtgaaaaatatattgatatatatactagttgctatgaaaatatcatggaataatagggattttagggtggatactttattttcttttatgtttctatatgttgcgttgtgatgacattatcttttaaattaaaaagagatttggctagttgtgtgtgtaatgttactttacagtccgactctcctgatgtacctcttttcatgatctttttctttccttcccaagaaactgaggaatgtttaatatgaaaacatacatcggatatgtgaaaagcacaacaaaattcttaatgtacacagtaaaaaagtaaatatataaatgtagatggcatttaggaccacagcttgctggatttgtgttagctatgggaataacttgattttgtataagctatttagagtgaggctggaggtggcagcttcacagaactggagaaccaggccaagtcccctccccaacctaattaggtcattcaggacagctaagtcagtatatttagagcaatactagcatacgtttttcttaattgttatcagcattgaccaagtggtttggaaggaggcatgctttaatatcacaataattttgatttgtaaaccaagaaattaatcctgtgtttatctaacttcataatagcaattattgcccgaagctatagtggcatatttacaaaagttcttattactgggcggactgataacatttaaaaaataattgtgtttgaccccaaatgactttatacccaattctacataaaaatatagaagatctatctttttttgttaccttcagatgttcactaaataactcagtttttaagcagaagttttcagggcattaaatatatgttgtgtatgaagtatctcaaactggaacataaatttagtgatcaaactgccattcacagtgtaaggcagcacttaaatttcgaacctaaagtttagatgcattgtataaaaaaacctaaaagcagtatctgttatttagctgtaaaccaagttggaagctattcggataatttcttaaatattgatgaactttggagtactgtttcttccttcaaactgaatgtaattaattcatgaataaatgcaccttatatgtttaaacaatctttgtatacttttgggatttttggtgcttatatgctaaatcacattcagcatgtgtattttgacatttaaaatacttccctcaattctgtaaattaaaagaatagttattttacagttccagggattgtgaaataaatgttgcagttttttaaaataatgaaaataaatactcttggttttgctttgtgaatttttttttttttttgtattatctggcaaagtaatatacctacagaacttcacaaaaactcacacaaggtttttcaagcatttattatactgcctaacttggaaaaaaaattgttgctgtggttaaaaatagtaatatcctagatgtgtcttaacatgtaagaagctaagtatctagatggcggaaaaagcccttttattaagactgtaaaaggatagcttttccagatatataaaatgttaaaagaagacaaagattggttatgttaactggtgtggtttccttttgtctcagttcaatcttgtata

SEQ ID NO: 15855 - DNA, 1178 bp, Homo sapiens
caattattcatgatggatattttgtgttttttagctccgttattataagtacagaaattggtgtgagaaggagttaagagtgtacatgggcaaggtagtcaatggaacattaggccttttttaattatcctggaggtgacgattttttgtgcatatatggactagaagtgcaaagtaacattcagaaccccccacatcctaaaatttaaaaataaactcatagttagataaaatatatttgccctaatgcagatcatattacttgactcatttgcatccattattagtttgtttcctaggaagatctggtgtctgttgtgggtttctttgttgctgtttttttttaaaaaaattttttgaggttctttgaaaccctcaggggaacaaattagcttgtattttaagatacgtgtatcttgatgtttttcttaatgctctttgtggtttgagatttgaagtaaagtgaggtaaagtctgttaacttgttttctaaaaaaagacatcatgttttctcccccaaagctacaaagcctcccagatataagtgtgggatctcaaaagcttgccctgagaagcattttgcttttaaaatggcaagtggagcagccaacgtggtgggacccaaaatctgcctggaagataatgtgtaagtctttgttgacttgagacgataaggtgtgctattaaattgcagccaattgaacctgagtttaatggatattttgaaaatgtgttcggtatactttattaatggaaagtgatttccatttttgttatgtagtttttttctcatgaattcaagggaccttaaagttcttaaattttatattagagagtgactaagaacgtaacacttattcggctttatagagataagagatttcctctgagtaaattctctagatctgcactgtcccatttgctagcaacagaacacatgtggctatttaattttgatccttaaatattaggaagaaagttaattcacttaaattaactaaaaagttcagttccttggtatctgtcaccgcagttcaggtgttcagtggccacatgtggttcatggtcaccaaatggaacagcagagagagcattttcatcgtggcagaaatcctatttgcaacattgccctggacaatgaatgtgttctctttattttaaatgaaatccaacgtctt

SEQ ID NO: 15856 - DNA, 2524 bp, Homo sapiens
tgctgtatatttttgttgccttttttgcttttttttaatctgtgcaatacctcatttaatctgtaaaggtttgtcgtaatcctctacaaagctactccctgttattgtgtgcaagtttacaccaggatgctcacttgatttgtgaatatttttcattccatcaacaagggagtttaaatactatatgtgagactgacaaaaaccttaatgtaatttacttataatgccagaaggaaaacactattttcataccctactttttctgtacctaaattttcttaaaaaaaaatctagtatagcactacattcttttttaagtgatgcagaccttagtttctttagcccctttattttgaatacaatgctacatatgaatgttgaagctgatacattgcacagttctgtagacatcactacaccgatgtagtttctcaaattttagcaatatgctctacataaaatcactacagagatactagtggggaagacgattaacacacctcttacagtaatactgcctgttattggtatagcagtggtatttgcagactgggatcataaggagcccttaaatacttgttattgactggggttatttttatgctgtagcaaatgtgacaggctctttttagcaaaatttttgaaaatttttttggtattactctgaaacaaaatttaagttggagtttcagggatttagggagtagttttcattctacatgaactgaggtaatattatggtaactccaatatttggttaaaaaaactatacaaatcagaatagtactaaaatactgtagaattttagcatttttattttgcactttgtgtggattgaggtgttcagaaataccaaccataaaaatgtaatctagttggcaaaggtgtgcgctaaaacacggaaccgaacatgcattgatttggataacttttgagggtttttgtcaaatagcatgtgaagagttacatttttcttaaaagattggtggtcccaatgtcagagttcttggaacagataactgaatgatagattttttttttttaaagataaaactttacaacctgcacatttgttatgcatactaaatggtgtgttaaaattagggtttctttgcctctctacactacactaatctgcctaaaggtggttgtttcatatttataatgctaattatcatacctacctactttaaattttaggtagaaaattatctgatttaaatacaaacatatttttctcacattgagtaatatgcataatgtagttccaaatgtatttcattactatagtcacaatatccaactaaaaattacgctatctagaattgtaccaaccaaaatctcgtattggcagatcttgacaggctggacctgcaagatgtggcttgaattttaaccatttattacataatctctagtgatcatgcatctagttatcataagaaataatttaaaaggttttgttgctgaaagcagtaagtggtgcagtaaaatacttaagttattcaaagaatgttatctttcttgcaagagtaatttaagcacatgggaaagattctagactttttgtttcttgcaacaacagtgccctctgctgctagaaacctttttctacttactatcatttttattgtggcttgagctcagtcaatctggtgcagatgaggctggacaactactaaccaataaaatcaggagtttgtacaaaagttaaatggaacattataattattttaagtaatgttaattgaaaaaattttttctttttgacaatataaaaaacattttaaatttcctagaaatgtcttcagggtaatgccaatttaagatctctcttaacttgtggccaagaaattctagattttccagctgactttggtataatatatatttatcaggaacttctctcagcagagagtacccattcttcgagttcaaagcacaattttaaacatgtaaaatggatatataatttgccaaaggtaattaatttattctttttttcttaaagaagaaaaagacattggttgttgttacaaaaagtctaaattactgttggttgaaacacagcagctgtggagttcagtccaggcatgaagactaaatctgctttaccaagtaaggtgtaaggttgcatgtttcagtcctctaccatcctgcactgtgagcagcactatacctgtgcgttgtctgaaagccttccgtatattctccagctaaatggtcgtctggtagcctttgcatttaacaaactagcatgaggctttttatatctaaatgctacgtgatagacaatttcagctagccacatattgtatgtatgagattcataaagactttcaatcatttcattttcagacaactgaaattttgtttagtatgtgaattctttttttgaaatgtatagtgaataggatgttgcactggtggcaattcatcatggagcataataaaattaatttgacccaaatagaataaaataatgtgtttcatgtgtttattgttaagagagtaaaataggttt

SEQ ID NO: 15857 - DNA, 1186 bp, Homo sapiens
tttatgtagtaacatttttcatgctgttttatcaattgagttacgagaatttgagttgcctttgctagtctaaaacattcagactaaaaatatgaaatatcatttttattatttaggacacctaagtgcttatatattttatattaagggcatttgaagcaaaagtagcccttcagattatatatgttccttaacatttttgtgtatcatgatgagaatttaaaggaaattttagtttaatagtagtctttatctttgtagaatactgaaaagtagataatgctcttataaaaataaactggtaatatgatatattctgagatagaggttcataatatatcttaaaatattagagggctacagcaggctaattacttcagattaaaatgttgttttttccttaacagaccttcctgatgtaaatgataaacaaagccaagccataaatgatctcctagaagccatatatccaagtgtggacaaacgagaatatattattaagctagaacccatagaaactaatcaaaatgcagtatttcaatatatttcgaggactgataatcctattgaagtcacagagtcaagcagtactcctgaacaaaccgaagttcagatacaggaaactagcactgaacagtcaaaaacagtaccggttacagatacagaggtggaaactgtagagccccctcctgttgagattgttacagatgaagttgcacctacatctgatgaacaacctcaggagtcgcaggctgacttggaaacttctgacaattctgattttggtcaccagttgatatgttgtctttgtagaaaagaattcaattctagacgaggtgttcgccgtcacattcgaaaagtacacaagaaaaagatggaagaactaaaaaagtacattgaaacacgaaagaatccaaaccaatcctctaaaggacgcagtaagaatgttctagttccattaagtaggagttgtccagtatgttgtaaatcatttgctacaaaagcgaatgtaaggaggcattttgatgaagttcatagaggactaaggagggattcaattactcctgatatagcaacaaagcctgggcaacctttgttcctggattctatttctcctaaaaaatcttttaagactcgaaaacaaaagtcttcttcaaaggctgaatacaatttaactgcatgcaaa

SEQ ID NO: 15858 - DNA, 1234 bp, Homo sapiens
aggactgagaagtgcagaagttggaacagtggtaaggctgttttaaaataagatgttttgttttaataatatgctcctggcacaaagctaggagtaaatgtgactccaaagggagttcagttaatctctgaaatgcacaaaacctagctattttctccctctcatcacagtctgagtctggtccattgctaccccaattctctggggacataaaaccaggctggaaagggaccaggaagtttgaaatagtgacatatcatccactagtcccaagggctaaggaatagtgagtttattctggaaggaactgggaagcttagtctaattagtgcctggggatgacctatgcaatcacaccgcttatgaccatcctagagagggccctgagcaccagcttgatcttagggatttccaaagtaacctgctttttgcctggatagggttaaaatagacctttcttgcctatccttgccttaacctatctgcctgaggttggcctgagattgtgagtcaacgactttgctatcttttcctcagtgttgaactttcattaagaaataaagtcctagcttcttacagagaggggtccaaatggtgaatgctcatcctgcctggattcaaggaattagctcagagattggcccctagcttttctgcctttgtagggacagcaaaaggggaaaatttgctgcagaaaattccaaaagattgctgtagctctcacagggaagtggtaaagatcagctaaacctgggttggggtgctttctgcccagtgggtcttggcataagtagattaatcctgctcttttaagaaaaggcaacttattcaggcagtctggaaagggggttctcagaaaactcagtttctttattccttcttttctcccaactactgttactggttatagaggtctttggactctaaagaccaatgtttggccactaactggactaatatgtatctttctgtgatttcatcatagaggtctgttttgtgagggtttggggtgcagaaaactttgattaaatcttaatgggaggctgggtgacctggattatctacagtgagcagacttaaatggaacagaagtttatgtgtccaaatgatggaatcattaaacctgagtgacttgacctgtgtggttccttaatagtatctatatatctagacaaaaatagattgtgaatgtaaatggtgaatgaaaaggatggaaataatgttttcatatgtt

SEQ ID NO: 15859 - DNA, 1160 bp, Homo sapiens
aattggatcaaattatttatttattttttaaagtattctgggtctagaatgggctgtgcttagggttgttaagtatgtaaacctagagaaatggaacaatgagaggctatgaagtttgctgaatatggcttgcattaagcattaatgtaaaacattcattttggtttttaaaaaatcagagattaaaagctgagcactggcaagtctttttttggtaaggggccactttttactgtaattaaaattattgtcctcacgataatgtgagttttattgtctacctttgccaagaagtctgagatgatgatatttccagtccctttttaccagtgtgttttaaattagaaggactgatttaagaccttcctgagtttagcttcgtggcatgtgtgttttttggaaggcttagtgtggggcgagagtgcctagcactcacatttaggctgcattactcacctaccttgcctttgctttagtgcccaacttttcgacgggaagcagatggcagtgaaactccagagccttttgctgcagaagccaaatttttcactgagtcgcgactgcttcagagagatgttcagatcattctggagagctgccacaaccagaacattctgggtaccatccttcatccagtgagtgtgtctgtgcagactgggtggtgatgggctagggatgcatttggggtttgaagaataggggtttgcttctctttctctgtatttaacatccattaagatattggccagttgtggtggctcacgcctgtaatcccaccactttgggaggccaaggcgggtggatcacgaagttaggagattgagaccatcctggccaacatggtgaaaccctgtttctactaaaaatacaaaaattagcctgtcgtggtggcgtgcacctatagtcccagctactcaggaggctgaggcaggagaactgcttgaacccgggaggcggaggttgcagtgagccgagattgcaccactgcactccagtctgggcaacagagcaagactctgtctcaaaaaaaaattatggcaggattattattaatatctgctgatttttgaggcattttctagggagttatcatttgtcttacagaattggacaattttctcacctttaggaaattaatctcaagtgttattgggttcata

SEQ ID NO: 15860 - DNA, 1194 bp, Homo sapiens
ctgaggtaatatctcagtaatttcatgtttctgcctgtgagattaacagctgagcatctcctttcccatgctgagatgacaattctttttgcccttcacttgcctttgatttttctgctctctattggggcatcctattttggttctttctcatctagtgctggtatcttcttcaaatccaacccttgcctctttttctagattcacattgagattttgattttagtttagaagctgtttcaaggaaaatcttcaattacatgtagagacaggatttccagttcttaagctttgtagtgaaccacaaatctttgtcagggcaaaaataaaaaaagattgaccatctttatgaatgatacagattttgtctcattgagaaatcataataaggtctctgggaactgataattatagcatagttttctctgacattgttgcaccatgaaggatgatactgtttttcccacaaatggctattgatctcactttctacctgtgagggtggtgggccttgctcttggacatgtgatgggggccatagaagcaggtttaagcatgttcctttttgctcacaggtgatgcaggttctgaatgctgatgccattgttgtgaagctgaactcaggcgattacaagacgattcacctgtccagcatccgaccaccgaggctggagggggagaacacccaggtgagaatagggaagcagccgcgcctctttgcataaaccaaaaggaagaagttggagaattgattaatatatgacatatataatacatatatgtgggaatgcaaagggacaagtattttaaatctccacagtattattttctaatatttatagcctgactactattgggcaggtctcagtgtcttgtggcccacacccactgctctgccgaatttcacgtgggcactgttggcacttctccccagggggcttgagtgcagtgagggttgggatatgtgagatggtggatgagtttaattaacaagatcttatttttctgtgaataaggagaggagaaggtctgtatctcgtgtacattgtaataggacccgtttctgctggtcattttgatttgatagttctttatgtttttgctctaggaagaaatgaatcttggtatatgtattcactggggtcacctactcattttttgcaggtagtaactctaattagtagttaaactgtt

SEQ ID NO: 15861 - DNA, 1162 bp, Homo sapiens
tcatttcttcagatctgttgctaactaaatgtctagcacatagttgatactcaggtgttagatagtgtctcattgcatcctcactgggggcctttactcattattcatagtttggggatatagggatgggcagaatatgctgacacttggctttctgattctaccactctgcctttcctaggacatgttcctcatcactactgggaacgcgggacttttttcacatgctgttgtcttttgtaaggtgggccacaattaggagaaagccacattcatattcgtatggagctgcctttagcagcatctgcttctccagctggagaggcttgttttagaacgactggcatgcggaagcggtaggtggaggtctgggaggagctgcgtagccagggctccccttccagcctcccgtctcccttaggctctttctggcctgaggcatggtcgccatgggtgggggcactgcccgcccgattctggttggaccccctttcctctacttcataccgcagctgctgtgagcgagtgcactgtgctctgcacaggagaattggcagacagttccatatgctggttttggccattgggacattcaggattattaggccagtttgtactttaagaggagggagacttgacatcgctcaaagcagcttattttatttatttctatttcttataaaggggaaagaagctagcccagcccttagctgttcctttcaacgtagccggctcaacgttttcctcaggaaaacatgcagggttcctcacagctgcttgagccaggctctgtccttccttcgcagattgccccgtggctgcctgcctcttcactctcctaaagctttttggctttaccttccttccctcactcctcccagtcttccctcagaggactgactggttctttcagcctagacactcctgtttgcctgccaagttacccttcttccggaggtgcatagcctcagcactgtcagagttcaggagaacagaagctcctccagtgagaagccagttaataacagcttttggacccattgttgttattattagatatccataaaatctagcaggtagagaaccgtcactggggctctgctggagagatatgtctcaatcctaaaagatacaaattagtcccagagtacctgataccgta

SEQ ID NO: 15862 - DNA, 1164 bp, Homo sapiens
ttatgataagatgcaagagggacacaccccaagtggtgtgggcattcaaaggagaaagaaatcccctttgacttgttctttaccacttggattctagtggtgttcctggtttatctgttgtgaggtagaaaccaaagtacagggcatgcagagactgtttatcactgggcacagttatggaggtaactaacatgttaaccccccacccccattttattcttgcttcaggaatttttgtctctgttttctccttgtaaactcttttgccatccccattgttgtagaagccaatctcctacccagacaaacaaacttaacttttttggtggaaattgatggtgagcctgttacaagggatggaactaaattgtaagagtgtccaaatcccacaaacctgccaggtgttggtcattaggtacatgtttgaatgttttcaatttgaagagattcctctacagtctgtgggaacctcggtgtgcaaggtgttttcccttgaagctttctttgcctcttacctagacattttgtgaaggcttctcctcaggcagcccttgtcattttgctgaatgtcagcaaacatttactgtcactgctctgatgtcagggaggaaggtgatgcttttactttctagcaaaatagcccccaacgttttggtagcactacatttaaaggtcaccaccctctctctccttctcttccctcctctgtcctcattgtcatctttataacctgtcccttctgaaagttgtttttgaaaaagcattgaagctgtgttttaaagtgattggattcagtaagtctgaaggtgctagtgttgatggtgaacttgagatggtcaccttattccttaggaggaagttcatggtttctggctcttggaagaaagtggttgtgtgtatgtatgcgtgtgttataaggggaatgtttttggcttaaactatgtacgcctatcaggcttgggttatttcacagtttgagcatattgtaattctgagtatttttcctgttgaaattggccaaggcaatcatggctatggtagaagtcttatctgctggtgacatcacattctgcttcccaggccttccacctgtattttatcgacgggcatgtaaactacacatagatacaaatatttttcaaatgtgtaatgatgctagttcta

SEQ ID NO: 15863 - DNA, 1126 bp, Homo sapiens
ttatgtaacataacttgttctttacattttaaaaatagatgtagaaaggatgtgttaaaaaaaaaatagctgcgtagaaagcacatatatggataaagcagtgattttaaaaaatttttcttctaaagattttaaaagtcaaatcaagaaagtaaatgaatttggttgttttattgccgaaacagacattttgacgtcatttggcaggaaagccattatggaaacaggttattttttgacaagctattatataaaatgggcagacatttgaattatttaacatcccttttatcttttagacatttttatttatggggaaatcaatatcattttaaggtttttctcttatgtattcattttttattttaattattattttgagtagataatgcatttaattggtttaaaattcaaatgctaataaagggtataagttagagacctttcttttgccctagtccttcacaggttcattttaccacccaagaagcaattagtattacgatttccttgtaagtcctttcagggttattttaggcctacccgggaagatacgtttgtgggtaggtattctccctttttacacatatactagcatcataaataagtttaaatttcatacataccaccaaaaatagtgtctttgcatttgtgtttcaattctatgtgcttacaagtagtaaaggattatcatatttgatctgtacaacttagagaaagcttgcaactttcccgtaaaattttagtctagttttctctatggccataattttcctacttgaaaatgcaactgtgaattctactaatactggtgatattgttcattctgtctttgtttatgatactgcattttttttgctgttttgttttaaataacatttactgctcattttttcaatcataaaagcacttgtttattctaaaaatgttttttgaaaaaaagagaagataaagggaaaaaacccctaccattcagggtagcatctgttaatacttgagtgtgtattactctaatccttttttaaatgcacttgtgtttgcataattttcaacttagctagtaattatatgttacttactgttttgtaacctgcaatatgatggtttctccatgtcattaaatagt

SEQ ID NO: 15864 - DNA, 1133 bp, Homo sapiens
gtaaggtaggaaatacaaagatttaagaaaacagtatatagtaccccatgtctgactaaattatcttttagaattctagagtgaaatgatgctctgatgttctaatctagtgctctcgtttttaaggtcaagggaaactgagacccaaagatgttacgtgcctcatttgtaagggagcttcaagtagcaccaagcaagagcccagggctctttgtggtcactcattgctataaacagggatcagggtctgagtcagttatatagcccttggtcatgtattcgtaaaatacttgcatacaaaacatttcaggaatatcttaaaaaggagaacccatctatattaatcagtttcttctctcatgccgttttatacatacttacccacaaacacaaaattcaggttatcatttatttagacgaagatgttgctaagatttacactggttttaattgaagctgttaaaaccatggttctttttcaagtgattgacaggtcagtgttgaatatcttgagatgaaaaattccagggtagaggaagagatctcagaatccacaggggagggacacaaatgctaattacacattgactttaattcctgatttgtcatagctgcctgcaggtgtatatcttggctgtgggctattctccgggcctcatttgtatttcagattttctttaataatgttgcatccacaaataactgtttaatctctgacttatttacagttcttattctcttgatatgggaaacaattaattggcaggtgaatgtagttgtttcttttggttattgaagattaaaatttttttgtcttcccactgatttccctggaagacagttttggaacagcacctcactttggccttctggcctgagagatacacaggtgttcacttttgtttgttattcctcctattattactcccacacatgtggcatagtgaattagccctcttgatgaattagctctctctctgggttgagagctaatgttcctctgtgctaaacagctgctgtcccacccctgtctgcctactgagaaggagatttggcattgggaggcacaaggtaaccttgagattaacttagtttttttttttaagcagtgctgattttttccctaggtagta

SEQ ID NO: 15865 - DNA, 1175 bp, Homo sapiens
attgcaacttaatggatatttgtaaagtggggtattctttctcttgggatatcccagtttgattctgtctccattgcctactttctgttgggtcccattactagaaatgggcagcttaacatgagactttcctggagctgctctagttctttacttttaaagatatcattataggaattataagaattatgttcatgtccggggatcctggagagtcacttacaggaaagaattaacacaatgaacagatttgggtagtgttttttaatgagtacaagatttttacaagcacagattaagaaaagtagtcttcaatagataaattttggatgatacataaattagtaggataacttctccctcgaatatcttttagtctagttatgtagatggccatacaaataatgtaaacaaggaaatatgaaagagcagttatcaaaagcataggccacctagtatgagaatacagagcaaataacaattgttgaatggaaaagttttcctcagggcgatggcatttgagtttccgagaagatctgctacattttctttgggcagactgggtttgattcatctaggcagaagaagttggcctgtatcagatctcaggaagagttgcctaaaagaaatggacatattaatcaatcatttttctctccgcttttgtattggtgtgtaaatctccctcttagctcttctgctattgagccttcactgctccaccttcagctctccgtctatgcaggcacactgtcacccactggtcatgtgaatgaaacctccaattacaccaggattattttcatctttacaccatgaatcatccccagaatgagcctcatcatacttgtgggtcattcaattacatggttatttaataatttttttttatattcagtgggcacaatgctaggaatacagaaatggatgatacagttccagcctttgagcaaagtaattgtgtctactggagtaaagaatgtattgacatgaagaaaaaaatattttaaaagcataagggtaagcaaaacatggcttaaatactatacaaatgagaacagctcagattttataaaacaataagagtaaatatgtaactgctgtcaaaaaggctgtttcaaaactcggaaatacagaacgcagagaggagtggagccaggtactgacccagccca

SEQ ID NO: 15866 - DNA, 1264 bp, Homo sapiens
tgaacatattttttagagatacatattaaatgaagtgtttaaggttgaaaatggcatcatgtctgggatatactttaaaatgcttccacaaagaaaagggggatagagatgaagcaaatatgacaactttggtagttgttggatctggatggtggttatatggaagttcattagtatcctattttcagtattttgaatttttcacatcagaaaagggttttaaatatatacatacattttatataaatatatattaatgttgaagctccccaggcaattttaatgtagaactaagattgagaaccactagttagtttaggggattaaatttggatcaccatgccctaaaagatgtgttttgtctttggactttgtctaacctaagcctgatttttctggataagttttcatgagtaatctggactcttggtaggtgggggacaggatggcacaaagatcaaattagacctgtatctggaatctgacttcaggagcgtacaactagacaatattgtctcttccactggatgaactcactgtaaccgccctgagagctattataccttggagtttacctgcctcatcacttgccagcactgcatgtcccatcctatggacctctctggctacaccagggcaatggaagacagctgcagctgcattgtaacacatgccacaagaaagccccagtcccttaagagtgctcagcagtttgccaagcggtatttgcctaaagctggggcaagaggactgaaacttgtacctccccccattcccaggagtccacatgccctcagctctgcatccgtatgtgtatgaggcctcttttgtgtcttcagtgcctattccaactcccaagcactattttgctctggctggtcagcaagtgggacgagcagcagcttgctgcagccaacctaaatggagctctggagctcaggctggaagcttccatgctacatttacataccacatccttgctcaggaccctagctgagcaccttttcattcaggggtaggctgctagttcttctttcttggggggttttgtgatttacacctaaacattaagctatgaatagtttatgttttgctaagcaataccgaagcagaggaagcgttatggactgcccaggtcactcagccagcccaaaggttcgcatgacaccctcccttcccattgcccctggacccctgagacagccctttccgccagtgcctgccagtgcacaagtcaccccctgcacctctgtagaagggcctg

SEQ ID NO: 15867 - DNA, 1561 bp, Homo sapiens
caggccttgcccgcaggtcaacgtggggctaaaatgaagaccgctcttagttcatgttctggcatattaatcagggtgacatgataaaaagaatttatctgaaactcatagaacagggcaaggtttaagttcatattttgcagaaaacactttccagccttcatcagcgctaatctgtttttgaaaatggccttaatcccacccactttgctccctaagtatttataggagctgagagtcaaaaaagcacatgtcagaaatcacctttcttccttttcctacccttacctcattttaatatagactttggcaacttctcaaagtacaatgctcagtttttcagtctggttcaaggtgcttaaaggtagtgccctgtaatacaccattataatcaattagtttcccttctccttgtccctttccaacagaaatgaaatgattggtaacaagtatgagaggggtcatgggtgaccttgttcaagagaaagatatggctgcagcagccccaggacaccactctgcctttccccattgctggcttcttggtgagcagcagaaatttggagctgtacaggaatcagatgtcccacctagcaggctctgccggagccagacatagccatccactctggcagcagcctatcgaagggagagaatcctggggcagcagcctaccatgctgccccttccactttagatagggccatgcaatgtaaatacattatttgtatttacatttgggtcatctgcaaaccaaagcgatctcagcagctgctggaatgccattggtacagccataccaacatttatattattcaccctgatgtctagattgctattactgacattattttaaggctttttctcccttaagagaaagctcttccagccctaggctgcttaaatagggaggaacaacttcctttttttttttttttttttaagagacagagtcttgctacgttgcccaggctggtctcaaactcttggattcaagagttcctccctcctcagcctccctagtagctaggactatagatgtgcaccaccctgcccaacaaaccttttttttcaattgaggaatattaggattgagatatattatggactttctatacaacttggggtgttttcttcaggataagtatatttttaatctttaataatgataaaatactttactggcacctaaggaacaataaaatactgactaagaggcctgaagaggcatctgctcctatctctagaatttgaaaccagtcgtttggtgagctctcatgctggagtgggcatggggccgtgtgggtggcagaaaatcaaggggtctcattccactgaaatgtcatggttacctcagcctatggctggtgtttgccctcttctctccaattcggtaaggaagaaagctcctttaccaaagcgtagagtacctgggcagaacacccaggaacctttttctttctctaaagtcacatgatagatctcaccacagcagtcaatttcttgttcttcctaactgcccctaccctccttgtgtagattacatgtctttttctcttcc

SEQ ID NO: 15868 - DNA, 1243 bp, Homo sapiens
cctcatcctctatttctgaaacagcaacttcctccgcaatttcctctgaatgcatacccaggaagctgttttaaacagcctgagttgtgtcttgtggcactaggaaagggagtaatttcttgctttttcacctggtcctagccaagtcccaccctttgctctcctgcagttttctttctttttattgggggtatggtgataaaggagaggcaggaggaacggatctttggtgcctagaactgtgagtggtagtttataagtgtgtgcccatacatatgtgctggcacactgatacccagaaatgatgtatatacccaggaggattaagaattggccctttcttagccaactgctgcaaagtgctgcctgcctctctttccctccttagtgccaaagagttcacacccactcagtcccaattccctgcattagtataaatactagcactgaagaaatgcagggtcctgattcacgcagcctctctggacattattacttggtaagcatcaggagacagacacctaccaccaaaacatgtttagattatttagcacccagagaacagaagcaacactgcctgtgggaaatttaagccaaactacattattgcaggcctctgaaatccaggtcccccaggttcctcgggtagagctggtgctgcctgaccagcagcttctgctgaggtggcatttaacttttggccaggtcccaggagctgaggctgacccatttcccctgcttttccagggcatagggaatttgattatacccccaacaaagccagggactaacacagttagcttgtagaaggtgcactagaatcggggtgcttttatttaagctaaggaaaggttgacagctttagcattttcccatacttgaaaataatttaacatttgtctttcccccatcatacctgtaccctcccctccccgcttttttattaaatagaaatgattggctcataagaatctataggttcagggtcttactcaatttaaccctttggggacattgaattaaaaattcaacaatatttattaaaatacaaaaatacacttttctcacattacaatcagtgttcttttgttggcaattcccctcccccacccataccaccccctttcaaatctgaaccccttatttccttttaaagctaaaataataactgaaagaagttacatcattagatggaccagaataacagagatctctgccttccccacccacgcccaccctttct

SEQ ID NO: 15869 - DNA, 1190 bp, Homo sapiens
tcgagctctacatcaggctgctttgccccctgtaagccagctgggccaggaaagcaccactgaacctactaactggactacagaggaggctgtggggccgtcgttgcacacagcccttctgagctgaaagtgggattgcagcctctcattttggtaacccaagtaccatctagctatggcatcttgctcctcacagcccgtggctctgactgcttcttggatttggaatggtgccaccaaagaataagaaggaaagaaggctacttacaccctaagaggaagagacagtggattcagattgttttcacttgcagtttcacacagggagactgctgtgataacgccagagagagctaaaaaagccagcagtgattggggaaggcctgtgtcagcagcctggtattatagaatgagccctgtgctaagattgggatacctgagttctagtcccctttagacatgtgacaaatcttaaaatagctctaaacatcagtttttccatttataaaatcaaggaaatggattagaaagtttcttaccgctctcttagtccatgattcctgtcccatctcagatatgtagctctgtgaaggttgatcctttggaattgtagccaagtcttggaaatgggccacaaagttaagtgagaatgctttcttcatttaatctagagatccacagtgctggagcagagcaaatcggactgtgttttcccagctactaaaaagacacatagatcacagaatgttaaactaaagtggaccttggagattatctggatttaacctctcactttacagatgtcactgatgaagctcagagaggcacagtgacttacctaaagctacatgactgattagtatcagagtctgtcctttttgacctcagttcctctaagtaacaatgtatggctaattggcatttaaacctgggccttgaagatatttccaaatgcctgtctaatgtgggcttgtatgccagtgcaactatactttgctggattgggataaagaagagtcttcaatagcaccagtctgcacttcctagtgactttgggtcgccaatagaaaatgacagaaatggtcatctagaggacccaggactctcccacccagccaggataattgggttccttagtaaagcccaaggctagaccactccctaacctgatatgcatccctgaggcatta

SEQ ID NO: 15870 - DNA, 1243 bp, Homo sapiens
tggccggctgggggacagtaacctgagtatctggggtgtacccagccttgtcccacttgatcccacaagggctgccttacctgtcaagagacagtggttacaagatcctgttagcatcaggatgcaggaatgtttgtgcctgtagctaaccaaggaaaggtaatgctgagggattctgtgagaccaggaagtgcagaaggctttagggagtgtgattgtgtgtgcatgcattcgtgagtgtgtctgtctgggggaatctgagaatgctggtttcccagctacgaaggcttaactacctccctgctgagtgtaattcctccctgtgccctgtggatgcctcctcagtgaagaggccgatagggctctccacttccttggcaggaggtaacccccacttcctcctcagcagccctgggcagacctgaggaccaaggagggaaccacagatggcagatgcctgtcccccctccttaaccccatctcacacacgtgctcagcagggccctgcacagggctggattggccatcgattggcttttattgagcttggcttccctgctgcaggcctaaaggcctccgccaccttggcccctcgccagccccacccctggagccttgcaagcagcaatgttaaacaggatttagaaaggaaagactccagccagtggattctctgtccacagtcctcatcacctgccaagagaaggacctgggactccctgaggaggaaatgcagggaagagagagagccagggcagggagaggagaggagagacagcctccattcctgacctgcctggtctgtgcctggcttgatgggctctttccctcagggtggccgcagcaacagaacacaaggagccccaaagtgtagaggggacccgagcaagacaggaacttgcatggcagagcagcctggagcagatgaacaggcaggaggggcctccatccacccttcccagtcttgctctgtagctggggccaccgggggtaccagcagtgccccaccaggggcagagctccaccctggccttggcctggagagacacttcccccacctgaccgcaaaccctggcatcagtcagctgggacagcctctccacaatagcaggcttagtaacagcctctccacatgcttagaggtggtccatgagaagggcagactgtcctgtggttggctctcccagcattcctgggccctgctgcttaggtcaagctcaggacccctgttctctgcccagct

SEQ ID NO: 15871 - DNA, 1258 bp, Homo sapiens
aattcccttgttggttctgatgcctgccagaatttgagaactgctagatcaggactttagagaactcacctttcccctccgagatagagggcttcaggggctcagcctggtgtgaatcgagtgccccacagtcactcgcccagggccgatcccatttgcccaaaacccctttcccagtgtcttttttttttcttcttttttgagacggagtcttgcactgtcgcccaggctggagtgcagtggcatgatcttggctcaccgcaacccgtgcctcccaggttcaagcgattctcctgcctcagcctcccaagtagctgggattacaggcgcccaccaccgcacccagctaattttttgtatttttagtagagatagagtttcaccatattggccagtctggtcttgaactcctaacctcgtgatccacccgcctcggcctcccaaagtgctgggattacaggcatgagccaccacgcctggcctcccagtgtcttttatgacttcacttcctcgccctcttctcacctctgccgactgaacatgcaggtctgggcccactatgaggagcagcccgtggaggaggtgatgccagtgctggaggagaaggagcgatctgctagctacaagcccgtgtttgtgactgagatcactgatgacctgcacttctacgtgcaggatgtggagaccggtgagtgctcaggccgctggctcgtggttcctggcttggtccagctggcgctgcctgggggtagggggcctctgcccagtgggtgggaggaacaatgcctaggcagtccaggagcctcccctgaagagctcacgttgccgcccctgtctccctgccttgtcccactgctcctctgggcttggagttacttcaggagccttcacatgagccctggcttgggctcaggcatggaggtgctgccggacaggtcctctggacgcaggtgagataaccaggtttatctgggtggagctctgagtctcttaggtgattgtttgttcctacatacccctggctatgctgggcaggatgatttgtagcccccagaatctgtcaggcaccagccaggcattgctcagcccgtttccctctgggggagcaaggagtggtgctgggtttgtctctgctggggtttctccttctctagaggttaacatagccctgagtgatagccagtttccatggaaacaggcagcgctctaggggaagacatccccgggcagtctctgaaggaccttctcctccttccgt

SEQ ID NO: 15872 - DNA, 1258 bp, Homo sapiens; identical to SEQ ID NO: 15871

SEQ ID NO: 15873 - DNA, 1135 bp, Homo sapiens
tctgtcacccaggcaggagtgcagtggcgcaatattggctcactgcagcctccgcctcctagcttcaagcgattctcgtgccgcagtttcccaagtagctgggattacaggcatgcaccccatgcccagctaatttttgtgtttttggtagagatggggtttcactgtgttggccaggctggtcgccaactcctggcctcaaggggtccacccacctcagcctcccaaagtgctgggattacaggcatgagccaccgtgcctggccaacctcactagggttctctggggagaaaattacaggcccctgctggccagactttcttgggagtctatggacaggagctggggcccaagtggttgttctctggcttgctctgacctgagtgtgtctctgctccaggatgatgcccgcacggacgccgtggacagcgtagttcgggatatccagaacactcagtgcctgctcaacgtggaacacctgagtgccggctgcccccatgtcaccctgcagtttgcagattccaagggcgatgtggggctgggcttggtgaaggaagggctggtcatggtggaggtgcgcaaggagaaacagttccagaaagtggtatgtgatgtggagaggcggccccagcattgcgccaccaccctcacagagaaagggactgttccacaagccaggaagggagcagggaatccaccatcctgctgttcctgctgaggaaagataatggatttgggtttgttggtgtttttttgtttttgttttaaagctaattacatcccaaattaattggctgcgggtttggctgagaatgcagctgcaaactagagcggaaagcttccctccccatgtacccccaggtgacaggcgagaaagctttgccaggggctatgtggagagggtcaaggcctgtccctcccgctctcccagtctcactgtccaacagacagcttccaagtcaataaccaactcctaacacccagtgccaccccgagccagagctgtcgaggaggcagcaccaaagggcccagaaagactgccacacaaccctctggctatttggaaagccccttggacttggagtcctgcctccactgttctgagaggagaagccagcctcctgagccccatct

SEQ ID NO: 15874 - DNA, 2180 bp, Homo sapiens
taattcagctctgtagtcttacacactgcaggaactgtctaagcgagagcagagagaaatgctttctaacctaatcgctgcaggcggagacacttggaaaagaatggggggaggtggggcctgacagagagcagcacttatgtgtttgtcagatgaggggatttccagttgaattggcctgcagtggcctaaagacactagcctggttagcgatgacctgcatttctctcatagagcacctcccttttcatcgtatccactagctctctaagtcctccttaatgaggacacttgatcctcattaagtctgccccttaagatggcttcacacctactgaaaaactccaggggtttgacatctcactttgattgaaatcttgtcttcctataacatttgattccctgggctcttcagccctatcacctctgcttgtctttatccactctcttcttcattcacttttggctacacaggccttccttccatctcttgactcttgaccacctcagagcctttgtatccgttccctttgcctggagagtttttcccttgcatcttttacttgtcactcagatctccactagttgtcgcctcctcctggagctcttcccagactatctaaagtagggcttttcttcccctcccctctatcttgcccccttactgaaatctgcttccctgtttcttcttcttttttttttttttttgagatggagtctcactctgtcgcccaggctggagtgcaatggcgctgtctcagctcattgcaacctccacctcccgggttcaagcgactttcccgcctcaccctcccaagtagctgggactacaggtgcacgccaccattcttggctaaattttgtatttttagtagagatggggtttcaccatgttgactaggctggtcttgaactcctgacctcaggtgatccgcccacctcgacctcccaaagtcctggtattacaggcgtgagccaccacgcctggcctgcttccctgtttctttctagcactaatctctatctgaaatcatttgtctctttctagcactaatctctatctgaaattgtttgtctctccagttagaatgtatgctttgtgagagggactttatccctcttgttcactcctgtagacacagcacctagtactgacccaggcacgtagtaagtattgaataaatatttgttgaatgaaaaaaataaggtaggaaaggaagaaacagtattcagtaggcaagagaaaaagttgagaacgtggcccaaaattcttgattgcttagtctagttgagtgttacaaataatgctttgacagaaccattgctgagctagagatatggttatttcttttttttttttttttttgagacagtcttgctctgttgcccaggctggagtgcaatggcatgatcttggctcactgcaacctccgcctcctgggttcaagcgattctcctgcctcagcctcccgagtagcggggattacaggtgctgccaccacgcccggctaatttttgtatttttagtagagacgggttttcaccatgttggccaggctgatctcaaactcctgaccttgtgatctgcccacctcagcctcctgaagtgctgggattacaggcatgagcctggttgagacatggttatttcatcgcaatatcttggggaacccatgaatgctctgaaatgcctttggtttagaaatggatgaaggagaggccatggaaatatttagaccttttggagagatcgaaaggacaggtgatttatctccaagttcacctcgagacatgacttgggctgtcaaatgttcttacggtagcctggcaacatgtctttctcagcctggtctgtacagtgtggaggaagtaagggactttattaagagtgtcacaatagctataacctgccagtcaggtgatctgtttttccttggccatctctccgtctgctcaccactcttttttccctagtacacgaatatctttaacattcaaaaatatatcttaacacttaggatagatcaaaattggtgttcattcagataacattgtcagattctcttagatccaaatatttcttttaacaacttaacagtatgttaaaacctcattcacttgcttggagagctgttgtacagttctttaaagagttctttatatgaggttgaatcttccct

SEQ ID NO: 15875 - DNA, 1141 bp, Homo sapiens
tctttccaagtagaacataagctccattagatgagctgggaactcatccaccttgttcactgccatgtccccagggcctgtcctggtgccggtgcatgtaggagctcagtgagtgagtgtccagtgggtgataaactctttacgtgggctgtgcctccatcctcaggacctgacctcagccctgacccggaagatcacgctgaagacgccactgatctcctcccccatggacactgtgacagaggctgacatggccattgccatggctgtgagttacacacctgcatggggactccagggcacacaggaactgaccatggtgggctgtgctgaggggcagggctgaggaggaatgggccccggctctgaccacacttcccttctacatcagctgatgggaggtattggtttcattcaccacaactgcaccccagagttccaggccaacgaggtgcggaaggtcaaggcaagtaccaggcctgtccccagcaagatgccacctggcagtccccacctcagaggccctcccagcctcccctgccagccctgcactgctacactccctgcgtgtccttcctctcagtggagccttggggccgagccctcattttcccactggctcctcatcccactgagggtcctggcttctctgcagcacagctgcatcctctgttccctgtggccagcctggacatcatccctggctttcttccagccttttcctcccccatctctgcccgcagaagtttgaacagggcttcatcacggaccctgtggtgctgagcccctcgcacactgtgggcgatgtgctggaggccaagatgcggcatggcttctctggcatccccatcactgagacgggcaccatgggcagcaagctggtgggcatcgtcacctcccgagacatcgactttcttgctgagaaggaccacaccaccctcctcagtgaggtacctgcagggcaggggaagcagggctgggtgtagagaggaccctcacgctggggcctcagactggtgcctgtgaccagggaccagagggaggcctggctccttctctctcacctgccaacctgcaggcaaatgttcctggccccacaggtgatgacgccaaggattgaactggtggtggctccagcagg

SEQ ID NO: 15876 - DNA, 1193 bp, Homo sapiens
aatgtttaataaaagtagcaataactgacatttgttgaaagccaactatgtgccaggcattgttctaagcacttagatatattttctcatttaaaccttacaacaatcctatgaagccggcaccattgctagctccattttacagataaaagagaccaagacacaggccaaacagctagaaaatggtagagttcaaactcaggcagtatgggacttgagagccaccactgccttccagatgtaactagaaaattcaagccttctagtagccttaataccaatagtgaagcataacagtgagttacatagttcaggagccagagttccatgtgaacttggagctgactctgagatctgatgcctggagctgtagcccaaaactaaatgtctttgtactgctgcagttttacctgtgtcatcaattatttcttccttgcatggttttatctttattggaaattgatttcccaccccacacattttcatgttttctgaaagtcttttaagatttgacctaaatttttgttttctagatgatccagatcctgatgatggatttaactataaacagatgatggttagagatgagcggaggtttaaaatggcagacaaggatggagacctcattgccaccaaggaggagttcacagctttcctgcaccctgaggagtatgactacatgaaagatatagtagtacaggtgggtgagatgaaggattctgaacagggactcagtttctctttttgtggcttattctgtctttcccctttagccttatatagcatatcttatatatatatatgctatatagcatatcactgtatatgctatataagtattggccagattcagaatccaaggtctgtcactgtttttctgtgaccttgatcaaggtgccttgggcattctgtttagtatgataataccttctgtcatataatgtattttgccatttcattggtagcttcatattgtaagaatggggggaaatcccattatttaaaatatcccatgaccaatagtcagacattgagtaataacagtgatactaaagaactctcacagaaggcagttactgacaacatagactatctatagctaaacacataatcactggtcacatctcctgttagtgtgactttagcatgactaaggctaccaggtagatcatcatgggcttgatgggatagtt

SEQ ID NO: 15877 - DNA, 3027 bp, Homo sapiens
caagagcgaaactccgtctcaaaaaaaaaaaaaaaaaaaaacaaggaatgtgtaattgctgttttcttccctcttcgtatgtatgtagggggaatgagggctgagtagttcacacttaatttagtagaaatgagaatcttaacttctgattaaccccaattcttctataacagtgtttctgaatttttaatgggaaatatgttcttcttcaattcattgctatctctactttcaggatggcaagcttaccaaggaggagatcgttgacaagtatgacttatttgttggcagccaggccacagattttggggaggccttagtacggcatgatgagttctgagctacggaggaaccctcatttcctcaaaagtaatttatttttacagcttctggtttcacatgaaattgtttgcgctactgagactgttactacaaactttttaagacatgaaaaggcgtaatgaaaaccatcccgtccccattcctcctcctctctgagggactggagggaagccgtgcttctgaggaacaactctaattagtacacttgtgtttgtagatttacactttgtattatgtattaacatggcgtgtttatttttgtatttttctctggttgggagtatgatatgaaggatcaagatcctcaactcacacatgtagacaaacattagctctttactctttctcaaccccttttatgattttaataattctcacttaactaattttgtaagcctgagatcaataagaaatgttcaggagagaggaaagaaaaaaaatatatgctccacaatttatatttagagagagaacacttagtcttgcctgtcaaaaagtccaacatttcataggtagtaggggccacatattacattcagttgctataggtccagcaactgaacctgccattacctgggcaaggaaagatccctttgctctaggaaagcttggcccaaattgattttcttctttttccccctgtaggactgactgttggctaattttgtcaagcacagctgtggtgggaagagttagggccagtgtcttgaaaatcaatcaagtagtgaatgtgatctctttgcagagctatagatagaaacagctggaaaactaaaggaaaaatacaagtgttttcggggcatacattttttttctgggtgtgcatctgttgaaatgctcaagacttaattatttgccttttgaaatcactgtaaatgcccccatccggttcctcttcttcccaggtgtgccaaggaattaatcttggtttcactacaattaaaattcactcctttccaatcatgtcattgaaagtgcctttaacgaaagaaatggtcactgaatgggaattctcttaagaaaccctgagattaaaaaaagactatttggataacttataggaaagcctagaacctcccagtagagtggggatttttttcttcttccctttctcttttggacaatagttaaattagcagtattagttatgagtttggttgcagtgttcttatcttgtgggctgatttccaaaaaccacatgctgctgaatttaccagggatcctcatacctcacaatgcaaaccacttactaccaggcctttttctgtgtccactggagagcttgagctcacactcaaagatcagaggacctacagagagggctctttggtttgaggaccatggcttacctttcctgcctttgacccatcacaccccatttcctcctctttccctctccccgctgccaaaaaaaaaaaaaaaggaaacgtttatcatgaatcaacagggtttcagtccttatcaaagagagatgtggaaagagctaaagaaaccaccctttgttcccaactccactttacccatattttatgcaacacaaacactgtccttttgggtccctttcttacagatggacctcttgagaagaattatcgtattccacgtttttagccctcaggttaccaagataaatatatgtatatataacctttattattgctatatctttgtggataatacattcaggtggtgctgggtgatttattataatctgaacctaggtatatcctttggtcttccacagtcatgttgaggtgggctccctggtatggtaaaaagccaggtataatgtaacttcaccccagcctttgtactaagctcttgatagtggatatactcttttaagtttagccccaatatagggtaatggaaatttcctgccctctgggttccccatttttactattaagaagaccagtgataatttaataatgccaccaactctggcttagttaagtgagagtgtgaactgtgtggcaagagagcctcacacctcactaggtgcagagagcccaggccttatgttaaaatcatgcacttgaaaagcaaaccttaatctgcaaagacagcagcaagcattatacggtcatcttgaatgatccctttgaaattttttttttgtttgtttgtttaaatcaagcctgaggctggtgaacagtagctacacacccatattgtgtgttctgtgaatgctagctctcttgaatttggatattggttattttttatagagtgtaaaccaagttttatattctgcaatgcgaacaggtacctatctgtttctaaataaaactgtttacattcattatggggtatgtatgaccttcattttccaagaaatagaactctagcttagaattatggatgctctaaaatgtcagaatgggaactctcctcgaagttctcccaaactcagagacagcactgccttctcctaaatgattattcttttctccctgttttctggtattttctagcatccttctcaccacagccataacccttttttacttccattaggccgtataactggagagacctgctgctcgttatataattatctgataccaaacacaagcgattctgaatgtacacacacgtttatctatagagcataaggtaaaacaattttgtttaacattttggtattgtttacaaatgttattaaaacatgcaaattcattt

SEQ ID NO: 15878 - DNA, 1201 bp, Homo sapiens
gaaccaaggcccaggcagcagaaaagacatgcaactgctctagcttacctgttttttaacctcttgattcctttctcttttccctttgttttctcatcttcattatctgttggatccatgcgtttatgtctcacatctcctggtctctcctcgtgcttctttctcattttggtgtgttgcagtcatcccctacccccaatccccccatcttctccttgcctcttgtaggcctggtggtcatctcggctttgctctggtgctggtgggctgagacgtcgtcctaatgcaggtactggtattgcttcctctccttctgagggatagagggagggtgcaggttgccctggcctctcctctttcccttttctcccagctgcttgcttcttgcttgtgccattttataataggtgatgctcaggtctgagttttagttctgacttttccttgggctactgcaaagcctctgacatctctgagcatgtcttcgtaatgcataggaggttggaatgcttgccagagacatggtttgtttcaatccttggctgggaaaaacttggataagcccagcttggttgctgctgtcaaagctgcctcactacttctttatccccgctcatcctctgtgtgatggctagcctgaccacttctgatgagctgatatttgcaaggctggcctggactctctttgtcttggtttaactccggagccaagttctcactactgttgctacccaagatggcaaaataaggaatccctcttctgttgggagagagaggagctctgaagagctctgatcctcatgatcctcccaggggcattggtaggagggcaacctaagctggtccatcaagcttggtgaaatggaaccgaacccctactgtattctgctctttctactgaacagttctctgcttctggacttccagtctccggaaaagtcagaacagaatgccgggaaattttattagttatctatttatctattttgtgggccagattccatggtaattggcttccccagctaggttttctggagagaatgaggtattagtgaaaagtttctactagccagagatgtgtgttctcaggaaatcaagactgatatattctggccactttcctgtcagctcccacacatgtaatgtacactgtcaacaggataccaaattcaggaggcagaatgtggtcttacggcctaag

SEQ ID NO: 15879 - DNA, 1208 bp, Homo sapiens
ctgtacagtaatgagcttcttctctcggggtttgcggtcaggccattcttccccaaagcagaagaagatctcgaagggtggtggggtgttggtctggcccttttggaacaggatgagctctgcatcaaaatcaaggtccctagtcagaggctggaaccatgccctgggcaagaggcagccaggaggatcacagctttgggccctcaccattgagaaaatgctccaggctgaaaagcttggtcttgacctcccgctggatggggttggggcatgagtcatgggctgaggcacaaggcccgctccagaacaccttgcactgacacaggcggatggcataaaggtcctggccctgtagctggaggatgagcccgcggtccaggacatccagcagctggttcgtgtagaagcgctgcttgtcactggggatgtcctcagggctggggaagcgcacttgctccaggcttatggggccgaagagttccacctgctcctgggtggcctccagctggctgtagaagagccggcagccatgggggttgctgatggtgagggcccggggtggccgcccccggtactgaaacttgatctccaggtcggtcactgtggggcagaaggcaggcccatcccgtccttgagccccacgcctccccattctgcagcccagtggccaggcccagccccatccgccctcccacttttcccacccaagggagtccagcaccctccaccctccttgccaatcctaccccaatcccccagcactgcttccccgtgcccagccatgggtccttacgaggcagcatgtgggggctgatcagcaggtctggcaggagctgttcgcctgcagggggcaggctggcaggcaggggcccaggctccaggacctcagagagaagctccctgaagccagcagggttgccagggggaggagccagggggctggggtctggagcagggggacccagcaccacgggcggctgcagagtgggcggctgcagagtaggcggccgcagagtgggcggctgcagagtgggcggccacttgacatcctctttgagtaaagaatagggtgtcatgtgggggccagactgcactgcatctacagagagtgcgtgtggacggctgtcagtgccacctccacgaactgcctcccaggcacacctcctcccagccctgggccaccctagcctcccatcagcccccttcca

SEQ ID NO: 15880 - DNA, 1720 bp, Homo sapiens
ggcaaagccttctttcaaaataaaatcgacatgaagcctgtgggatttagcagactgaggcaaagcttccctggttgctttggaatgggaggcctggacctgctggctctttgccctcctgacacatcatcccttgtttccacagcacactcagcattggaagcacactgcagacggtgtctcattaaagcagtagctcccttgaacccacaagttaaaacgccagacttttatttatttgtttattttttctgagttcttattggcagacttcagaatgaggtacctgaggaaatatagaaacctctgccttaaggttgattttactaaatgctctattttctggtgcagttattgactgtcttatctcttttgtcaggaatgtcttttttaattagaagacaggaagaaaacaaaaaccagactgtgtcccacaatcagaaacctccgttgtggcagaggggccttcaccgccaccagggtgtcccgccagacagggagagactccagccttctgaggccatcctgaggagttcctgtttgggggtgtgagggaaaatcagcgcggattttaaaaagatggctgtggcctgcccggcgtggtgggaggggagctggtttcctggtgaactttctaaaaggaaaaataattttaagtaaagaaaaaagaaaaaaaaggaagactaaacagaaaccagaactgaaacattcacctggtagcaaatgacacatgcacgcacacacacatacacgcacaagcgccagtgcgcacgtgtacacagaaaaacaaaaggacaagctttctgtgaaacaaaatatttacttagggataatgtggggattcacatgaattaaatagctgcaattggaagaagagggtcagggtcatttgttcaggttttctattgttttgtcctctctttcctctcctacccttccttctctttctctctcccctccttttaaatgcaaatgagtagaaatttcttctaccttccccagctgtttcttcccacctttagagttgtttagacaaggaggagtaagcaaggaacttgttctgctttctatcgtggtcacattggtgatgctcgggacctgccagggtcagaatttatggatatctgaaccctgaccccgttcattctctcagtccacttccaatccacatcagtttgttgtctgccttggagagaagagccaaaactggggtgggcgggtgggtggggagtgcaggatataaatgtgtaagtttttgttttttaaggtttttttcttagtgaattattcacccacagacatgagagaaaaaaagagggagggtgtgtggagaaaaaatgtttacagggctaacaagggatgatgtgtcatttagtatgttactaaaaagtgtggaaatgacttgattttaaggggagggtgaggccgaagagggaagcccaaagcagatcttaatgtttcaaaggagtgcagcccttcacagccatcagatatgagggcactgttctgtctggtgttgtagccatctcaagaacaaatcaacagcaacaaaagagaaagaataaatttttaaaatttaaccagtgtttctttgtttttactttcattcactgccttgtagctcggaaatggttcagctagactagctatggaagcagcctttggtacctgatagacatctggggatggagttgaaagggcaggcccctgccctgatgcc

SEQ ID NO: 15881 - DNA, 1108 bp, Homo sapiens
gagcagtttcctcccctggtgtttaaccattatgagatggaaagtgtgttttcatctgcattgaatccttggctgtaggcactggtatctgagttagttgagccagggagagggctacaggaaggcaagcatattaagaattgcttcctggctgggcgcggtggctcatgcctgtaatcccagcactttgtgaggccgaggcgggcggatcacaaggtcaggagttcgagaccagcctggccaacatggtgaaaccacatctctactaaaaatacaaaaaaatagtcgggcgtggtggtgggcacctgtgatcccagctactggggaggctgaggcaggagaatcgcttgaacctgggaggcggaagttgcagtgagctgagatcgtgccattgcactccagcctggatgacatgagcaagactccatatcaaaaaaaaaaaaaaaaaaaaaaaggaagtgcttccttctccactgctttagcttttagcttagccttatgttcatttagcaaaaactgttatgaagacagatacagtagaatgaagctggcatcagctggtttcttggtgacagttttggacaaagggaggtcggggggcttttgaaaaaacagggtcagttgaatattgggctattcatatcacataggcatctcctgctttgtctctctttctacatgctttaaccctttcctctctccctcctcctcccacaggaggaaatcctgagcagcctgttcaactagaaaatcaatgactggtggagacttagttgctagaccggcctttgtaaacaaaatctatctttggaagagaatgaggaaacttatgagagccgtagcaaccaagtgttgttgtagcagcctacatttattgaatactattttgttcactgctctattttcataagcactctgtatgtggacgattttaatcctctaaacagtgttatgaagtagataatattaatagatgaggaaactgagacaaagattggtaacttgttcaagggcacagtggagccaagattcaaactcgggcagtttgtgtccagagtacaccctttgaagaccaccaagcttataacttttctcatatataataatt

SEQ ID NO: 15882 - DNA, 1172 bp, Homo sapiens
caaaaaagagagagcgagtgtgtgtgtgtgtgtgtgtgtgtgttcatgttcgcatgtgtgcatatgtatatatgtcatatacgttatgacaggaacaaaacaatagcctcatcccgaagaaacttcacttctaaggtgtagaaagtcgttttctgaaatgatgcccgctgcccctttgaagggaagtctaggcatgcatatgcagactgcatcaacccagagggtttgaagggctaatgagagcacttttgttgattcctttacttgctcccaagtgtagggaagtaaatgctactaaggaaaatttgtggggttttgttagtatctgtagggtctcaggtgagtaagctatgcttccttttaaaactcttacccctctttcctatacagactttttgtcgatggttagaaaattccttaaaaggtttgccaaaggaaacaaccgtgggagccgtcacagtgacacacaaacaacttacagacttccacaagcaagtcactaggtgagtgatactgggggttcttaaggaggtgtgggatgtgggaagaaacatatctttatttcttatgtgcccttgggaaatggacaatttatagtttgtttaaccttgaattgcacaaattggcattggaagccaatctggtgggaaaacattcaccatgctgtgtatgtatgtacatatatttaacatatgtgataactggtataagattttttaacggtaagtggaggcactgtttctcccaaaggaaaatgcactgagcagctcactccccgtcaggagatctgtctatatttttctaagtccttctgagttttcatccacattcgggggtcaggaatgtaggtacctgagtaaggcaaagcattggttataaaacatcagaaagtgatgtagatgacagtgaattggagaatgttcaccatgcctaaagatagtcaaattctaatttcaaagaagttgtgtagtccaaacagaacatctgcctgggatacattaggcccatgaggaacttacaatctctggattacagcctaaaatgtaaagtgtgtgtgttttttttactgtgaacatataaatatttttaatacagttacatagtcttcctaattattgttttatagccataaaggtgttacttgatttccttataatgcctctattagtaga

SEQ ID NO: 15883 - DNA, 3047 bp, Homo sapiens
atcctctatgttctgtctattcatcccttcttccctgaaaccccccaccaaccactgatcttttttactgtcttcatagttttgcccttttaccctggctgcttttatagcctaatcttgtcatttatacctagtctcactttccacaccaggtttattcagcgtagccctgtcaccttgctgcggagccaagtggtcatccctatcttacagtgggccattgcctctactaccctggaccaccgggatgccaattgtagtgtcatgaggtttctacgagacctcattcatacaggggtagccaatgatgtaagtataaaaatgataccatttctacttaacagcttttatctcctatctctttgtcattccttaggagaaaaccagcatcccagtatttccttacttgatctatattggtagacatatatcatagtggatcattcactagccaaaatatcaactaagacacttgtgctgggtgctttaggctatataaagcagtctaaaactgttcatgctcccaaatcatttggtgtctagttgaagagagaaacaagtttaaagagttaagtaacaacaagatgccagtgtttggtgtttttcatttgtttttgaaacagggtcttgctctgtcgcctaggctggagtacagtgatgtgaatctcaagggatcctcagctactgagtagccaggactacagacattcaacaccatgcctggctagtttttatattttttgtagagatggcatttcaccatgttgcccaggttggtcttgaactcctggcctcaagtgatcctcccaccttggcctccagtatttgattgtcagatgagtgataaaagtcatgattggtatgagatcagacgagggaaagctctagaccaaaaagagttggaataactttatggaaggggagggatttaaatgaagccatgaattagaggtagaattttgatggattagagaggcagatagtcatactgcctctaagccaagatcagagcaagtcagaatagtactaagtttgttagtagacaactaagcagtgggagtagtaaagtgcttcacaggaatttcgaaggtaggtttgattagatgtggagtagaattgtagacaggggagagcagtgaagaagtaagtattctgcattctatttaggctattcatttaagaagtttggcagtaaaagagagaagaaaataactagaagggaaaggcaatttaaaaaatatttttctcaaggtattagaaatacatgtgtatttaaagaccacaagaagggccaggcgcagtggctcacgcctgtaatcccagcactttgggaggccaaggcgtgcagatcacttgaggtcaggagttcaagaccagcctggccaacatggtgaaaccctgtctctactaaaaatacaaaaattagccaagtgtggtagtgtatgcctgtaatcccagtttctagggaggctgaggcaggagaattgcttgaacccaggggatggaggtttcagttagctaagatcaggccactgcactccagcctgggtgacagagcaagacgctgtctcagaaaaaaaaaaattaaagaccgcaagaagaaaaaaagggttttttttttttcgatagaaaaaattagatctctgatagacgtcttcaattctaatttcagttggttttgttttgttttgttttgttgtgacttggggttccggctgtgttacccagacagactgtagtggccattcacaggcgagatcccactacagatcagaatggaattttgacccactctgtttctgacttgggctgttcacccctccctccttaggcaacccaggagtggttcctcactcctgggaggtcaccacattgatgctgaacttagtacaggcacccaattggtatagcatgctctagcccagaacactgggttcaagctgttcccctacctgcgcctttggagtggctgggactatggtgtgtgctgccatgccaggctgacttagtttttaaaaaaggaaataggaacacaagttatttttcacattaaaaaaaaattaataccatcacatagaagatgaagagaaaaaaattttaaaaattgctaactttaattcttaaccatgttttctgccttcaaatcatgaaaaatctaagcattaatctctgttgaaacccatgttcattccttggatactaataaactccttcattttctttctaaagacaaaaaacttctggactttgtgaatccagctgtcattttacacacacctgcatacacacacacacagccacgcgtgcacacacacacacactttcctattaaagagaaattactaaaggggaaagagtgcttggtctttgggaagttgagactagaatttatctgatgttcctgctttcctacatacagcatgaagaagactttgaattacggaaagaactgattggacaggtgatgaaccagcttggacagcagcttgtcagccagctgctgcacacctgctgcttttgcctccccccctataccctaccagatgtggctgaagtgctctgggagatcatgcaggttgacagaccggtaagattgttttcatgaggaatttatctcatagtccctaaatgtaataggctttggttccttaaggccaaccctaattttgaaactagccctgttttctgtccatggaaccaaatttaggcatattgccaaattagattggtagatgaagaggcccgtaaagatcagtaatttattattgagttctttaaagcatgtttctatgtcactgtcatagggggtatattaccagaagtaagtatcaagcattgaattcagttgtgtggctgtccaatgtgaaatttgttcacttgtgagagatgcccaaatgtcagttatattagttacgtattactcaagaagtatttaatcctttcagacttattctatagcactgtattatttcttggtgatacatctagccagaacatttggaagcacataattgtcaaagtaacccacaatgtacagttggatatat

SEQ ID NO: 15884 - DNA, 1293 bp, Homo sapiens
cctaagtagctgggattataggcatgtgccaccaccagcctcccaagtagctgggattataggcatgcaccaccaccagcctcccaagtagctgggattacaggcatgcgccaccacgcccggcttatttttgtatttttagtagagacgggttttcaccatattggtcaggctggtcttgaactcctggactcaggtgatctacccgccttggcctcccagagtgctgggattacaggcgtgagccaccacacccagcccatatttgggtttataaagggaaaaatggaaaagatagccatagtgcctcacagcccatctacccaaagttggattgaatttgcgtgttctattggaagtgacttaaaggtggccaaaaaatgataggatgatttaaaggatgtgcttataaaggtgatgtaagtaaatgactttatcatctggttttctttatttggtgaaaatgatactaagtaagcaagcagggatcagggctctgggtcctcagtgaaattggtctttgttcactattttgggctgttgtcttttcccaggcataccaatcccattgtggaaaatggacagactcatccgtgtcagaaagtcatacaggaagtaagtgctaatggatgcttgtggaatcaaggcttgcttcttttttccttacagggctttgggtaactcacctgagaagatactgtcttccaagttcatagggagattcagtttgttgatgtggtttcaatgaaatgagggacagagccatccaaatgtcttttattttagatttgataacaaaacaggctgcaagggaatgccttgaaagaccagagaagtggtagaaagagattcactgtgtgactcctagagttactaggaggcctgatcaataccagcagaatatttttgacaaagctagtgacttcgttttcctcagtgatgacatacttcccctctacttttttcactgaaggttatgtgaggatcaaaagtcatgttttaagaattgcttttgagacttcagaggacaaattacatcaacactaaatactcttaagtgtccaatggtctcaaatgatgccatttccttaactctagtccttttgttcaaattcttccaccttccaggaactatctttaaacatctcttcctatatagctcgtaccaattcttttcatagcctttcgggaagtctgaagtttaggaaattgtgtatctctgtcatttagcaaagttagacatgctcttccagttctaaagaggcactgttttctcttgttaagtgatagggt

SEQ ID NO: 15885 - DNA, 1214 bp, Homo sapiens
tgacttgactgttacacatttaaagtacatgttcagaaagaggctataattgaaagaaagaaagaggctctaattgttttcctattacatttatccatcactatcttcaaaggattggttccaggaccacccactacccctgcccctctgtgcacagtttccaagagatgcagatgcccaagtcccttatataaaatggtgcagtatttgcatataacctatccacatcttcccatatactctaaatcacctgtaaattacttataatacctaatacaatgtaaatgctatgtaaatagttgctatagggtaatttttaaatttgtgtttttcattgtattattatttacttatattttgaatattttctatcgatggttgattgaaccctagggtgtgcagggccaactgtagatcactccttagtgatcatacttcttgcttccctattcctgctacctccccagcaacaggataagacctcgtctaacctacatgaagctgcttcggactgtgtatgctcagctctctatgccattgagaatgtggagactaacttgccattagccatgcaactttttcagggagtgctgacattggagactgcctatcatatggccgtggcacgtgaagatttagacaagtgagtaattgtttaagtctggagccctgggtttacctacagtctggtcattcttttaagtcactttttattattcgtctgtcatttgtgattctcagtgattctgtaaagtacagatagtgcttcctaaagatgctctactatgctcttctgaacctagagtggcaaattgggtgcagggtttgtagaattaccatagaaaggtaaggctttaaaagttggagacaaattttaaaatatcaagtgtgatttgatgggagtttttattcaaatgttttaataattgagaatttgaactgacaagtcacttgcgtaggagtgtacgatctaggtaaaggtgtctgtcatggggattgtgatacagcatagtaaataatcactagatgtcccttagactgaggaaccttttatttatttgattaactgtgcctgtatatacttataatatccagatttctgactcattgttctcattcccctgtcttctacagagttctgaattactgccgtattttcactgaactatgtgaaacttttcttgaaaaaattgtttgtactccaggccaaggtc

SEQ ID NO: 15886 - DNA, 1234 bp, Homo sapiens
taacaatcatgggggaaggtgaaggggaagcagacacatgttcacacggccggcaggagagagaaggaggggggtggtgctacacactttgaaacaaccagatctcgtgagaactctatcacaagaacagcaagggggatgttcattcccatgattcagtcacctcccaccagaaccctcctctaacactggggattacaatttgacatgaaatttgggtggggacacagaacgaaaccatttcggggattaagtagataagttgtatttagaacagtggtgcctagctggatgcagtggcacatgcctgtagtcctgcctgggcaatgtagcaagaccctctctcttaaaaggaaaaaaaaaaaacagtgacacttaaacttaaaaagcacttttaaccgttggctgttttattgccatctttctcattattatacttgtaaggtgattgaaataatggtttaaatatatagattaacattattcattttaagtttttttctctattcagatgacctgtgtagaaaaagcaggaacagatgagaaaatgcttatgaaggtttttcgctgtttgggaagttggtttaacttgggagttttggacagtaacttcatggctaacaataaattactagcactcctttttgaggttttggtaagtaatgaccttatttatcaaagtatttctgccaatcacttttcgtaactaacctgctgggacataaaaacgtttttaaatttttgcacagtaactggaaggcgtgtattaagaatgcagcaatgttccttccttgctacgaggtaccaaattagaagtatcagttttaatactcctaataggatatagttatgtttaagaggaaaacagtcttatatgttgatacatgatttacatattaaaatccaaataaccattggtatctttttccttgttttaaaaatataaaattatgtatttcaataatggtcattgaatcctagacatttccatgatataattatgtgtgcatcacaagtttaggaaaaaacagaacaggaagaattaaaaattatgtttagtgcatccagagacaattatagattaagatattatctttgtagttgagattagttaaacatcgtatatgcaaaatggatttgggtttttgagattagtagaataagtactaatgtctttttatatacttgtgcgtttcttctttaagctttgaaagtagcagtgcctagtaatata

SEQ ID NO: 15887 - DNA, 1191 bp, Homo sapiens
tcttagaaatggggaaactggccgggcgcagtggctcacgcctgtaatcccagcactttgggaggccgaggtgggtggatcatgaggtcaggagttcaagaccagcctggccaacctggtgaaaccccgtctaaaatacaaaatttagccgggtgtggtggtgggcgcctgtagtcccagctactcgggagtctgaggcaggagaattgcccgggaggcagaggttgcagtgagctgagatcacgccactgcactccagcctgggcgacagagcgagactgtctaaaaaaagaaagaaaaaaagaaagaaagaagtggggaaactgaggtacagagaggccaaataatttgccaagccagccctgggattcaggtcctggaagtgtatctccagccaccctgccatgctacctagatacctttccctaaacaagaggctcgtccctgagctgccttgacaccgtcttttcccatccctggtgccagaatgaggtgcagaacatcaagttcaacagttcaggccagtgcgaagtgcccttggttcggacagacaaccccaagagctggtacgaggacgtggagggctgcggcatccagtgccagaacccgctcttcacagaggctgagcaccaggacatgcacagctacatcgcggccttcggggccgtcacgggcctctgcacgctcttcaccctggtcagccgcgggagggcaggcccggggggccctcagcctggaacgtgggaagagagccagagggaaggggggcaaagaggtcttggtgggggtccccagggaagggtcatgatcagaagggtctggggctcagttaagggtgtctgtgtcagcagaataaccctaacctcacagaatggcccacttctctcttctaggccacattcgtggctgactggcggaactcgaatcgctaccctgctgttattctcttctacgtcaatgcgtgcttctttgtgggcagcattggctggctggcccagttcatggatggtgcccgccgagagatcgtctgccgtgcagatggcaccatgaggcttggggagcccacgtaggtgtcttggggacccagaggtgaaggtacagggaggaaggctgaagtgtgcgtttaccccaaagggagcaggtgcgtgtaaaaccgagatccagggcaggatctggctctgccctactgca

SEQ ID NO: 15888 - DNA, 1176 bp, Homo sapiens
ccagggacagggccctggagctcagggtccttgtttctgccctgccagctgcagcctggttggcagcatctgctccatcggggcagggggtatgcagagcttgtggtggggcaggaacggtggaggcagaggtgacagttcccagagtgggctttggtggccagggaggcagcctagcctatgtctggcagatgagggctggctgccgttttctgggctgatgggtgccctttcctggcagtctcagtccaaaagtgttgactgtgtcattagtcctttgtctaagtagggccagggcaccgtattcctctcccaggtgtttgtggggctggaaggacctgctcccacaggggccatgtcctctcttaataggtggcactaccccaaacccatcttttgttctcctatatcctccttcttctgttccatttcagttcagtttcagcggtgccaacctctttgcgtttcctttttgttgatgaggacccagagctgctgcacacactcacctctaaccccctcccctcgctgctgggccccatctccacaggagagactggttcagctctagggcctcagtctggagtgggataggagcagtgagtgacaaagcctctgaaagatgcatcatctcttcctcacacccatttagtgggggatgggtcctctagacttgaggggctaccctgggaagctgccgtagcttcagccaggcaagaaagcttccttcaacctgcatagccggtgggtgaggagattcccaccttccatagcctccaaacatgttcccaaggccccactttcaagaatcagacagcaggaagccatagatgctggctgggttccaggttatggggagaagaaatacagtcaataaaaggtttttgtataaactcttggtgtgtttttccttttttttttctttttctttctctctcttttttttttttttaattgagataaaagtctcactctatcccccaggctggagtgcagtgacatgatattggctcactgcaacctccgtctcctgggttcaagcaattctgcctcagcctcctgagtagctgggattacaggtgcctgccaccacacccagctaatttttgtatttttagtaaagagggggtttcaccatgttggccaggctggtctcgaactcctgacctcaagtga

SEQ ID NO: 15889 - DNA, 1163 bp, Homo sapiens
ttcccctcactgccaccttcaaaagactcttcaaggccttaaatagtattccccttcctgaatttgccttttggagatagagaggtggagtttgggtaagtggctatttgcctcattaaataaagttccccttcctcaattcctttccccatttcatcttgttgctatgatttttatctctttatggagaaatattggcctttttcaatgatgtgaaaaggaaacacagttatttcctgtcactgtacactccagaaaagtctctgcctccctgttacacctttaggcaggctcttcatgtcccagcatccccattagctgataacatcacagtctcatctttctttttccctccaggtattaagttcctgtaactcaaaccagaatttttaaggaatagaactccaagccttttctccactactatacaagaaagaattcagcaagctgcttctccaatcaaagctgcctgccgtgctcaccctgtgtgttaggttatttatttattaaaatcaagaatcctgtgcctgtagtgttggcccagagtgtggttactgccctgagggccatgaaagccacagaggatgggctgaggaaggaaagaaatggggttactgctcccagtgcatcatttgcatcattccccattgactgaatcctcagcagtggccgtttttcctcttgtccaggctcacgagttagtccagggattccatactccctattccctggagttttctggaataaattttcagcacctgcttttctcagcttggcccttccccgggtgaggccgtttggaattaacatggccagtgtttcacacaagattgggttcccaatcttgaccatcactatcactgccttctttatataaaggctaataaggaaggagtgttatttatggctttgccaagctacatcaagaactcagctgtgctgtgcctaccaggggtctcctttcttacccaggactcctttcttctccttgaatatttatgtccattttaacacttcctggttgcaagagggatgtgcctccattatttcctccacagttttggtatttgtcagacatttgttctgctgtctttctaatccagccaacgtctgctcaggaagtggggccagctccactgggacccatagttttacttccttgt

SEQ ID NO: 15890 - DNA, 2062 bp, Homo sapiens
gtttcttgagtaactccagtgctacaaaaagaattagtaatgtggtgtgggcagcgtgacattttatgtcccacccaaaaattggattccttttggagactgatctgttggtctcaggcatttcattaggaccagattggttctaagagttagtctggactggccctaggaaacttgaattaaataagcctcttccccttaccgatcctttttaacactctcaggtttgtttgtttcccacttttttcctatgctggtctgcctcaaagtctcaagaccaaggtgactcaagataacaccagaccacgcatgatcaccaaaaccttcccatcctgattctcttcttctacctctaccctctccaacttctcctggtcttcacatatactctcaaagctagtctgaaagtgaccttactttcggaagtagggaagtggaactttggtaaatgactgtttgcctcatttaatagtatacaggctcagcccatagactacagttcttcagaggccatatgtctcagcaagtactggttatattctttttttgtaaggaagatcataaatgctaaaaattccactaagccattcagttcttccttttgcctacctagtcctgatttttgtattaattggttccctttagcaagggattcagatctttgtaccttatcttatatccagagcagattccatttggcagatagatggtctctagcctattgtattcttagaccaaaaatcataacctgctgtttctcagcaaagccttgctctctggagcttactatgtgctggtacttaaagagtacattctgccttgctgtagtgaagagacccactccaaataaaaaaggggccacacggggcttctaagttaggttgccagtgttgctgcccatgatgagttatttgcctctgagtttcagatgacctctctgtagggacactgtgttatcaaccattaagaagaaagaaccacaagcctcccaagtatttgggttctatcttagggttgaaatctggtcattattccctctacccttggaatcagagcaatgtgtcttctttcctccaacctcttaccttagatgcatcctggttatctggaagcatgggaaagaaggctacttatctctttgtatgtggctccagtctgtgaggatacataacattttctctacaatgaatctgtgctaatattttgccttctttctttcttttcttttcacccttagagacagggtttcactatgttgcccaggctggtctcaaactcctgggctcaagcaatcctcctgcctcagcttcctgagtagctggaaccacaggtgtgtgctaccgtgcctggcacttttttgccttcttaatggagatattcagttttctttttttcatttaaacaaagaaaaaaaatgtatctactctaccttccctctgctctcctccctccctatcctacttgcccatatgagcacggctccccatggccacatactcctgcaaagcttttatgctgcttcgcttttctctaaacagatctgatattgctgctcctgtggttttctcaaaattaactttgccgtggtttttaaaaaggaatcaaaatgcattgttgcattaagctttttcaataaaggaaaattacggaaggaaaataggcaacaccagcaaattatatgtggacaggttctaaactctatatatacatatatatatatatatctatatatctatatacgtaatcatctagttctgtcatcttactgaaaggaataacacttctaaagatcaccatttctgagaagttcttggaaatctttatgtctaagtgattgtattagatcagcaataatgactatgtaatctcaaaaaacaaataaaatattcttaacatggactcttaagggtatttcttgtttctgtgaactagaaattcagagatgagagagatctctgggcaacaaactagagatcctgctgtagggcaaggatgtgaaaatgttaccaatgggcatgtttgaccttaggatgtgaaaatgttaccaataggcatgtttgac

SEQ ID NO: 15891 - DNA, 1169 bp, Homo sapiens
ctaggtgctagagtaacaaatcttgggccttgtcgtgtagagcagaaaggtatgggctcaactagctatgttacaacttctagagaaccaaaatagagcaaacaaagagtggtgtgggattataggaggagggagaaattccttctagggagaggagaatgatacacagagaaaagtgaggttagggaagacttttcacataggggaagtttgagtaggacttggaagggggagtagctgcattactgatggagaagaggggctgagaggaagggcatcagtagtctgatttgagaactagcaagtggattttgctcgacttggagaatagtggaaagtgaaactgataaggttgtggccatattgggaagagtttgtaattccatgctcatgagtgtgaactttattctataggcatttagggaccataagaggtttgagtaggacatccactatggtttttaaaaagatgacatgtaaagatttgactagagacttgtgagagtattgaattgtgatgtaaaaggacatcgattctggggataatttttacttcacagttgtcagatttgagtgacaattgagtaaagagttaaagattatagtgtggttattgggtgatgatgatgcctttaagatagggaatgtataggaagaacagaatttgaggaggaaggtaatagagtatgactccagatgtgttaagatatctgggaatcaagaaaggtcaagtaagtacctgggtatttgggctggagctcaaggggacattgggataaattaggggatttgcattcatcagtataatgccatatagaaactgcagaaagccaggcatggtgcctcacacctgtaatcctaacactttaggaggccaaggcagaggatcacttaaggccaggagttcaaaaccagtctgggcaacgttgtgagaccctgtttctacaaaaatttaaaaaatttgtcaggtatagtggtagccacctgtggtctcagctactcgggaggctgaggctggagtatgacttgagcccaggagtttgaggctgtagcaagctatgatagggccactgcactccagcttgggtgtcagtgtaagaccctgtctataaaaaagaaagagaaaatagtacagattgagtatcctttatccaaaatgcttaggacca

SEQ ID NO: 15892 - DNA, 1199 bp, Homo sapiens
ttgagaaaatgtgattttgactaagaagcagtatttctggaaaattttttcactggctctcttctattgttgttacctgcaatttcatcatcttttcatttaattatgttcagtatgatgtctttgggaccagtgggtatttttatttgcttgtagaagtgtttgtttttaaggctatgcaatggctcaggaaggccagccccacccactctcttgttgcttggcaccaatcctccctggttgttgggcatcttgtttacttctgcccttaattccctgcaggtgcgtaagtacaagagcatgatcctggaagacctggagtctgctctggcagaacacgcccctgcgccacaggaggttaactcagaactgccgcctctcaccatcgacggaattccagtctctgtggacaaaatgacccaggtgaggggtgggaggtgaggaggagactcaaagacaagtggcacaggtgtgggcgggcctctgatcacttttctgcattttgtcctcagtgatctgaccagggagtgagatgctgactggagtcttgtagtgaaacagtagcagccttggaaaagacattatagtgccagaaaagtgctcccaaccaagggcatggctgtggtctcctctttcttctggcagtttttttttccctttcacttgggcctttgggttggatttaaaaaaaaacaaaaaaacttttagcttggggttggtctgaacaaaagaacattaggagtttaatgaatcacagtcaaggtagccaagtaaacttttagccctcgggctgctctgctcctctttcaatgtaaattctaaatacttccataattattactaagtacagcttccttccgcaagaatgtaaaagtcagagtgacagtcttctgagtcgttgatttcctcttcctttttaaaatttttatttaaattttacgatttctaaagatgagggtctcactgtgttgcccaggctgatctcaaactcctaggctcaagcgatcctcctgcctcagcctcccaaagtgctgggattacaggcatgagccactgtgccagcctgatttcctcttcctttaagaagggaagtcaaaaatgtacttagcatgataaatcagcataccttagtaatttttatgaaattatcccctttatatatttttagtttagcttcatcaaaatcaaacaccttttta

SEQ ID NO: 15893 - DNA, 1161 bp, Homo sapiens
ccaccatgcccagctaattttgtattttcagtagagatggggtttctccatgctggtcaggctggtctcgaactcccgacctcaggccatccgccctcctcagcctcccaaagtgctgggattacaggcgtgagccaccatgcctggccacgtatttatttttcatttagcttggaagtttactgagaatcttaatatgccattcttgatcagaataatctttctttgcaagaagtttaagagtttggcctcaggttggaatagggtgtaaactagactttgatcaagaagaaaccaatgagaagccctctttgatacttcgtacacagcttctttctaccagaaccagtctgtgggaggtaatcctaggagagtctaataagaggtttggtttggtttgatttgataaagaagtagctgcttattgcatattgggactaaataaccaaagttctttgtggcttaatgtgcttttccggtcatttggtgacaggtttcatggacccaggcactacggaccatagttaaaaactgttataaacagcatgggcgggaagaccttttgtatgcctttgaagatcagcaaacgcaaacacaggccacagccacacatagtatagctcatcttgtaccatcacagactgtagtccagacttttagtaaccctgatggcactgtctcacttatccaggtgagtaaacctgagggctaccagactgtggcttctgagatggatcagtgggcacctcacctcagactagggaaagtttcctttgtgcgaactcttgtatgaactttatatagctccccaagatcttcctacctgaaattgatttctgaagaatagtttaaattctttgcatttgctaaatacagagctatgagtagcttcctggacatttccaaaacaaagcacttttaaagggctctttttttttttgagacaagatctctctctgtcatcacagctcactgcagcctcaacctcccgggctcaagtgattctccctcctcagcctcccgagtagctgggactacaggtgtatgccaccaggcctggctgaattttttttttttttttaagtagagatgaggtcttgctatgttgcccaggctggtctcaaactcctgagctcaagtgatcctcctgcctcggcctcc

SEQ ID NO: 15894 - DNA, 2699 bp, Homo sapiens
actcggaggggagtttggagaaattttagacagcagctctgtgttctttttttgccgcagccaataagataatagcagaattagccaatcctaaaaccttctaaagacgatttttgagcatcccactgggattatttaatttttctttttgacgtgtgtttttagtttagaagtgctgtattccacaaggtttaagtcagtgaggttggaagataccctatcttttttattcaaaaagcacaatcaatcttttgtttgaaaatctatataaagtacaacttgcttttagcatgattattttcctaaataaaaagacaaagaatttacttactttatgttaattacgggcatgaagcaaaaggttttctttaaaaaaaaaaaaaagtgcagtgatgtagggctgtggttagttaaccgtactgagttatccatctagcatctgtggcttgctggaagggtagtattaactatttaacatgtaatggtgtacttcactcttacctagcacgctgtcttctcattgctttgggggagggagggtctctctgctggcactgtctaacttgcttacctgctgactttgcagtttgcttgtgctatgacatttattgtaggtgctatttagggtaggcttaaagtgctgggtggtgatttgagttcaaacaataaaaaattgtattttttcaatattgtataaacaatagtgttctaattaccttaaaaaaaaataatgaccagttaagaattgcttttgatcttgtcaaaaaactgaatagaccccagtttcgggaaggtgtgtgagcagtgccatgactctgccccttacctaatcccacatctctctaatgataagacattggctcgcctctgaccagagccccagcaccagagagcggaagatgcagaattgtcaaatgacctgctgggggaggttgtaggagtttagcagatttgagtgtggctgcagagagagagagtgtgtgtatgtgtgcacatgtgtgagagtgtgagcgagagtgtgtgtgtgtccatctaagtgtgtgtgatgaaggtgggataaggctcctctgttagtgctggaagctcctgtaattgccgcatggatcccactgtgccctcttgttctgtgcaagtctgtcctgtctgggcactaaccttggtcccatgcatgtttatgttctgggtggggctttgcctctccactgggaaactgacttttgctgggttgaacagagtcccttatgctttttgtcctctccctgcgcctgggagaggtgggagtaggagcccaaacacacaggtacagaaagatctggaagaaggcctggcagtgaatccaaggactctgggcccccaacaatagatggtagcgtaagtctggagcagcggtgtttcaccaccaaatgcctttccaggctgcccttccaacactcaggagagcatccagatccctgggcagaggctctacattcttggctttagaggtggtggcagcggcagcaggtcagagccacttctggcggtttccctcccctttttagtgcccatagtttttggatcctcccttgagttttaccagcacaagccattctttgcccctgttcacataactgagctcaagctcttgccaaacaccaacaagcaagatggttgcaacctggcaacattgaatccaccacccttgggctccctctggaagccccagcaccggggggcttttgggcacagggtcagtggtagccatcttagacactgacatttggctttgtcgtcaatttcatcaccctccttgaggttactgtgcagtttcaaccagcattttatcctagtgaggtcattatcaggagttgccatatcatctctccagtacctaacatttctcatccacttcaaaagctgttctgactgccagctggctgatctaagctcctgaggaatgtctcctctcaaaggaatttttccctccaaaggccccctgaagtcctagttggcattggcctggcacatgctttatgttaggcctcccgttgggatggctgagaatcatgaaagacagatcctccgctagcctctgtgggtcaagtttctggacaccaagtctctgggaactagtgtttgattttaaatggcatgtggcccttccttgtttcagtgacttagaaaagtaaaagccatttaaaaaagttagcaagattttttatcgacttcccaactgggcttccagccttgttgaatgaaatcatctatctctgattgggcgcaacgaactgcatttctttggacttctgaatccatgtttgtgctttctctggcccgtgaacacctcggcgattctgttagggatgggatgagtgggaggaagccctttgagaagggggagccggccctgtcatgcgcaggttttccactcatctgaggaagagccagggctctgaatttagcctaacactcatcttggctgtgggcttgggaagaaatggccattatttacagattgtatttggtacatattgtgtgatacttgaaaagataaaagggactgccagcccctaactgaaatctgaagctttttatcgcttatttttcctcgccctgtctcctcccttccacctttctccttgcattgtgatgatctagtaggcacgtctgtcaacaggacacatgcctcctctgactataacctcttaatagttgtgtat

SEQ ID NO: 15895 - DNA, 1125 bp, Homo sapiens
ggtagcaatatgcggtctgaatgcatgcattcatgagtccatgtggccaagtcagcctgtgtgctactgaactgtcgaaggaaatagccgctctgataggtagatgtgagtaaaaagaacaggaaaaaattgcttcttttattggtttccaaagaaacaaaccaaaccaaccagctcttggatgtgaagataaaatagtgcttttttgaaatggagaggaaaaacttggggaggaagaggcctgctgtgggggcatcggagccagccatgtaagaatcagagctgctccttcctgtgaatcctaggtggccctatgtcttctgtggagttacagtataaagcagggagctaattaagagtattaaaacttaaaaccattttttgactctgattttaagtacatttttatatgtcagttgctgcccttcacactaccaggccctgcagccacagtgttctgttggagaaacttggggaagtgttttctgaaccagttctttttcttggggtagagcgtgaaatccagacctgtttttgaaaggacagcacaggaggagaaaagtgactgggacgatgcttcctctcatccaaaacacatgcagagtcacatcctcatcctagtgtttggcagtttgagaccgctaccctgaacttaagagctttaaatatgagggttgtgtttctgggggggttatttttttggtgtgtgtgtgtgtgtattgtgcttagaaaggttgcagatttcatcttcacctaccaagaggcggccgcctccttggacaagccgctcatggaccattagacttgagaagacgacccacgtggtgactgcaaagccctgggtacttgccttcatgttctggtttggttttccctttttctgctgctcttggcagcagcctggtcatcatctgcttgtgggagtgggaaatgggtattttagacccaacacaggttctaaatttaaaacaaataataattggaacaaataaaggttcttgtacccagagtgattctacatgggaaaaacaaaccagcttttttcagagagtgaccgaataggaagaagggattcagaaatatgatgtagtagaacatgccctgcaggaagaaaatgttttctct

SEQ ID NO: 15896 - DNA, 1238 bp, Homo sapiens
gtggtggcgggtgcctgtagtcccagctactgggtgaggcaggagaatggcgtgaacccgggaggcagagcttgcagtgagccgagattgcgccactgcactccagcctgggtgacagagtgagactccgtctcaaaaaaaaaaaaaaaaagaaaaaccagtgcaaaacatgtgctgtactaacggcaagtcagaagtgtcatcctcaagtacaaagatgaggacagatacagatgcctgaagggaggatatgagccgtgtcttagaggctcagagtgtgttaacaggagtctgacagtagaacgttggcccctcgatctttagtctgactttaggtatacattatgtatagcatactacaaaatgaatttttacttagtcctagacatatccagatcattgtgggacaaatgatctatcctttgtctctataaaagaacgtaatcactaataataagcttttctacctacagagtctctctgagaaatcaaggaaagtattccgaatatttcggcagtgggaatctctgtgctcatgctgaagatactccagcgccttcctggagatagctggaatgagagtgactttttgaaaaattaaggctgagttcctttcggtcagctgacactaagtttttcctgttctgggttaatcataaggagccccctgccatagcaaaggcagtgagtgtcaactatctgcatctggctgagagagacccgtttcctttcagggatgtggacagggtaagggcagcaagcatggttctgttaaaggagtgtgggattaacagactagaaggaagactaaggacctgaccacccatttcagcatcttcaatgtggagcagtgttctgaggactcttctatcctaggactatgacagtgtgtattaataaaatatttgctaagattctcattgttggagaactgttttcccccttgccctgtgggccggagaaacttcagtggaacattcaacttttgattttcagattggctgcaaagcctaaaatttgtgattccagtcaaggaggtataatctttcctaaaccaaaagcaagatgattttcattatgccaccaggaaatttcctggtgtgttatagtgaatggtcaactgataattttctccttgctttgataataacagaataaaacaatgtaatggggaggaaggcacttcagaagagacccctctccatgtgccattgaatgcatgagtcccccagttgggc

SEQ ID NO: 15897 - DNA, 1181 bp, Homo sapiens
gattcctttttaaaggaattctgaatagttccatgtcatacaatattctagaaattaaaacatcatcaacataaagaaaaatgaaattaaaaaatttttacatctagcaacagcaacaaccacaaatttaggggaagctgagaaggctaaccttgggaatcttgcaggttatacttaaacctagatgtttaacttagtgttttcaagatgtgtctaactgagtagtagctgggtctgatggcagcagtgcttgccatcttgttgcacagataactcaaacctaccctttggctttgaaggaaggttaagcagcccagcaactcttggttagtgatttctttctcatcctcatggtgccagcagtggttagagttggtttgtcaaaagacttacgtgtgtgtcgtggtcgtgctctttgttgttgctcttagaaattatggcaccaagaatgtttcaaacggaaaaacttgtggtggccaaagttcttcattctggcagttttgaaactctcttatgcttattaatggttttaaatatctctttgacttcttcatggggaattgtagaccctaagtatgtggtgtaaatgccatgtaacatgaacacaagctcccgagggaggccagagaagagccaggcagagaaaacctgcatcctctgggcttgttaacttggcttccactcgggctgtggtctttggctatcatcttggccatttccttttgagaacttgtttcttttctaatctctgggccaggtacctgccattttctcaggcagttggtccttgatttttcccttagcttgttgccttcttttccgtctgctttaatgtgcatggtgctgtgaataattgtctagtaattggatacaaggtcttgggggtaaagccacaggtcatccttcctgaagaaccaagtatcatttaaaaactagcatgaggaaggaatgaaactgagtagcattcattttgtgtgtgtgaaattttagttctggtttgtttgatttgttttttttttaattctaaaaagaatgacataaattttcactcgctttgccatctggctgctaggggagctgagcaagaggctcaccatgcgcatgtgtaagccgcaggtgtactcaaggtgctgaaggcgtgcaaggggcagcgctggtcctcccggggccaactcacagca

SEQ ID NO: 15898 - DNA, 2672 bp, Homo sapiens
gaaaaccgtagcctccagacatgctcctgatttctaggccttatcataccatcccctctgtgatgggttgagttcatggagcctgtattctgggaagtcttataataaccacgcacctgtgaacgtgggtcctttctggggagtgaggaatgtgggagagaggcagaaaaaggagcagctcctctaggggcccatcctcccacatcttgccattaccagtctgtgtagcacttaacctcctgccaccactgccaggcttgctcctccgttctctcccagagcaagtcagtctgagcagctccattagtccaaaacagagctttgctgcatgacttcagcctggcctctggatatttggtggaaatatattctaaattgaacaagccaggctgtccagggtggcaagaggatttttgacctggatttatacagggaccaaagactgaatgctcagcctctgtgcttagactttcatggtccttaggatagaagtgagtctctagccctgctacaccagagagctgaagagagatgtggtctggttccatccatacttgctggcatcctttgttaagccttctgagggcagtcttctttgaggtagaccttggaggcctgacatcgaagacctgtgtgttttattttcataaaagtatatatccttggtctaaagtgtcttcttttaatataacactagtaaaaatgacatggtatgaccagcactgagtgctatagaaccacacatgtgtacatgttctggatgccaaatgagactgtgtgtaaatgactaagtgtagataactagaaattagataggggtcatcaggcgtttcggtatacctataaccagcactcggaattcctgacactgtttacttgatttaggaaagtttatgcctgctgcttctctgcctctttgaggtactcccagccgtcttactacagtcctgtaaatttaagtgcaatatatagaaacatatggatatatacagattatatatagggtgtaactataaagcaggtagactacttttttgcatcttggggaagtgagctcattactttaggttcaaattatgccaagaattttagatgtgatcagctggcttaagccaactcatgtcatgataaagctggattttcaagtccatgttttcttactccaactcttagagactcattgttccttaggtttgttagagttgagattttttttctccctgtcatctttgtactctctcatgtttgcatgtcttacattttgttgccggagaacaaggaagtccatctgtaaggagtttcctaaacggagaattaaaacctagtatttaacactaaccattctcctatgtatatactaatttatctgggaatgtaatactttattaaatgaagaaaatgatgctttcttcatttaatattttccacatcctggaaaaactataaactgacacagaataggttgaaatcttaactggggctaaacaaaaccctttccattggcagaatctccttttttcagggccataatgacatgatgtaaaaatttgctttaaaccattcatgcccttaaatagctagattttaaagcataataagcatattaacatttttaagcaaaagatacgttaacagtgacctttggttatccacagtagcaagagtaaagcacagatcattgaaatccatagataatcagtgaatcaactttcctaccaaacaatagattcatttacatttctttttcctccctatcctttcctgtaagcacctgtttttccatggaatggggttaatgagtaggtagaaaaggaaaaggaataatcagtaggagctgacaaccagtgaccatataagcagctgattgcctgtaattagtcaggctgaacaattagagttgaatgctgaaattaggaaccacaggtggtaatcctgagtagatgtagctcttcagcgtcatctcctgccctgagctccaggccatctctctaaccaccaaagaactcttagtacctacgggaaggaaaagctgtgtgcgacacagaggaaactccattatttgaacacatttctttggctcttgacaaatacttgcttttcctctaatcttgcaagagctatggctcttctattttccaatcacacagcttggcatgtaggaaaggttgaatgatcctctaagactgtgttggtcttcgtattctgtaaaacccattttttttttgtggtcttacagatgtttagaaagtggcacaggttactgaattgtctacctgccagcattctgatatagcacaaaaagctattttcctttattttttgtattattttttatttttctggcattgagctctagggtggatgagggtttatggtcctctgatcataagctccattctaaaaactggtcactgttagctgaaattgctttggttccccaaatgccttggaactccagacgcacccgcagggcctgaggtaggcttcatagagttctaggacttccgtgtgcgttgccaccagatcctgcccagcaatggcctttcccttctaaggtcattagattcagccaaaagcgacctcttctctagtccggtgttacgaacagaagttctgagttgtgctacaaaagtagttccatctttttggtgtaattttcatgtttttaattt

SEQ ID NO: 15899 - DNA, 1731 bp, Homo sapiens
tatgtagtaggatttaatgtattactaatacacatatgaaaactcactaaagtatccccagtagttagtaaattcctaattcaaatcaagtaatacagttctctgagaggctagcatctccatatcttccatcttttaaatacaattgatacttttactttaatcttgcttgttaaaattattctgttagctattacctggtgtaatagttcttgtttactgaaaaactgtcaacactccataaatctatttattctaaatttgggttttaggcatagttaagaaagtaattactgttactggaattcacctgataaaccatgtataacataattcattgcagaatcacattaaatatcagttaaacatgtattattcataaagttttttgttattagaaaaagaccttaaatgcttggcaaccaattctaataaaaattttttttctctttataggagagttaatcttggtctatctggtgtgaatatattgtggatctttggcgagtagcaagtcatatatttaattctgacatttagactatttcactgaaccagaagtcgaaactaaacatctctgagccactgactcttctgaaataaaatacacatgggtgtatgttacagactctttagatttaacagaaaatgtagctgttatgaaatgtaattgtaaaaatatgtcccgtatcttctatatcgagacattgcctttaattttatatcgcttttcagaaatttcagttgactacaaaactgcaacccttcggatttttattgactcaaaatagtgccattccccttaatgaaatagattttgagtctttttttcattgtaacccccaaatgagaatcatctacctgattcttgtaccaaaaaaaaatttttttcagtcttttttttttttagagagggtctctgtcaacgcagactggagtgcagtggcacgatcttagctcactacaacttctgcctcccaggctcaagcaattctcctgcctcagcctcctgagtagctgggattacaggcatgcaccaccacgcccagctaatttttgtatttttagtagagacagggtttcaccatgttggccaggctggtcccgaactcctgacctcaggtgatccacccacctcggcctcccaaagtgctgggattataggtgcgagccactgcgcccagcctcagttattttatttaacagtgtaagtacttagaaagtaagaaaattgctgatttagtttttttttttttttttttaatgtttccccagcattctgcaagttaggccaaagcccacattcaaagaaatgagattaactcttaagtaatgtattaagtttatgtatattttaaaatattattaaaggaggtttgaaagtattgacatttaaaaagtcaacacttagattaaatttagctggtagttttaatttgggttttagttaagagtgtgaggacatcaggaaaactgtttactactttggttttagcagctcagttttactattccataatgtgttatttttaaagttctctttttaagatcacagtgatatcctatcttcaaattttttaaatatgttcaaaatatctggagggtgagaagttaccaagtttgtatgttttgtttgactcaccatctttattttctgtatatgtagtagctggcaattgcatatattttcttgattaacatattagagactgcttccatcatcttatgtaa

SEQ ID NO: 15900 - DNA, 1295 bp, Homo sapiens
ctgtgttgttttgtaaatacttcagtcacatctgcccgtgtgcctgtccctgccaccttttcattcactgttcttgacttcatgaaggcttctccgggcagtcttggtgtgagaagctgtttccaagggtgcagatgagccttaggttccagccgcctgcagaccccaccccagcaggctcactcagcaaggagctctctgcccagcatattgcaggccctgttttgagtatggaagccagtgcctgtgtactcactgaaattgaagatgaggaaagtagctgtacactcactgaatgctcccccttactagatatttcctggagccagaaaggtatgcatgtgggtgtcttcacaccggggaggagggcctctcatgggaaagccctggccaccacaccggcctgtgccccttgaagcccaccaaagcggccctcacttgtggtcagtatatcagttatgacgcccattgcccagcttcagtccatccatgttagatggacagaaattatggccagttgaaaataccagctttggttggacaactgtggacacacaaggtgaagaggactccgaagtcctttgtcagggctgacaacctcgtaagcccttgcttagaaatacagtattagtctaattgagtaattagtgcaatttcctgcttacttttcattctcatgactgaactgtgattaggaagttgtgattatagattctggttttggccggaattttgaatcagcattaattgaattgctaaatgactgacattcattccatttaattgggggaacaaaaggcctcaggtaaggatgaggaactctgaaatcagatggaaaagagcggtgttaatttttatggtctgtgatcgtagctgtgataagggactgaggaataaattgtgctctttgtcatggcaaccagcttctgaaaagcccactgaaaattgcctgtcctgctggtaactgctacggggtaagatttgccttaacagtactattttctcgccaccaaaaaaaaaaaaaaaaaaaaaaaaaaatgcaccacagtatttctagcatgggggctgtgtttgtatgagaaataaacgtaataaatatctcatagagacatatggaaaaataactttcagattcagcccagttctgttttagagtgtgtttattcttctctacttgatttccaaagtgcaacattttccgatgctttagaaatcaaacaaaccagggacattgttcagatgtcaagccatgcccaattttccacaagattcaagaatcttgtataaaattcagc

SEQ ID NO: 15901 - DNA, 1518 bp, Homo sapiens
gaagactcgagcaaaaggatttcttgtggaattctcagaatcccatgtaacaacagatattttctggtataatttgcttaatgatgaaatagttaagaaagatttcatgtccttgtgttggcctcaacttgatgaccagagattagaagacatgcaggcttctttccaggttttggcctggccttgccatattaatgcagctttttctgatgattttccaaacctaggtctaaaagtcttagctcagaaattcccggaaggactgattactggttccctgccagcatcttgccagcaggcccttcctcctgggtctgcccggaaacgatccagccccaaagggccacccctaccagctgagaataaatggagatttaccccagaagacttaaaaaagatagaatattatctggaagaggagcaagggcctgcagatcatcctagtaagatcttttgacctttaaagataatgtttggtttgcagctttgaatatcacctcatcatatgaaaaccttcatctcttatatttagattcttaaaatactagggaggtatgttacaggtgctggggaggggaggcagtggaggtgaccccagatagtggcaagaattacgcattgaagagagactttatcaaaacatagcgactttttttttttttgagacagagtcttgctctgtcacccaggctggaatgcaatgggatgatcttggctcactgcaacctccgtctccccggttcaagcgattctcccacatcagcctcccgagtaggtgggattacaggtgcccgccaccacaccaggctaatttttttgtattttaagtagagacagggtttcaccatgttggccaggctggtctcgaacttctggccacaagtgatccacccacctcagccttccaaagtgctaggattacaggcatgagccaccacgcccaggcaaaaatgtagagacttcatcaaaaagtatatctcaggtaaaattgaggagttaagcatcagaccttcagattccttcttggaaagttttcgattccttctgcagcttttgcttctccactctgagagcctctgtggtttgtcttcctaccttagtttcaccgtactgctttctcttttctttccccaaatcactcctcgtctgcatcctctctaccaaggaagtagtggaggacagactaggtttgttggggatgttggagaggaagggaaaaaaaacctatctgggtttcccttcatttctgtccccctccccaccttcaggctgatctcaaggatgaggagtaggccatcgttggcctaaagtagatactgcataggacttcattagcttaaaagtggttgtaggctaggacttcattagcttaaaactgtacttggcagattgtccctggaatcattcttgcagctctgttccttctttcttgctcccttcaggccgactgaaccaagctaactcctccggaagagagtccaaggtgcctggtgcccgaagcgctcagaatctgccagg

SEQ ID NO: 15902 - DNA, 1106 bp, Homo sapiens
catgtttatgttgattaagccctttttatagttgacaggattttgtaatagttttattatgtttttgatgttagattgggtctcctgctgaataaaaagtgctgagcaaacagcataagctaaaggtgttccttgggaatagttgctgtatcttagagaatttctgtgaggccattcatgataaagtacaaagaatttgtagtttatgtgttgtgatcatatgcttttaactgaaaatttacttttcactgaaaaaatttgcatattacagaacaaaaggagaaatggggagatgctgtttaaaaacacctaggtgaaagtaaacaaggtgccttcaagtattttcacatagcatgatttttacaatgttttaatatacagattgaaaggagaaaaggcctgttctcacctaacgcagttaagcttacattttacaaataattgtgtcattttaatgtcaatttggtcacagttgcttgttctttgtatcagattacttagattttaacatcttcgaggttatttttatagggatttggcataattgattgtactttccttcttcctagactctgtgggtgtggttggaagtccagagatagttgtgcttttacacggttttccaacatccagctacgactggtacaaggtaatgaagtcagacttctacgtcctactatgtcttaaaaaatctcggccgggcgcgggggctcaaatcctagcactttgggaggctgaggtgggaggatgacctgaggtcaggagtttgagaccagccaggccaacatggcaaaaccccatctctactaaaagtataaaaattggccaggcatggtggcacaagcctgtaatcccagctacttgggaggctgaggcaggagaatcgcttgaacccgggaggcagaggttgcagtgagctgagattgcaccactgcacttcagcctaggtgacagagcgagagtctgtctcaaaaaaaaatttttttttaataaaaatttaaaaaacctcaaggattttgttgtcagcaccagaaggctcttgcacatttgaattgcttttaaaaaaacattaaatgttgaactgttccttatttactgaagggaat

SEQ ID NO: 15903 - DNA, 1361 bp, Homo sapiens
ttgttttttgtgctattaggaaattctgatgagcattactattcactgatgcagaaagacgttcttttgcataaaagacttttttttaacactttggacttctctgaaatatttagaagtgctaatttctggcccacccccaacaggaattctatagtaaggaggaggagaaggggggctccttccctctcctcgaatgacgttatgggcacatgccttttaaaagttctttaagcaacacagagctgagtcctctttgtcatacctttggatttagtgtttcatcagctgtttttagttataaacattttgttaaaatagatattggtttaaatgatacagtattttaggtatgatttaagactatgatttacctatacattatatatattttataaagatactaaaccagcatacccttactctgccagagtagtgaagctaattaaacacatttggtttctgaataaattgaactaaatccaaactatttcctaaaatcacaggacattaaggaccaatagcatctgtgccagagatgtactgttattagctgggaagaccaattctaacagcaaataacagtctgagactcctcatacctcagtggttagaagcatgtctctcttgagctacagtagaggggaagggattgttgtgtagtcaagtcaccatgctgaatgtacactgattcctttatgatgactgcttaactccccactgcctgtcccagagaggctttccaatgtagctcagtaattcctgttactttacagacaggaaagttccagaaactttaagaacaaactctgaaagacctatgagcaaatggtgctgaatactttttttttaaagccacatttcattgtcttagtcaaagcaggattattaagtgattatttaaaattcgtttttttaaattagcaacttcaagtataacaactttgaaactggaataagtgtttattttctattaataaaaatgaattgtgacaaaagtggactctggcttcccctcccccctcccccccacccctctgggataaaaattttccagcattgccaggagctttcaggtacacattaaagaataaaatgaagttaagcagctggagtataggatagtatttgattttcaagatcacccaaagctgcactatcgtcccaaagctgaccaagtagaataaaaagaaaaaaaaaaaaaaacaacccatgcgcaaagatagacatttgcttgatctgctggctcagggccaaatgtttaatttgcttctccaaagtcattcatcttcaaaagtctgattctgggaaactgatgccactagcctaaaagcccactgaccatgtagtgtgcatcagtt

SEQ ID NO: 15904 - DNA, 1246 bp, Homo sapiens
ttcccctccaagccccagggaagggcctggaaagcgcttacacctcagacccagtgtcggtcagccgtcaaggagcgagcgacgtgggaaaccctgagataggacattggcccggcgctgggctcgggtaacgatgcggggcggggagcgcgggcggccggggagggcggcggcccctttaagagcaggccacgccccctcccctcctcccgttcgctgccagcggtcggtggcggccgctacggtgctgacaagatggcggctggcggagctgtcgctgcggcgcccgagtgccggcttctcccctacgcgctacacaagtggagctccttttcctccacctaccttcccgagtaagtgccgggccttgagctcgtgctgccccacccttccgcgtcagcacggttgggccaggggtgcaatggagggcagccgagccgagaggcccaggcggggcctgctgagggggacgtgcggcctccggagtcttagttcagctgctgagagcgttgctcggcctcgctcgggaaggggttagggtccggagagcgagcccagggagaaggggcgaggtgtgtggcggatccggggcgcgcacaggagaaccggaagcccagcggttctgcgcttgggatttgggggttgaggttgaggagggcttggggggcggacggctctggggcaggaatcggagttggcggggccctgcccgcgggcaaactaccccgaatgtctgaggtcgtccgaggtggtcggcgtcgggggacagttcagtcgattgctgccgggacaaagtgtaaagccgaggagtgtctattccagagtggggtcattaaaagtgattagctctagagtagtgttaaaagtcacggaaggctgaaaagttgtggaatccatctgaatcctagcaggcggggagaacttgtaggattggcagacgttgtctttaatgcctggaagttctgaaaaagatagggagtgggaaggagggacgttaccgaagaatttcagtattacggctcattagaagatgggtttgtatggacacagacacgtttcccagtccggaaactcaaacatagaaacatctggctttaatgaatttgattttcaacaccggctttgtcttgatccctgatttaggtgttaaaaaaattcagttgcattgttaggtttttgttggtggtgtttttttctctagcaaattccttctgaaatgctgaaaatactcttacatagtatctta

SEQ ID NO: 15905 - DNA, 1197 bp, Homo sapiens
ttaaaagtaatcagtgttaatgatattcatttaaaaataccctgcttatttcagtttccaaggtatctgttaagcatctccattagaaaatacacaaatctaagcaagtgtttttatttttatgtctacttgttttggatgaaacacattgggattttctgaagttctgttttataaaatacgtagtatattcactttgtttggtagttggtttagtgctaccttgtagttttaagagaagataggaaatgctcctacccagtctctagcaccacagctgcctgtgaccacctggcattaccattacatttccaagaactccacaactacactatctacctggcagtattgttaattctggattcctaaactgacattttctaaatatccagaacaactcctcatactcagtataacagtgtattttattccaggtctgaaagacatttctgatattttctcataactccagataattatccttgtgtacattttctaggtttgaagaaaaggcccaagtggatccccttagtgctctgaaatatttacaaaatgatctttatataactgtggatcattcagacccagaagagacaaaagaggtaaagaaaggtggtaataaatttcagaaattaagtatttttaaatgtcttcctaacttatatttaatgattttgctcttgagtgtgtaaaggaaaacgaagaaaatatgatgacatcagtaatctttaaaatgtcacagagcaggtgaaataaaaattgaataggcatgttttcgtgtgataagattcaagtcaccaaaaacccttggtccattcagaaaaggattatcaggtataaagttttaacttagttttgtgttttggaaagcaaatagaaatttttactttgtccatagtcccatgattattttacttaaggattacataatggttcaatataaacttttctgtggatagttaagatcccccaagagaggaaagaaaactcccctgttgcttagggagaaaatgaagagaggttggtgggagttagaatccttggtgccttaatatttagttatgtgaatgttgtagcagtattgtttgtctataggctactaatttcattcatcactagttgctaagattgagaaatcagttagccaatcattacttttcagttttttgttacataacattgggatagaaacaactg

SEQ ID NO: 15906 - DNA, 1280 bp, Homo sapiens
gcctgatttgatttctccattataaaatacattgctgctggtctcaactagtttttctgttacatgttttaaacacaatggatgtttctttgtatcttcttcaccaggcttttctgatgtggatcacacctatgctcaaagaactcagctctttgacaccttagtaaatttctttcctgacagcatgactcctcctaaaggcaacctggtagacctcatcacactgtaactgaagagtcactggacacagaaatggaaaacaggagtcgattttccgtcttttggattgcagctccactgactgacagtaaagctgcagtgattgaggactgcaccagagttctgaagggatcttaaccatcacaagtttttaccctcttccttcatgcctgacctcaaccccgctctcctcatcctattcctaaattaggctaataaagtgaaattggtatactttccagttaaatatatatatatatatattttttcttactttatcttttaagaattaatgagtataaaagaaaaattaggcagtttacccttttcagatttttatttcttttttttttaattgggggaaataagcactattaacagattcagcactacaagtattttgaatgttgttgctgttggtcatttggcctgccttttcccttcctatttcactttgcctcccatcacacaactgcgtgtaaatggtgtcacttgttcacctctttacttcattcttaacaagtgtatagttctctaggacagttgatgtatgttaaggtgatatctgtgtctgtattgacttgtcttgtgttacattaaacagtaggcagaactgaggtctcaagtttgcactcttggccatagaactaaaaatgaaacctgagattgacccaagcacctatctgagattggtatataatatttctataatgatatattttatagtagatattacaatagcatctgactttgagtcacagaaaccttaaactgaggagacaatagttcagaacctttttaagagccattctaaaagtgaccagcaggagggatctagtagtgaataatatcttaatagcaattttaggagaaaatgactctttcgtccagaagagctctgcagaaccagggctcccgtttatcttgtgctatctctgtagtattttcatttgagagaggaggctgagtttccagagctttgctttcatttatttttatacacattgtctctctatatctgcttgtggatattgttattttgaagagaaatggtttgtggt

SEQ ID NO: 15907 - DNA, 1260 bp, Homo sapiens
gaggatcacttgaacccaggagtttggggtgcagtgagctatgattgcgacactgcactccagcctgggcaacagagcaagaccctgtctcaaaaaaaaaaaaaaaaaaagaatgtgaatttagctccaattccaaatgactaactcttaggccagtcatagccaatgaaatcatctgacggtagcttctgtagcccttaacctaaggagtcattagaggttatagtaaattagtttctctagtggtgcagagagaaatgccatcggggaaattatcactgtctttttggctaaagttttatattgtgaactggatcccacttaacagcttaaaaacacaaaaatgaaagggtagtcctagtttatcttcttaattagaatcattatttggaaataagatttgcaatgtgctgtctatccccaaacactgctgagcttgctggaaaacagaatttaacatgaatgttgtctgaaagctgtaggatcaatggcaaaaaaggggaaatgtttggtagggaattggaccagttctaaggtatcacttttaattataaaataatgtcttcctttttatctgcttttcagacagcctcagtgaactattaaacatttgtgtgcaaagtcctattttgcttatctaaggcattttgacttggaagtattaaacttcaggaacgagctagagaagacaatgagggtatgttagagaaggaaaaataggagctttttgcttatggattttagaggtccacaaatcgaaaggaaaaataaatttcttcatttctaaccctaaaataattttgttaatgagatgctgggaagaagactaccaaaaggcctcaaagctcatgcttctagaatattcagtaattctgaatagtctttgggaagtagcatttcttgggaagtagcatttcccttcttccaaataactgtttgagatcttaaaacagaaaatccagtgttaatgggctctagatcttaaactaggtgagcagcttcttacatacaaccagttccttgttaaggatccagcaggaaaaccagccataaaacatttcaacatgcagtttgggggctcccttgcttattcactgagtttaagctcttgctgcaacatagctctgtaccatctgggatgctagcagtcacagcagttagctcagatatctgagctgtctgccacacaaagcctgaggagatcatcattcttcagtttcattcattacttaatgaatgccaaattaattggcaggaaga

SEQ ID NO: 15908 - DNA, 3684 bp, Homo sapiens
aaccttgaaccccttgttctggattcggattttctcacatttgcttcgtgagatgggggcttaacccacacaggtctccgtgcgtgaaccaggtctgcttaggggacctgcgtgcaggtgaggagagaaggggacactcgagtccaggctggtatctcagggcagctgatgaggggtcagcaggaacactggcccattgcccctggcactccttgcagaggccacccacgatcttctttgggcttccatttccaccagggactaaaatctgctgtagctagtgagagcagcgtgttccttttgttgttcactgctcagctgatgggagtgattccctgagacccagtatgaaagagcagtggctgcaggagaggccttcccggggccccccatcagcgatgtgtcttcagagacaatccattaaagcagccaggaaggacaggctttcccctgtatatcataggaaactcagggacatttcaagttgctgagagttttgttatagttgttttctaacccagccctccactgccaaaggccaaaagctcagacagttggcagacgtccagttagctcatctcactcactctgattctcctgtgccacaggaaaagagggcctggaaagcgcagtgcatgctgggtgcatgaagggcagcctgggggacagactgttgtgggaacgtcccactgtcctggcctggagctaggccttgctgttcctcttctctgtgagcctagtggggctgctgcggttctcttgcagtttctggtggcatctcaggggaacacaaagctatgtctattccccaatataggacttttatgggctcggcagttagctgccatgtagaaggctcctaagcagtgggcatggtgaggtttcatctgattgagaagggggaatcctgtgtggaatgttgaactttcgccatggtctccatcgttctgggcgtaaattccctgggatcaagtaggaaaatgggcagaactgcttaggggaatgaaattgccatttttcgggtgaaacgccacacctccagggtcttaagagtcaggctccggctgtagtagctctgatgaaataggctatccactcgggatggcttactttttaaaagggtagggggaggggctggggaagatctgtcctgcaccatctgcctaattccttcctcacagtctgtagccatctgatatcctaggggaaaaggaaggccaggggttcacatagggccccagcgagtttcccaggagttagagggatgcgaggctaacaagttccaaaaacatctgccccgatgctctagtgtttggaggtgggcaggatggagaacagtgcctgtttgggggaaaacaggaaatcttgttaggcttgagtgaggtgtttgcttccttcttgcccagcgctgggttctctccacccagtaggttttctgttgtggtcccgtgggagaggccagactggattattcctcctttgctgatcctgggtcacacttcaccagccagggcttttgacggagacagcaaataggcctctgcaaatcaatcaaaggctgcaaccctatggcctcttggagacagatgatgactggcaaggactagagagcaggagtgcctggccaggtcggtcctgactctcctgactctccatcgctctgtccaaggagaacccggagaggctctgggctgattcagaggttactgctttatattcgtccaaactgtgttagtctaggcttaggacagcttcagaatctgacaccttgccttgctcttgccaccaggacacctatgtcaacaggccaaacagccatgcatctataaaggtcatcatcttctgccacctttactgggttctaaatgctctctgataattcagagagcattgggtctgggaagaggtaagaggaacactagaagctcagcatgacttaaacaggttgtagcaaagacagtttatcatcagctctttcagtggtaaactgtggtttccccaagctgcacaggaggccagaaaccacaagtatgatgactaggaagcctactgtcatgagagtggggagacaggcagcaaagcttatgaaggaggtacagaatattctttgcgttgtaagacagaatacgggtttaatctagtctaggcaccagatttttttcccgcttgataaggaaagctagcagaaagtttatttaaaccacttcttgagctttatcttttttgacaatatactggagaaactttgaagaacaagttcaaactgatacatatacacatatttttttgataatgtaaatacagtgaccatgttaacctaccctgcactgctttaagtgaacatactttgaaaaagcattatgttagctgagtgatggccaagttttttctctggacaggaatgtaaatgtcttactggaaatgacaagtttttgcttgatttttttttttaaacaaaaaatgaaatataacaagacaaacttatgataaagtatttgtcttgtagatcaggtgttttgttttgtttttttaattttaaaatgcaaccctgccccctccccagcaaagtcacagctccatttcagtaaaggttggagtcaatatgctctggttggcaggcaaccctgtagtcatggagaaaggtatttcaagatctagtccaatctttttctagagaaaaagataatctgaagctcacaaagatgaagtgacttcctcaaaatcacatggttcaggacagaaacaagattaaaacctggatccacagactgtgcgcctcagaaggaataatcggtaaattaagaattgctactcgaaggtgccagaatgacacaaaggacagaattcctttcccagttgttaccctagcaaggctagggagggcatgaacacaaacataagaactggtcttctacactttctctgaatcatttaggtttaagatgtaagtgaacaattctttctttctgccaagaaacaaagttttggatgagcttttatatatggaacttactccaacaggactgagggaccaaggaaacatgatgggggaggcagagagggcaagagtaaaactgtagcatagcttttgtcacggtcactagctgatccctcaggtctgctgcaaacacagcatggaggacacagatgactctttggtgttggtctttttgtctgcagtgaatgttcaacagtttgcccaggaactgggggatcatatatgtcttagtggacaggggtctgaagtacactggaatttactgagaaacttgtttgtaaaaactatagttaataattattgcattttcttacaaaaatatattttggaaaattgtatactgtcaattaaagtgtttttgtgtaaactggttcaagctctagtagtttcctcggacttcttaaagccttcacttgtgtatgaggctcatcgccaaagtgcctgagaatgtcggctcacacccgtagcacaggagcctccgtgctgagttacacttgtccaactctgcaggcaaagaaattaggcaagagaaggagagaaaccggaagaaaaaaaaagggggatcctaaaggtggttatgagtctttatgttactcaagctatcctagtgactctaaagaacctcactttcccctaagatgacgttgtatgtttcgctgtcttccttccctctacttctgcctcag

SEQ ID NO: 15909 - DNA, 1183 bp, Homo sapiens
gtctggaaagggaggccacgggaagtagggaagggaggaagaggaaggaaagggtgggagagctgagggttggagaatatcaagaaaaactgagattttacaggttgttactctggggttccaaaagaggtcctcacggaggttccacatcaccagaccctgggtcctgtatcagaactgtcctgggtctgcacgctggagttcactaactggacttccagccactttacttcccatcctcaacgtagaccaggaaaagtcatgatggaaagacttctttgttcctcctcagcccagcagggctctgatcatgccagcttgttgtgttgcaagacacgaaaagaagccagcaacaaaattgtcttgcgtcacttaacttcctctcagatttctaagcaggtaattatttcctctcctccaatggactgcaagcattttggagggtttttatcagagacactccataaataaaagtgtcaggttattaaggataatcttatccactctcctgagcaagttatccagtggaatattgtgctcttcctctgtggcactttcttccttgacttttccatttggcacctaagtgagccaggggaggatgtgtgagcaagggagacatttctgctactggggcctgggaaacaggaccagaggggctttcactccggtctgttctgtgtgacctctgggaggcttgttttctctagttcattccattgctgaacatgagttgagcatgtactgtgtaaaatcccacccagaaatgcacacatttcaaataagatttggctggtttctaccctcaaagacttcttgtccaaaacaagattcacagcacaatttaaaaagcagtttcacattgactttctaaatttaattcacaccacacatagtaaggacacaataaactttattgaattaataaatgaaccatgattccagtgagggaaggaggatgattatttgtactcatgttgtatctatgaacaaactaagactcagatgggctacatgatgctcaaagttagattatagctaacaagtgctggatctcattttcgatcagatattctggttaaaacccaatacaccttggcccacatctcacgcccctcccgagtgaagcacattcaaatgattgacttctgttctggtggccatggagaggaagcagtggtca

SEQ ID NO: 15910 - DNA, 1478 bp, Homo sapiens
ggcctcccaaagtgctaggattacaggcgtgagctactgcgcccggccttgttggggttttcaacccatgtggtggtgagaggggtcatttaaagatcatattgataaagcaatggtgttgattaaaggagcaatattttgagaacaggaagcatatgccttgttttctgtgtttttaaaattagatatttgaaaagcaacacaaatcatactaaatagttagtgccatttattttttgtcctctcccggtggtaaaacttactctttctgtttttcttgcagagcatgcttgagaagggaggataaaaactttcagaatgagcaaaacaccatcaacgttaattccagagatggaacattttttttcctagtgagaaaacaacccatttgaagagaagaccactaatgagaagaccactaaagagagacatcaagaatggattcagcagaatcatttcacgttttgaacagcagcagtttgaagggccaaagccttgatcagggatcagtcattaaaggacactcttgagtattagtaaaccctcttatgatgattaaaagagaagggcagccctctccaccttttggtactttctattcaacttgcactgaccataaaatgtttctcttctgaacaagccccatcatttggtgaacctccaccctaacaaagtaggatggggttgggggctaaattaattggagtggggcgaggagagagccagaaaacatagatccgagggcagcagtgctgggtggagagagccagaaaacagatctggaggcagcagtgctggatggaattgtctaggctgtggcatgttggttttgtctttcttttctcctttgattatgtaagagctatttcattataacttattatggtgattatacaggcaagaagacaaaaaggagagaaaatgtacctcttctactggaataatgtttatgattacaagtgagataaggtatttttatcaatatgaaggcaaccttggctgataaaacctctatagtgaatactcacatctttacttcactcactatcaataataaatatattttctgacaaagactggcattgtagctcctcacacattcctttggctgggttagatgtctatgcttacgggaattgagctgatttatattgttaataatttgcatttgtgctgtacctttcctctcaaaggctccagagcatttcgtggagcctccgacaggcaagtgatgcttataacttgcctatcaggtaggtagaattcgggaagatctttacaaattgtgtgaactttcctttctttgggatgacttaagtcatcctgcctggggcaagaactagattagataaccttggttaggaccttctgaccctgcaatactaaaaaacgtttaaagaaaataattcaaccattaggtttttttttcctctttccaatttttcaaaacttcctgattataactctccctttttttt

SEQ ID NO: 15911 - DNA, 1528 bp, Homo sapiens
cttaagtgtttctacgaagtagtctccaagtctcacagggaattctgttttttttgttttcccaactttatttttgtttgttgtataattgacaaatatgtccataatgctttatacctctttatgatagccacattttgtttataatacttgtgattagttatgtgtgtttatcttgtacactcctgaggacacagagctaattttcatatttctgtattttctatttttttcttttgtttttgaggttccataacttgcatatttctgtattttctacaaatagcacagtgaatgaatcctagattttctaagcttatactatgaagttatgtttatgcaattagtgtatagttttaaaatacacacaaatgtttagtatcttcttcactagccatttaaattcataatttaattctatcctgggagaaagtcaagtttaactttgaatattttgttattgtttatagcatccttattaacatgctgatgataacatttactgagcatttacattgtgattggcactttgcatggattgtctcattttatacttaccaacaaccctgtgtggctgtgcgccctattgtttaggtgaaggcttaaagtaattcacctaagaacatacagccaaaatatgatagatctggatttgagccaggttccatgcttaagcatttagctgctgtctagtaccaacttgaagatgttcattctgtatgtaaatcctgctgattgtagcattagttctttgtgtggtaagttagctcttaccagcttctaatacaactttttgggtcctgacgttatgatttgattaatgctacctcataacctaaaagtgttaagcattcaaaaatgcataattttctcccagaatttgacatttcctgggaaaatttgaccaaaaaagaataagtaaggtcttattacctagcgattacagcatgatacccctaagagttattttaatatcgagttgtgcttctttcacgttgaaataagaaatttatagtcattaaagcagcttaaaaatttcttcttgaggtcttcattcacttgctcatactttgattaatactgccttccatcttttcatctctttccatcttctggaaagaaagcaaaccttttttttttttttttttttttttttttttacttttgacaaagtgttctgatagttatttcatcagagtttggatcgttgtgtgttcttcaggaaaatgtgtatttttcaggagtctgttggtcctgtgggagggaagcgaggggtaggaccgtggttatcgtgtcatagagggcagaagccacagtctcccatgggtcttccaggatgaagggccttgtctccccaggacatgttgaagacttgagctctttgataatgtgttttgcatgtataacttctccattatgaatttgaattgatttgctctatggcatccactttgctcttggctttcctaagaatgatggggttttggctcagcatgaagccctcttggcttgaggagctgagggaaat

SEQ ID NO: 15912 - DNA, 1270 bp, Homo sapiens
gctcatttctagtctctcccattctttaccttagtcacttctctgaaagaccaacccatgaccagctgcaaacagagaacatgaaaggaagtccatgcgtaatgaatcagtttcttcagtgacaaatctggggtcccggttgcatgggcaaatagtgaagccagaatagaggtggtagaccaagaaagaaatgtcagtggactgactggcagctgccctaagaacagtacatgtgttgagtggaacaaagggaataagagaggtggaagcaaagtcagtcattgtgaaaggggaataatttcagaattaaagacagtaagttttgagtaactcaactgaaaattaaatttgttgtacgtctaagctgaaggattttttgaggaagctgaaaaaatatcaggtcagtgggttgaaaagtcatttctatgtatattaaagtctccaaatttggaagctaaggatgtagtggaggaggttaatagtgctcatgtttgaggaaggtacgagagcaaaactcttagtttccagcgggcagaagaataccttggttggcatttctctttgcctcccagcttttactcttttgaatcttatctttgaagcactctttctccacctctttttgcctgaatttggacatactgtcttactctcttagtttatggagaccagcaagattcaaaaactcaaaaaactcattaaatatatacacacactcagcaagacataaaaagagatttcacaaaaaaatgtgaaagtatcaaaagatttgttactcaacataactaaaatattaagcaacatgttttgattggaatagcatatctgcagtctgttctgttttacctaataaatcttgtctattgtctgtctttactgctttgtgtagctggtgaagcatgagaaactggcctcgtacattctgatttgtagatctcttatttacagattctggttgtgtggtatagatgacaaattgtagtactcacaactcctgtatttcagcatctgttgtaatatttgccaaatagagccctcaaagcacttagggaataaaagtggaatttatgccataggatgacagctgattgagagagtcccttccttcccagagtgttgtcagacatttgcatggtctgccatggccacagcaacatggctgccagtgacatttagttattgggcagttcccaatttatttaccagatttctccctttattgttgttatttattattatggaagacatacatattcattggatcaagatt

SEQ ID NO: 15913 - DNA, 1706 bp, Homo sapiens
aaaactggagggccttcaaggctctcatcgctgctcagtacagcggggctcagatccgcgtgctctccgcaccaccccacttccattttggccaaaccaaccgcacctctgaatttcttcgcaaatttcctgccggcaaggtcccagcatttgagggtgatgatggattctgtgtgtttgagagcaacgccattgcctactatgtgagcaatgaggagctgcggggaagtactccagaggcagcagcccaggtggtgcagtgggtgagctttgctgattccgatatagtgcccccagccagtacctgggtgttccccaccttgggcatcatgcaccacaacaaacaggccactgagaatgcaaaggaggaagtgaggcgaattctggggctgctggatgcttacttgaagacgaggacttttctggtgggcgaacgagtgacattggctgacatcacagttgtctgcaccctgttgtggctctataagcaggttctagagccttctttccgccgggcctttcgcaataccaaccgctggttcctcacctgcattaaccagccccagttccgggctgtcttgggggaactgaaactgtgtgagaagatggcccagtttgatgctaaaaagtttgcagagacccagcctaaaaaggacacaccacggaaagagaagggttcacgggaagagaagcagaagccccaggctgagcggaaggaggagaaaaaggcggctgcccctgctcctgaggaggagatggatgaatgtgagcaggcgctggctgctgagcccaaggccaaggaccccttcgctcacctgcccaagagtacctttgtgttggatgaatttaagcgcaagtactccaatgaggacacactctctgtggcactgccatatttctgggagcactttgataaggacggctggtccctgtggtactcagagtatcgcttccctgaagaactcactcagaccttcatgagctgcaatctcatcactggaatgttccagcgactggacaagctgaggaagaatgccttcgccagtgtcatcctttttggaaccaacaatagcagctccatttctggagtctgggtcttccgaggccaggagcttgcctttccgctgagtccagattggcaggtggactacgagtcatacacatggcggaaactggatcctggcagagaggagacccagacgctggttcgagagtacttttcctgggagggggccttccagcatgtgggcaaagccttcaatcacggcaagatcttcaagtgaacatctcttgccatcacctagctgcctgcacctgcccttcagggagatgggggtcattaaaggaaactgaacattgaaaaaaaaaaaaaaaaaaaaaagactggatccaattgctgaaaggacttgaaaagaattatagatgcatttttttaaaagtatcatatatgtttagattttactcatccttgttgctttcttaccatttattctagatagtttaatattatatgctttagtgaaagctaacttatttttgctgtttatagagaaattatttcttattataccctcacttccttaatttcaaaaaggaatctctgtgaattattataagttaattcaggatgagtagctttaaatcctttttctttttccttcattataaacatgatatggccttattgaactgtttgttcagtattc

SEQ ID NO: 15914 - DNA, 1259 bp, Homo sapiens
tcctcaaagtcttgtctcacttgtatgtattgttttcccttaatctttttaaaaaatttattataattttaatttatttatcactcttccccctgtgtgtattcatgatgtctttttctccagcgacttaccacttttaactaacaaatacaaacctgaggctaggatccagctcttcagaattctcttgcagcgccacatatggcattttataaacagcgagtgcctaataaatgtcatgagccagtggactcatggcagaagtagtagtctgtggaaaacttcccatggtgatttgtttactaatttttattgcatctgcctcttattactaactgatgggtatgatttgaggaatataaatgttattttgtgacttttggatggttactgtgcaaatataatttaattgaaaaatcctctttaattctttaagagagtaatcaaggcagtgatttcgtttattagactgctctgttttggggtttttgagtggagtctgtatctattattgttattatttaatttttcagtgagggagataaatctgcaggacatcaaggaagatttagaattggatccagaggaaaacagcaccctgtttatgggtatcctcattaagggcttggcgaaactgaagaagatcccagaaacagttaaggcaatcatagagcgcttggagcaggagttgaagcaaattgtgaagaggtctacaacccaggtggcagacagtggctatcagcggggggagaacgttactgtggagaaccaaccaaggtaggtgggagtgtattttgtatttttgacaactctatttattgcacattttctagggtggggcgtaagtaacttaccttctgttgatgttgttttcttgaacttaggatactatagcccatacaggccaggcgcagtggctcacgcctgttatcccagcactttgggaggctgaggcaggcagatcacttgaggtcagaagtttgagaccagcctgtactagtagtgaaaccctgtctctactaaaaatacagaaattagctgggcatggtagtgcatgcctgtaatcccagctgttctggaggctgaggcaggagaactgcttgaacgcaggaggcggaggttgcagtgagccgagattgcaccattgctctccggcctaggtgacagagcgagactccgtcttaaaaaataaaaaggatactatagcccatacaaactttgattggtaaaacagcttgactaggcataattcagctgtc

SEQ ID NO: 15915 - DNA, 1159 bp, Homo sapiens
actccctagtacactagggatcactttacaggtcttgaacctctgtaagccccatttctttatctataatctgtgaatttatctgataaaattttgtgctttaaaagagataatacattttacatggattagcatgttgcctgcatcatagtaagccctcagtaaatgttatggcattgctgctaatgctgctgtagtttggaatatgaggattaaattgtgattaaagaggaatgttgattaactcactcagcacaatatctagcacatagtagatacccaataaaaacgttccttttactcccatgttcaaatgcccaccccgcctcttccccatgaataggaacaagtagatgacttactagctataatgaatcttttcttagatccccaacttggaaaatgaatgaccaggttaatatactcctgaatgttggttttagaattagatttgcatggttttaaaatagtttttcttaattgcacattaaaaatgtgtatattaacattaactgatttatctggttgtacagatgctattaactgagtacttggatatgaaaaatactcgtacggcctctgaaccatcagctcaactaagctatgccagcactggacgagagtttgcagccttttttgccaagaagaaacctcaaaggccaaaaaattctcttttcaagtaagtattattctgctgttaataggttttaagaattgttagactgaagtaagatgacttcctactttattaatagccataactttgtctagcttaagttgattgaagtaatttagaggaagtgaatatatgttgagttttatttatttttgttttctgtcaggtgaagtggttgttttgggtacagttactggactacctggaactcctaataaaaatttcttgaacttgtttcaggggagttttatttaaaattaagagaaatgaaactccccaattgtttctggggaattttatatgaaatgaaaggaaatgaaatatattagccttgaaaaggccccaagagccaagaaacaacctttgttaataaagttatgcaaatgtttctagctaagcagtattgggccttatgtggttacttgtttaataaaagaacaatctgggtttttttttatctaattataaccttagttaactcca

SEQ ID NO: 15916 - DNA, 1157 bp, Homo sapiens
aaattgttgctttattagtaatcacagggctaatgcaaagctctgataattaagactttatgtttttctttgagtgccaccatggcagcaaatggtatctgaaactgacagactgtagattaaaactttcagaatgtaaggcctagtctagggaaaatgaagttatgtataggtgacttgttccatttgaattaatcaaagggctgctggtgtagaccagctgtgttctctgatgacaaaaacgaatcttgacattttagataatgaaattcagttcagcacctcttagagatatgtgtgataatatatgtcagtcagaaacagagagaaggggagaagctcaaaccttgtcttattaaaatagacattgtgacaagtggacattgctgaatctctggtttctaggggaaaaaatgtcaagggaaacctctttaaaaaaatgatgggaatggctgttttatggaagctgggtgaaaagatttgacttctgatgcatgacctctttgacagttgcctttgttcatgattcctagtttcctggtttattttattggggtacagggtgaggtctggaagacctggaaaggaaactcacttttttggtttgacagtattaatgcaatcatctagttcataccttgtaagcccacttattatttcctctgcgtgtgttttttctggtttagcggattagctgcactgtctcttcaaaggctatccaatcaaggaggggttattaaaaccagggcgatttatgactgagaattaattagagaagcattttcatgcacaacatccaattttttgattagcaatggagcagggccgcaattaacactcgaggaagcttaaatttccagctttttgattctcaggaaatgagattatcaaaccagggtcagacacttgacagcaaagtgggagtgggggagtgtgaaattatatgtaaaaaaaaagaaaaaagagtcgtttgattttgattctgagattgctattaagacaatgggaaattcagaggagggaaagaacaaaaaatctgaaatggaagaacctgaaaggactgattctttggtggcctatttgctatgcacaatatctgttgtaaatgtttgctggaagtatgttttagaagcacagcaatattgttgtgttccttc

SEQ ID NO: 15917 - DNA, 1079 bp, Homo sapiens
ggtgcattaataaaggaaggaggaggacttacctttgtaaggtctgatccatttgcttttggtataattgaaggatcattgactgggttaacatgcactgagctccagtactatccttgccatttactagtgggtatgtgacactgggcaacttacaatatctcaggcactgattgattctttattgataaggtaggggtagtattatatatcccagtttataggatgattatgagaatcaaataagataatggatatgaagtgttttataaagtgtgatatacatataaagggtattactaatcacagtgtgtctgtaatttacgtcttattttattctgactgccccaactaattcaggccttttgccatctcacacttggattgttcctatcttctgctaaatcaattccgtctcttgcttttataggatgtgttgagtagccctgaaataatgttctaaatatgttactttccttttcaaggctttttgctgtaccacctgtctactcttgtagccattatcttctctttatactccttcctccgatttcattccctgaactccttgctattcctgagctctttatgcttgccacctacgtgcctgtgcatgtgctgttatttctacctaaaatcctttctcccttctaacctcataatgtttctactcaacaaaatctgatttgtctctcaagactcatctcagatatgactttgtcccttaattttttttcctcttttgccaggcctgatgtttcttttatggaaatggaatagataatggtaggaatggggatggcagccggggagagaaagtattaccgaatttgattttctgttgttcccaacaaagtgagaggtgatcctaggttttattttgctgttggagaatttaaaattgtggtaagtttttatcgctcacgtaacatgtcaccagtttctcccgcctccacccatgtctattctttggtgcttacatttgtactttaccgatcaggggattttatgtagatctattcttattttatgtaatatagataataaatttttaatacatcatataatataaattccat

SEQ ID NO: 15918 - DNA, 1133 bp, Homo sapiens
ggcgggcacctgtaatcaatcccagctactctggaggctgaggcaggagaattgcttgaacctgggaggcttccgcctcccaggatccgagatggcgccattactccagcctgggcaataagagcaacactctgtctcaaataaagaaaaaaaaaagtgatgacaaaaacctcaattactttttgcaccaccctaatggagacaaaaggcttataccagctatcatgtcaggaatattctaagaagctaccacgtaacacttctgcttatgtctcacaggacaaaagccttacctaactacaagggagggccagaagtgtagtcttaattctgagaaaaaatcaggggagaataattattggccacagctaacagtttctgctgcaccctcatctaatcacctgagttaattatgttagtgaacagatgatcaattacttagtatttggactttgtttatctccctttgtccttttgaaagctgtgccaatatcagcagaatgatgtctgatgttctagagactgcagaacttattgtatgtggctgtcctgtctggcatagcagccacaagtcacctgaaggtattgagttcttaaaatgtggctaatgcaactgaggaaccaaattttaaatgtaatttaaattaaaaactgacacttgattcagtttttggaaacttttaattgtgtctagaacaactagggtatgtgagtctacttttgcaactgtacattttataaaatctaaatacagatcaggtatttccgatgaacatttaacatctgaattgggttgtactctaagtataaaatgcaaactgggccgggtgtggtgggtcatacctgtaatcccagcactgggaggctgaagcgggtggattacctggggtcaggagtttgtgaccagcctggccaacatggtgaaaccttgtctctactaaaaaatacaaaaaattagctgggcgtggtggcaggcacctgtagtcccagctactctggaggctgaggcaggataattgcttgaacccactaggcacaggttgcagtgagccaagatcgcgccactgcattccagcctgggcgacagagtgagactccatctccaataactaaattaattaattaattaatta

SEQ ID NO: 15919 - DNA, 1199 bp, Homo sapiens
ttttagaaaccaattaaataatattcaaacacagcagtgaataaagaactatgttcgctaaatgcctgtgtttaacatgtgagaagatatgtcccttgaccctgaatcttctaaatatgtacagttttaaaagatagaaatttatagtgaaatgcatttgcgtatatttggggtaagagatggtgttcagaaagagagggaagctagatgggctgaaacatgaaataaattccttcagagtcccttccactcatgtaaagctccttgaagggcgtcaggagacaacattcctgtttctgaggaacacttacaaggactctaaggaatgttgtttcccttattatatttttatatcaaaacattttatttccacagttattttctttacctaatctggcattgtagctgtgatttggcgggggatggggtgttaggaagttcattttcttttcaaaattgaagtttttaatgaacttggtagatttcctgaaggttagttccttcaacttttggtattacaaagtcatgattagttttaatggtgaacattaagattgcaaataactgctgtggcgagggtgtttctttgtgaatttgaagtgtctcgtttaaagattggtgcctacattgctaaggtgcataccaccctcagtagctatattaacttatctcaggttgcagagtctttggggttgtgcttgggttaaaattctagccatgcagctttgtgacagggaaagttctttaatcatttgaacttgtttcctcacttgtacgatggagcaaatacctagctcaccgtgttgttcaagtgtcaactcaaatgatattatgtgaaagattctggcatttcctagctgcctagccagtgtatggtttgtttcaatttgattccatgtgtgactgcatgctcttggcctattgctaacgagcaggcagagaaacagcagcagtacagtctggctagagggcgtctgttgagcctccaaacattgaaggctactttgcctctttgtcaggggcatgagcctccagaaactctttcctagatgcgctaattgtgtttcttcttcctcactgtgtaacatgttatactgggaatctctcctgaatgtttgtttgtgtctctatctctatattttctatgacagtatttgcctgactgaggtaatcccaactggagggctgaggtgacagat

SEQ ID NO: 15920 - DNA, 1127 bp, Homo sapiens
tcccattctttttaatggctgagtgatatttcaatgtgtgcatgtattgtagtttctttatccatttatctgttgacagactcttaggttgattccatatcgtggttattacgaatagtgttgcgataaatatgaacatataggtatctttgatatattgattttttttattatatgtctagcattttttttaataagaaagtagactttgtggatagcaggtttccacatttcactttcacttttcacctctttctcaatagttgaatcccttcccaactagcctcttactcttaagagacttcatattatttaataatgttataattaactaatgacatattatttaagtattggggtaaaaccaaaccatcatcaccttaaataagtctgtattgataattgttgcagtgatatagagatagcaccttttctagtccattatcattgatgttcattgagttgtctcagcaatttacaaatttgaaatggaattccagaggcatctgaattatgcttatcctaacaattatgttgtatgaatcaaatgctattacagtaaaagccaaggggaccatccaaattcatttgttatactgaaacacaactgtatgtggggattgcttgaaataatgttttattatatgaagattaacatataaatatggttcaaatgtttttcatgttttagaggttatttgtactgcttcttaggtcattaaaaaataaaacattttactgatcaaggggcatttaaagcatgacagtgttaaagtatgccccggctggcaaagcggacttcctgtggctaactgaggtgctcattaaacagatcaggtggccgtggctgggtgagggagcagtcatgtactctgtgttttgcagagatgctgttaaagtgtcacaggacctccctttctacgatcatgccaaaccagtttctgttgtcaatgcagagataggctgtagctggaagtcccccagctgaccaccaacagaccacctgacaccaaccaactgaccactgaaccagccaattaagaaagactggtgatttagggcttaaaggtcatccagtcaatactattcctcactcccctgactctcctcctctgtcctacagtttt

SEQ ID NO: 15921 - DNA, 1497 bp, Homo sapiens
ggaaagtgttcacctacccaagccagcccattgtccaggcaacactgggtcagctctggggtcactatcagataatcctgcttcttgcactaccgaggttaagaatttgcaccctagaagacttcaattcaaatccctgcttccccactcactggctatgtaacctgaggcccttaatgtctctaggccttagtattgtaaaatatgaagttgggatagtaatagttcatttttcctgggattgtagtgaggattaaataaaatagccatgtaacacatggtgaatgtttagtaaacattagctgaaaaggaaggatcctctgagaaagcgagtggtgagaacatttttatgggcatagccatgctcagggatagtgggtggacccactttcccagtcttgttagggaaagggctcattctagggagaatagactggatttgtggagggcccttaatgtaagaccaaagagtcctcttccagtccatttggagccattcgtgattttcacgtcgaaccatgtgagatggtttggctgtgtccccacccaaatctcatcttgaattgtaactcccacaattcctatgttttgtgggagggacctagtaggaggtaattgaatcatgggggcaggtctttctcatgctgttctctcagtagtgaataagtgtcacaagatccaatggttttaaaaagagcagtttccctgcacaaactttctctctttgccttctgccatccacgtaagatgtgacttgctcctccttgccttccaccatggttgtgagacctccccagccatgagaaactgtaagtccattaagcctcttttgtaaattgcccagtcttggttatgtctttattagcagcatgaaaacgaactaatacactatgacacatagaagaatttttaggaaaaatagtgtggtggtaggcattccacatagattggaaagtaaacaaattaaaagcaggaagaccttttaggctagaagtaatttattttccaggaagccatggatttgagttttttgaacttcgacttccatctagtctgccatcagccttcattcctttcattaagcccttagttgcagtgtgcctcagacctttgtctgtctgctgctcttcatcattgtgtgcatggtttgaggcttagcattgcaaaaaagagttaagaagtaatcaagattattttaataaggcatagtgacaaaaacaacataaatggcatttctctgaagtgagttttggtgatttctcattaaattgaattggcagaaactcagaaacaatactttctcatttcaagaaatagtaattgtttttaatgtagcgagccagagttctataaaagattgcagtgtcttgttcaacattctgttttctaaccccgtctagcataatgcttgtaagaaactaacttctcaggaaaggatggatggatggatggatggatggatgaattgaaggtatgcaaaggagttcagattcattg

SEQ ID NO: 15922 - DNA, 1260 bp, Homo sapiens
ccacggacaagggttgggggaaagatggtttcggaatgaaatttccaccacaggtcagatattagactctcataaggaacatgcaacctagatccctcacatgcacagctcacggtagggttcatgcttctatgacaatctaatgtgattgctgatctgacaggaggcggagctcaggtggtaatgctcgcccagctggctgctcaccacctgctgtgcggtctggttcctaacaggccacagacccgtactggttcatcgcccggtgtgggggtagggggacccctgatgtaaaggtttcggtgggaaatatgtactcttcggggatgtgctttttaatttcacaataatttgtgttttttgtttttcacattttcccattgtttcttgtagtcttatctccttctggaattaaaaataatttttgtcttctccttttccccccatttttagaagtcatgttttctgtttcatcctatttctattcaattagtggagtaatttagatttttacaagattaaaaattatatagagatgagtattattgatgacctgccctcttcacagaaatagccaacactagatatactcatgtcctcatgtcgtatttatataacattttcctcataaatttaataaccttcttactgtttgtcctccagatttattcaggagattgagcatgctctgggtcttggcccagccaaacagtgtcctcttcgagagtttctcaccgtgtacatcaaaaacatctttctcaatcaagtcttggctgagatcaacaaggagattgaaggagtcactaaaacatctgaccctttgaagattctggccaacgcagacaccatgaaggtgctgggagtgcagcggcctctcctacaggtaataatacactttgaacttactatttttatcagcaattttcattgacttggcaagtgtcataaatttaaaaaagaagaattaccatctgtttccatattcatcagggacaaaacaaaagaaaataaataggcactagggaaatttagatttaatgtagttggataatggaagttccttaagatctttaaggaaaattaaaaaaaaaaacggttagctttggatatgagagatggtgaatctcattaacatgcaggcagttcctcattattatgcctggaattggtccttgaaaggaactatttttccattggtgaatgcatccctgagtatgaaggattaacaggaaggaagctatgatgcccaacttcaattac

SEQ ID NO: 15923 - DNA, 1158 bp, Homo sapiens
attgagtaggaccttagagatggtatcttctagccccttcgtttatcaggctggagacttgctctgagagatggagtaactggccacaaatgatccagatagggctagaacccagatttctgaactcgtttttctgggctccctcctggagctctcaacaccccttacagactcatgtcaggagctctcagccttattcacattctccctgggaagagtgatgccctagggcaacgataggcaacccaggaagatgattactagaatcctctggaggaggagggtcattttgtggtgtgtttctgatacaatcctaagagtatcatgttaaccccattaaccataatatccaccttctctaatactagagtaacattgctgtggacacatctttacaaacaaaaattactatgtgatgataattatgacttctgttcacatactcaagtccttgttgctaagtaaatgcagaaagattattagttttattagcctttgatattgaaattgtcatgttctctcttagctatgaagacctgctctgcccacatcaacttggttattttttcgtaaggaaattaaagtagaaattataacacaattactatcaaaattctactaaactataagtcgaaacaaaatataagaaccgcaattatgtgagaataacatgtgggaaactgttcctgctgctgagatgcgtaaagtgaagtctttggaagaaggcatggagttactaggtagccgcagtgtggagggtggctggacttctctgtcgctagcaatgggcatggtgccattgccaatgcttggaagatgagtgtcttcacctaacttgttaagtgccaactagtcttctgcctccaatgaagatttctcctttgtgtgcacaggttcttctactgagccccaggagtttagggtcatcatgtgcccttaaagtgtggagtgataagagagaatctctatacctctgaccaatttggaggaaagcagagatttagtgttggggccacttacacgtaatcttctttttctcactttttcgctgagaggaatgtggtctaatctagacacctactggctgccttgaaagagcattctcagctatactggcagatctagcaaagagatgtgaaaggatcctcaggtggcccc

SEQ ID NO: 15924 - DNA, 1043 bp, Homo sapiens
gctcaaagagatcatctgcgagcaggctgccatcaagcaagccaccaaggacaagaagataactaccgtttagcagggcgtactgcggttggtgacgggggtcccctcagtcacactcacttttttccttggtatgttattgagtatattctgagcttagttttctctacagtgatactttagtggagaggaggtgtaaggattctttctctctggttttggcttttcatataaatgctaaaggaaggcgacagtacagagtgttttggttgaacaactactttaatgcagtcaaatctaacgggactagggtgggatagggaggaaggtggtatcaaattgttggactctgaaaaacaagtggatggattactaatatttgatttattactcaatatatatataattccagccttggaaagtaggaaagtaggctgctacctaacttttagtcccttccaaaaccatttagtagggttctattacataaacagtagggtttttcctctcctgaccttatccgtttacagttcaatgaaataagtgtatgtgcattgctgtctgtctctattgccaaaatcaaataaatggcttctcagctgctgtttacaacaaacttccctaaccaaaacagaacctctaatttagggctaggaatagaagtcttttgatcccagtccctgggacagttttgtatgctgtatcttgtacacaggttgtaggttggtttattgccattttgttttatttctgctgtataaaaaccaagagccagacaattagacaactatggaggaatgaaaggcaattcaaacatctgcttgattcccgccccgccacccctaatttctgagagaataatggttagagaacattgcatctcacttgaaacatcctttgggggtaaatgattcttaggtgctcacttggtctgagctcagctgaatgcagggaagatgggacagagtgacatttctcctctgtgcggcctccagctgagcctgtctctgaattgttccctcccccgcaatgtgggcacttac

SEQ ID NO: 15925 - DNA, 1192 bp, Homo sapiens
tgacagataaatggtgttagaagatcaaacctctaatcttaaaactgattatgagagtgcagtcatgatttgcaaaagctgaagactttttattacagattgtaaccttagaaattcattattgcaaacaacactaaaattcaaaataattcttgaaaattccatttgcattacaatctagccatgtgaccttgggcaagttacagagttctaatgtataaaatggaggtaataatagtacctacctcagtatttttatggggattaaatgagttaatatactgaaaaccacccagaacaatatctagcacacagtaaatgcttctatgagtagtgtttgttcgtattaacatgaaagcagcaaaaaaatgtttgcattttcctgttcattgaaagaggatgatactgttcaaactgggtggaaatatttggtaaatgagatggtctttgtgaaaatccttttttaaaaatttgataaccttgatttaattaggtaacttaaaattagaataatattggaaagaaattgcagttgagcaaaatattacaaaaatcaagaggttcttctatgggcattcataggaggcattgcagtttggagaagtgagtagggaaacatcaattctgagattattatgaatttccatgtgatacacacataaaagacctgtagtaacatctggcacatagtacatgctcaataaatgctatctgttatttttactatgatttcattattgataaaatcaagatcatttatattctgggtttcagattggttagataggaaatgctgtcaagtcacttgtccagatagtagatattttcttttctttttgtggctcaattgagacaaagaccagcttctacaattaccagatctatataccctcagtgtcctaggataaaaatagaaaagcaaagtgaagaaagacagagaatgtttttgctggagaaagtgaccaatgaagtaacatctttgaaaaggttattcttgaaggataagcccttagcaagcaaagatcatgcttagggtgtgggattgggtggcaatcccatcagaaatacagttatttgaacatgttagttgaaggaaaggaaatctttagcgtatattgaagcttcctgccaatcattgctacctcttttctttcccaaaatctgctatattaatacagatcatatatagcaa

SEQ ID NO: 15926 - DNA, 1142 bp, Homo sapiens
gggttggggtttctggctgctgtgagtggtggccatgatggtgtgacctggactgtctttctatcctcagggccaagcccgaggacccttctctcctggaggatcccaggatcaaggcgatcgcagccaagcacaataaaactacagcccaggtacagccacttcaggtgttgctgaccgtccacaactgcctgcattcctgacagtcctgttagccaagaggaggaagtgactgagcctgttacaccctcacaggaagtatggttaggggtcctcaagtacagagtggaaagggcacagatcggggttttagaagactctggcatgggctcttagattaatagtgcctgcccccactactgcaagggtgactgccacgagggccagcgcttgttcattcatgtggaacctcatctgtacaaatgtaagagctcttagccgtgcagggaatgttctttctcctgagtggtagtgtgcatttctagccagtggagggcctcatgtggtctcatgatatgcctgagacactgaagcgtgtggcacagtggctagcgcaggactctggagtcagatctggacctgaatgcgtcgcctacctgttgctagctgtgacctgacatcttggagcccctctctgatcacctgtggagttctagcacgtccttctgcaggttgtgtgtgtgagagactgagatgatgggtgcgagtgcctggcatgtatacacactcactgtctccttgggctcacaggtcctgatccggttccccatgcagaggaacttggtggtgatccccaagtctgtgacaccagaacgcattgctgagaactttaaggtaagatcttggctggtcaggcctggccctcctccatggagtgggggatgggggaggcctctcatcctgtctctggagtgtcatctgtgggatcaccaccatcctctcttctgaggccagggagctgtggcgagcaagccaagactgagactgacacctcaccagtggagccgtgtgcaggggcaggccttgggcctccagggccccgtgctgtgcacgcatacacctacacctttgctcaggcccttcagccacaccgagaggttacccggggagaatctcgctcttgagcttcactgcctggacct

SEQ ID NO: 15927 - DNA, 1176 bp, Homo sapiens
gggagaatcacttgaatctgggaggcagaggttgcagtgagctgagatcacaccactgcactccagcctgggtgacagagcaagattccatctcaaaaaaataaaaagtaaaataaaagatcatatttgaatggaatgccgataataatcctccctttcataaatatttattcctgccatactattattcatttttcttctgactataaaaaccatctgcctgaaacactgcaggctgtcagtttcacactacaggctgtcaatttcaagttctcttctcttggcaggtttgagacagttccagaaagaacccaagctcaagacgcaggacgagctcagttgtagagggctaattcgctctgttttgtatttatgttgatttactaaattgggttcattatcttttatttttcaatatcccagtaaacccatgtatattatcactatatttaataatcacagtctagagatgttcatggtaaaagtactgcctttgcacaggagcctgtttctaaagaaacccatgctgtgaaatagagacttttctactgatcatcataactctgtatctgagcagtgataccaaccacatctgaagtcaacagaagatccaagtttaaaattgcctgcggaatgtgtgcagtatctagaaaaatgaaccgtagtttttgtttttttaaatacagaagtcatgttgtttctgcactttataataaagcatggaagaaattatcttagtaggcaattgtaacactttttgaaagtaacccatttcagatttgaaatactgcaataatggttgtctttaaaaaaaaaaaagaaatgtactgttaaggtattactttttttcatgctgatgattcatatctaaattacattattatgttagctgacagtggtactgattttttaggttggttgttttgtggatttctttagtagtgatagtagcctgaaccacattttagataactcaattatgtatgtatgtgcatacacatatacaaacacactaatggtagaatgcttttttatgtgctagactattatatttagtagtatgtcattgtaactagccaatatcacagcttttgaaaaattaaaaaatcacactatattaatattttatatttgccaacagaaacatggcagataggtatcaatatgttttcaatg

SEQ ID NO: 15928 - DNA, 1192 bp, Homo sapiens
cttggcaaaatgttctagtatagctggatacatacagtggagttctataaactcatacctcagtggacttaaccaaaattgtgttagtctcaattcctaccacactgagggagcctcccaaataactattttcttatctgcagtattcctccagaagagctaaccagggcagggctggcatgagaagtgacatctgcgttacaaagtctatcttcctcataagtctgtaaagagcaattgaatcttctagctttagcaaacctaagccaaaggaaggaaagccatgaagaatgcagaagtcaaaccctcatgacaaagtaggcacaagtctacaataagctaaatcagaatttacaaatacaagtgtcccaggtagcattgactcccgtcattggagtgaaatggatcaaagtttgaattaaggcctatggtaaggtaacattgctttgttgtacttttgaacaagagctcctcctgatcactattacatatttttctagaaaatctaaagttcagaagagaatgtatcactgctgacttttattccaatatttggatggagtaagttttagggtagaattttgttcagtttggatttaatcttttgaaaagtaaattccttgtttactggtttgactataattctctgttatctttacgaggtaaaactgcaagctgactagcatgttctgtgaatctgccattcctaaaaattttataaacacttgatacttttcactgataatggatcgctccaataaacatatattgtgaaaatgcatccacaataaatggaattccttcctgcaaaatgtctttttctcacttatttttatgtacaatattgatagtgagaggtatgtctattataataaagattatggcacagtaaaacctgtatttcaggttgagtcttggtttcactctttaaagaagaaaagcattttcatatttttaaattacctaataaaatatagaaaattggtcttatgttgacaactgacctaacacgtatggaaaaggttgaagagggattttgcaaatccttcctaaaagaaactatcgtccaggcacagtggctcacgcctctaatcccagcactttgggaagcaggaggattgcttgagcccaggagttcaagaccagcctgggcaacatagcaagacccctttctgtacaaaaaaaattaaaa

SEQ ID NO: 15929 - DNA, 1352 bp, Homo sapiens
caccacagcgcccccttcagcacacagatcccgctgcacagagccagttggaatccctaccctcctccttcaaacccttccagcttccactccccacccccaggctttcagacagccttcagaccccccagcaaaacccccacagatttactacagagttcaacactggaccgccattaggcaaagaggagcaaccattagaaaatgcaggatttgtcccactctgttttctccctctcagcccaccacccacagctcccttctcatctcttatgttctgaagaatccagtacctgatcaattttttttctccctaaccccagatgcaatgcgatcacagggtcattaccatctctttattaattgtaaaaatttttgttgatccagcatttgagtgacactgttgaatgtttctaaaaatgcctttttaaggagagaaaaaaaaatcaaagggcagtctcaatacttagaaaattattgtttgtctgttgcgcataataatgacataatctgcttagcagaaaatgacgattaatctataggaaagctcaagtaaatgcattatcaactgcagaagtttgaaaaccaggttcatttacgtgagattgctaaatgcatgggggaaagcagtggtcctagcatccatcttgtattcagcttatcattattgcagggaaaatgcttttaatttaaattaatttttaattcttttggcaagttgatggcaaggacttgattgtgtcattaagcaaaagaatgtattggaagttgatggaaagacaaattcatctgtagtagtaactggccgattgctaaagagttcataaggaggtgagaagtaatttttttaaaggagaaaaattttttggctttagatttaaagtaaattgaaatgttttaaagaaaaaagtattcacagatttaatacctattaataatataagagctgaaatgtaagtcatttcttcagtccttctcctctgtcggaatcttttttgttttaccataaattcacctgacgagggcactctgagatagcactgctctggggccatctgatcaccatcgggagcaaatctctgacctccttgcctgcagcttttacttaaccctgtagtttctggacgtttgtgcagtattgaaaagacaggagaaaagaaaacagaaacctggttataacctgacgctaaaactaaaaacaaggaaatgtacctctttcttcagaattaaaactaaaatcttaaataaaacagaaaacttgatggtgacacttgggttgtccttgtttttgtttttctgttttgttggatgtgagtttgaaaggttttgtgacaagtagccatcagatgttt

SEQ ID NO: 15930 - DNA, 1101 bp, Homo sapiens
ggacagcactccacaacagagaattatgtagttcaaactgtcagtggtgatgaggttgataaaccctgctgtatgtgtttcaaagaatggaattgccagaagccctcgcagccaagacaaatttgggtcattgggagggaatagggaatcaaggaggtgacttcaggtatggccggactgagatgagctattttgatgggattaggattaagctgatttcctttctctcaccttttctttgtgccagcacttggcatagcaatagtggaaaaaacagtgaaataaacttcttttcttctaagctagatggaatatgatcctattccaagagctaaaagcatcattctacttccctgtaacacttgcagctttactgtaagccacatccatgctgtcaggctcccaaaatgtcaaggcacatgattttttggggggaggaggggtgtcaagattgttgcattataaactagctaatttatttcccaaggtatcctgtaatcatagtgcacctgggaggatctaaatttctcactgtttctgcatcatgcgccatatgtgaatttctttggctaacatacccttgcttgatttgattagtctacaattacaggaacaaatgtcccttaaaacaaacttttttttagagtagttttaggttcacagcaaaactgagtgggaagtacggagaattgtcatataacccctctgcctttattgtcttttgactttattactaattttcaaataagatttatgtaaatgcaagtgttattctgttaatgcaaaattaaatgttcctcaatttcattgctcactaaatggtaaagcaaaagttaggagcagattgttctgagttatgggatattctctctctccctattcagtagaagagggaggatcatttgcatggacttcttagggacattagccactcggtgtaagatcatttatcttcctgaaaatgttcccatgtagttatacatcatctttttatttctgggggattttatttttcttataggaagttttccctgtttggcttttgcctaattggaagctattttaagttattcagcatgacagttggactgctttaaaagt

SEQ ID NO: 15931 - DNA, 1196 bp, Homo sapiens
atttatttattattgcatagtcaaaatgtcatgttttagcatcttctgtggcctgtgaatcactgctctctataaccatgggaccactcccacccatccttttcccgatctttttttggatagttgttttcttaaaaaatctggaagcaggctgggtgcggtggctcacgcctgtaatcccagcactttgggaggctgaggctggtggatcacgaggtcaggcattcaagaccagcctgaccaacatggtaaaaccctgtctctactaaaaatacaaaaattagccgggtgtgatggtgtgtgcctgtaatcccagctatttgggaaactgagataggagaatcgcttgaacttgggaggcagaggttgcagtgagccgaggtcgcaccattgccctccaggctgagcgacgcagcgagactccgtctccaaaaaaaaaaaaaaaaaacatggtagcaaacgttcagggttatatgtttgggaaacatacagtacctactgaagttcaggttcaggcattgtctactacatagaaatgattaaatcgaggtccttttcctagaggagctcaaagtctagttgtaaaaagtgaacatgtaaacaaatgattgcaatacactgtggtatttgcaaaatagcgaggatgcctgccatctaagaactcaagtataattattcccattccctgcttttgtaaatcctaaaattatgtcacgtcctcctagggtttctgttatttttgcagtagccaaccagttcttcgttggtcagaattaagtccagaataaaagttttcttccttattttcaccttggaaaagagagatcgtcagcaaggaatgttttatcaggtttattttcttctagcagatttagacttcagagatgttagggtggttgacaccttccatgtctctgcaattttgtcatttgttttggggaagtcatattgggtgaatattctggtgatctgtgtattgtctccttattttacattcccttgaccatctttggatctcctcacagggctttgttcatggtcactgctcagttttgtgctcacttaaatgcttccctccaggctgctgctttgacattgtaaagatcttttatatgaatcttttttgtcccttgccctcatttagcgttgcttacatattgtggttcgggtctcatctgatccagtctgtgatgctt

SEQ ID NO: 15932 - DNA, 1121 bp, Homo sapiens
aaatatcgcatttttacatatatcttattttgtgaaaatagtaccattattttcttcagaaataggtagtccttaaatatatggacattgattccagtttcagtgaagagtcccactaagcaaagctttactgttagtggaaggaggatggcataattagaaaaaggaatttgccttcttatgtgtctaaccactcataacatggaacagatttttttgtctatctcctctccttatatctagggaagatttgggtgtccaagttttggaaaccatagacagatgtttcctttagttcttccaaatgagcctcatctataataaatcctgctaataagagtttagttctctagtatttgcagccatactttttgttttgtcatgtttgtgcctcattttaggtgacttgaaaacactaaacatggagattctcattgtgttgtcagttcacattgagtcttcttttcctttacccctcttcctcctgcaggcatctctaggtacaacaaaatactgcagttacttcttaaagaatatgcagtgtccaaaacctgactgcatgtatcttcatgaattgggggatgaggcggccagcttcacaaaagaggaaatgcaggtagtaaagtcatgtgaattatcaactttgcagaaaagggagtacttttttttttattagttaacattgcaaaagcaaaaactaaggatttgattttgtaaaaactgatattactttaaagtagcatttgccaaatgaagtgtttaatggaaggtcagttctgcaggatattgttacaataaaaatgtgtctgtggtcaactaagtttgaaatgctagattaatgaagatgaacaggtttctttgctttaagacttttcagagtccttaatatgctaatacagatccacgaagggaatttacaaccagaacttagttgaccaggaaaacactttgggaaatgctattttaaggggaatgtcaacaaaatgaaagctaagtgggatattgtaattatttgttaaaccaatctatactctttacagagcttgctagaaaataatactctgtcaaatgatgctgataaactaatattatttttacaaaattattctccccatgcaagt

SEQ ID NO: 15933 - DNA, 1174 bp, Homo sapiens
ttaaagcatatattatacatgttcatgattgcacatgcctaatttacttaattgcttgtttctttaccattcatttacattttcaaactttttattaaaacattctgagacagtgactgtcatttcagtaatgtaatctttgatctgtgttttctgtgaagtaaataaaatttttgtgatctttagatagcatgatttctattttagaatttatgtgcagaaaaaatgagtgtctaacttttttcttgtttatttgtagtacacttataaaaatgactgaaaatagtgaaattgaaatttaggattattgtcattttctttttttgtttttagtatgtgtacaatcaacagtagtgtaccttttgggatgtagaaattaatgttaattggtcattattcttctgtgagaatgctcagattttctgacttttggatattattcctgtgtatcagaagtgagaatttatctggtgatcggtaaagtggtctatttttgtgttttcagatatgattcatcaacttccactgttgacagaaaaacagtacattgcaacaattcactctcgtcttcaggactcacagctttggaaactgcctgggctccaagccactgttagacttgcctgggcgctggcattgaggggaatatcccagctacctgatgtgacaggtgaattgattgtaggtaattttgttatgagaaacagcatgttagcacttaatgacatttttggaaggagtattatctttgacatacataagcataagcataggaagatatccagagttgtattaaatgaaacctttagtgtagtagtgaaatacagacttttttctccttgtctctcaaaaatatcatatgaaatactatttcccattcttggagccactgacaatgctcttttaccttcagggtatgagtttaaaatttggaatgacagtgtcacattaattttttttttttttgagatggagttttgctcttgttgcccaggctggagtgcaatggcacagtctcggctcactgcaacctctgccccccgggttcaagcgattctcctgcctcagcctcccaagtagctgggattacaggcatgcgccaccacacctggctaattgtgtatttttagtagaaatggggtttctccatgttggtcaggctggtcttgaactc

SEQ ID NO: 15934 - DNA, 1099 bp, Homo sapiens
aggtttttgatgtgctgatttttgggttgattttggtataaattgttattactgatttaacatcctcctagattattaaaggcaaaatcagctcagaaatagaaaatgggtgataagtaatacatttctaaagagagaagatgaaaattttattttatgttttagttaagatctcgtaacattgactatataatgaagaggtcagtaaacagcaatttcgtgattttttttttttttttaactagcttgatgctttgggaaggaaaattaggaagcaagttttgaaatcaatgaatttataaaacttttgtttctttaattatgtgtatagagagctaacttacggcaacttaaggaactgagttttctattaaaaatgtaactaaaacgtaaatacctaagcaggtttgcctatttttccttatggatgaatatttacatatatcaatcatagtttttctaatatttagaaacctgtaataatttgtcattttttaccttcatgttacttcagagtataagtcagaaactaatggctggatttgtggagtgtttggattgtgaagatgcagaagaatttgtacgtctggaagagggtatgccttagattaatgtgcatacacgcattcttttactttttatatatgcttaatttaaagaaaacacttgtaattgttaactgttttagtgatggtgtaagaggaattgagaatttgctagaatacaggttgagaatgcaaaatccaaaataaaatctgaaaccttttgaccaccaccaacatgactctcaaaggaaatgctcattggttcattttggattttggatttttggatttttggattatacatcaacctgtataatgcaaatattctaaaattcaaaaaaatctgaaatctgaagcacttctagtcccacacatttcagataaagagtactcaacttgtaaatttataaggtttttaggattccactttaaataaatctgaaatgaatgtgatagataatcaggcaaacgatctaaagaaaacatggagttggaatacaagttttgtattttttatttgacttacgttaactttccactgttttgtaattttg

SEQ ID NO: 15935 - DNA, 1181 bp, Homo sapiens
tgcagtgattcatgcctgcaatcccagaactttgagaggccaaggtgggaggatcactggagcccaggagtttgagaccaacctgggcaacatagtgagattccatctctacgagcatgatggtgtgcacctgtagtcacagttgcgggaggctgaggtgggaagacctcctgagcccaggaggtcaaggctgaagtgagctgagattatgctactgcactccagcctcggtgacagagcgagaccctgtcttcaaaaaaaaaaagctatgaaatttgttaatgattatagctgaaagcaggattctcactctaatttgcccttgtcctttaagatactggatgatgaagctgcgcaagagttaatgcctgtggtcgccggggcagtgttcacactgactgctcacctaagccaggccgtcctcactgaacagaaggaaacatcagtcttgggaccagcagaggcccattacgcttttatgcttgatagttgcttcacctcacctcctcctgaagagaacccattagtgggttttgcttctattggagattcttcactttacatcatattgaagaaactgttagacttcattttgaagacaggtttttttcatttaaattgtctataaattctatcttttgtatttgttttaactttaattgagaaaagattttcatttgacatcttcctaatctccctaggtggtggattccaacgagtgaggactcacttgtatggctctctgctttattacttacagattgcccagagacctgatgaaccagacaccttagaagcaggtagaatgagatcaattcctaatcttttctggattgggagatggttactttaaattgaaaaaaaaaatcacttctccatcttttgactaatcacaactgtaaaaaatgagtgttagtgtcatttttaaagcatttactcaaaagttgaggaagaatgtttagtttttaagaattatgaagtagtacatgagtactacttttaagataaccttcaaataatactttagctttatatacttctgtaactccctcacttgcctcaagtccgactgaacagtgtgctctacatagaatggtccaatgtctttctttcctttgtgctacatcagagtacttatctagttgattcttttaaaatatctcggcctggcatggtggctc

SEQ ID NO: 15936 - DNA, 1039 bp, Homo sapiens
ggaggctgaggcaggagaatcgcttgaacctgggaggtggaggctgcagtgagccaagatcatgccactgcactccagcctggagacagagccaggctctgtctcaaaaaaaaaaagaaggaaaaaaaaaaagactgatgagcaggataaatacaggacgttggttctcatggagtcttgtaattcattttgatctctttcagaatgatttatccttttccaggtacaattattatcttagtgttatgaaacatgcatgaaataggtgcattgtgttattagagttaacctgcttggacccaccggtcagtgggcctttgtgtacaagcagtgatggaaggatttttttgttgcgttttttttttttcttccttagctcatacctagcatgtgaggtataattactcagttattacactgctttttactggagtgtttttttctgttttaatccttttagccaagaaaaccatgtgggaaaggctgacagcccctgaagatgtatttagcaaattacagcgagaaaacatagccattattgaaagttatggcgccgccctcatggaagtggtctgtcgagatgcttgtgatggtcatgagattggaagggtaaagcaactcttatttagtattataattgaataagtattttgacttattaaggtataaactgattcacggctgggtgtggtgcctcatgcctgtaatctcagtgctttcgaaggccaaggtgggtggatttcttgagtataggagtttgagactagcctgggcaacatggtgaaaccccgtctctacaaaaaatacaaaaaattagccagccatggtggcatgcacctgtagtcccagttacttgggaggctgaggtgggaaaattgcatgagcccaggaggcagaggttgcttgcggtgagctgtgatcgaggcacttcactccagcctgggctgcagagtgagaccctgctgcaaaaaataaaataaaataaattgattcaacttttaataatgtatggtacatattaagaatcattttttataat

SEQ ID NO: 15937 - DNA, 1217 bp, Homo sapiens
gctcccggcctaatttttttaatggccaggcttgtctcggattcctgacaagtgctccacctgcctctgcctccctaagtgttgggatacaggggtgagccactgtgcccaacctagttattatttttctgtgttttctgtaatgagcattataaaacttcacagtgagaaaaaacagctgttaaaaaaatttcttttctctaacaagcaatgttagagtctactaaaatacatctaatgccactagtttaacgtgttaggttttgttttggaaatacatctttacctgagagctttcctttattgataaattgaggttctggagccatagtttttaacttctcaaaaaaaaataaaaaggaaattttgttgcaagtaacattctctttatgaaaaacattcttcatatttcatatctgatgtcagataaattcagttactgttgttgattttggtagcatctacatgttttggactttaatttattcttccttcagatgctggccctggctctacttgatagaattgtctccgtggataaacagcagcagtggcttttgtatctttctaacagtggctacttgaaggtcctcgtagacagcttggtagaagatgaccgtactttgcagagcttactcaccccacagcctccccttttaaaagcactttatacttatgaatctaaaatggtaaggctttctagacatttgatgttagatcaagaagtcgttttctcttggctatagatgtattaaagaaaattaatgtggcatacattctgaatatttctatcataagctggaatccttttttaaggagttttaaactttggaatcttcctagtgtgcaaaagatgagtgaaatgatcctcaaagggatagctggataatgggactgctgcttccctcactcactcaggttgctcatgatggcaatatgacagccagtgctccgtgaggacagagcaaaattgtcctctcacaatacaatttagactatagtagttgcctattgaaaatttccatgtagatatgctagttctattctaaacacagcattttcaatatagtatataattcattgtttctttgcctgcaaatctgttttaatttctttttcctcctagttaaaaggatcacaaatgttacgataatagaagcactgaaattttagattcttcatttactcctttttcctccttcatttatttaacaggt

SEQ ID NO: 15938 - DNA, 1180 bp, Homo sapiens
ggggagaatgacatgttatggtcactggcaggctcattagaaatcaggagaggctatggcactattagaggtgggtcatttcgatttaggaattttgtaacgggtccaaactaagaagttgaatggaaatgtttttgttttctttgtaaattgtactttgcctaggggaaaagcaaaagcaaattatgtatatttagaggtgttaaaaagaaatgcattttattcttactgtttcatattctaaaaactcctttatgagaaagtaatttagaaaattacttttatcattataaaaaaattagatttttcttgaaaactaaaaatgccttttaagatcatttcactctgcattttagattggctttgaatgcgcatgtaccggtgctgttattaatatataacaggtacttacagtctttgtaaaatcatagttctcaaaacttttttatggcaagaatatctgttcatgcacataaacaatataaaatattagaacctctcttcctagtttttaatgtttttgtttattataataatatgttttaaagcattctacattttataggaatattaagtgaacttgacgttgatgtaaatgaagggtctctaatggagctacagggacatattggaagattccaggtaactgattcttatttctttaaatagcagttataagacatgttacaaaatataccatcctccccattgtgccccctagatttgggaaacccctttcaactgttttggttctttagtttttctaaataatatgcttatattgctgcttcttgattttctaattttagtaatcatctgttgactttccattgttgggggatggggaggagatgagaatttagatgtttttactccttttcttccatcatacaatgtatacatttcccataacaccccctgaaactcaatataattacatcatagttttggttacattaatatttagtgttacattattatgactgtgtaaatgtcatttgtgaataagccacgagcagactgtttgccctagagttttcttttttatttgcttggtttttatgtacttattactaatttatccccagattctttacaagctctgtaatctcctctcaatatgttctaacatattagtttgtcaattagatattttatcagtctttctgggagcctcttg

SEQ ID NO: 15939 - DNA, 1122 bp, Homo sapiens
aggcaaagcaggaattagtcacttggtgttaagaaaccccacaattgtgtatattgtttttgatgtggaggggtgtgtgtgtgtgtgtgtgtgtgtgtgtgtgtgtgtgtaaggtttatactttgatagagttctcaaaggactctttgcctaataaagggtaggctctgccaatgtgcatcagtcagatttctttattctcgcaggatttccagccttatgtatgtacctgattacagtggctcctaaccatttgttctttaaattataaatggcatttaaaagtaatcttgggttggttttaatgacaggttacatgtccttaaattctggggcatcccttgttttaaaacaggtcatttgaaattcatatgaaatgcttataagtggaacattgttttatgtcatcacctctattagatacccaagctccagtggttccatactggcgcctgcctggtttaggcattatcatctacctgctgaaacagagtgctaatgatttcttcagctattatgacagtcatcgacagagtgtcagcaagctacaaaatgtagagcagcttcccccagatgagataaaagaggtacgaatcttataatgagctggggggacttgagaaatcattgctgttactaggccagggtactcagactgagtaaagacaacgtatacagtatgactgaaggaattggaatgattcttctgtgtgatttgaagaagactccttcgccgtagcaccagccttataagcatagaaactcttgactgaaaaacagtgaagtgtagcacctgttcaagaaaatagaaaggcagctggcctttgaatgaagagttttgggtcatttatactctaaaatctgttctgagaaaggcttctgttacagattttttttttaatagaacttgggtaaatgtctctgtgccttcagcatcttcaatatctgtttagcaaatctttcaaacaaatgggatagcatatgagacttgactgccttccctcagtgacccagaagcattccctctacttacagtattaataactaaagatgctgcattaccaggattgctactaagtagcttgctgccttttccatttggcacagctgaatgtaaggcat

SEQ ID NO: 15940 - DNA, 1377 bp, Homo sapiens
aagtaaaaagtaaaagcttctttcccacctaccctcctgtcctccctccctcccttccttccctgcattctccttccctccctcccccgccagtcttactgacttcttgtatggcccttcaggaaatgtttttgtgtgtatgttagtatatcagcatcagcatcaacattcattgctatttaaagcaggtttttaaatttatacaagaaaagaaagcaggaaaaacatgagaattaaaccaaaaaattctaaggtagaaaatgtgaatgtttagttaatttagtaacacattacaaaaattcaaaagtatttacattgaaagaaccacattacaaaaattctaaagtgttttaaattggaagacttagaataaaagaaatatttgagacaacaattttaacaaaatgtcttttgtgtcaccgctagcttcaggctgatgcaatcaacgcttttggagaatcactacaaaagaaacttctggacattgaaggattatattcaaaagttcgatctcgatatagtttcatacaggctcttgtcagacgtatccgtggcctcttgaggatatcaaggaactgagagcccgtgcttatgctcttctatgagagagatgaattggggagaattgtctccattttatagattagtttctttctaaattatgaccaaaaatattttgctatttctttctttgtatatggacatcttttctgtaaacttcttcccctagttccatcctcactagtaaaaaataaatactttttaaaaaaacaaaacaaatgtatggttaatcttttgatcttttatcttttgatcagcattatcaggaatctaacaaataaacctacaacagtggtgattttcccatagagatattattctgaatgccagattaaaggcatagtctgaaaattctaattttttcaccctttgtagctacattacactattaacaatattcagggttactaaaatatagccatgctcttatagaatagtgtactcaatactgtgaaaatgtctgaaaaagtcaagctttttcctaaaattatttaggttttccttttttttgtttttttcttttctgcacgtaagttgacaatacaattgtcccttggtatctggtgattactggttctagggctcccacggataccaaaacctatgttttggcatgcatgttccttatataaaatggcattgtgtttgcatataatatagatacatcttcttgtatactttaaatcatttctagattacttacaatacctaatataatatgaattctatataaatagtggttaatactacgtttttaaatttgtattattttttgctgttacactggttttttcccccccaaatatttgtgatctg

SEQ ID NO: 15941 - DNA, 1174 bp, Homo sapiens
ctccagcctgagtgacagagtgaaaccctatcttaaaaaagaaagcaaaaagaaataaccactatttagcagatctcttttggaggaagataaaagcttgtaaaaccatttatctttggaggaagagaagtacaagaatattgattaggtagatgcaaaattataataaccttttttctcttcaaagataccaaacctggctaaaaaacttgaagaaattaaaaaggacttggatgccaagaagaaaccccctagtgcatgagactgcctccagcactgccttcaggatatactgattctactgctcttgagggcctcgtttactatctgaaccaaaagcttttgttttcgtctccagcctcagcacttctcttctttgctagaccctgtgttttttgctttaaagcaagcaaaatggggccccaatttgagaactacccgacatttccaacatactcacctcttcccataatccctttccaactgcatgggaggttctaagactggaattatggtgctagattagtaaacatgacttttaatgagtagtgtcttctttatcgtttgcgatttttactaccttttttcaaaagaaaaattgatgagttttgtatagctggtcagatacaaataatagtgacttcacagtttagtaattataatgggtacttgttaaacatttggtactaaattatgttgctgcaaagtaattaaaattagtatctagagctagtttctggtgaattattcatttattttgtactgttgttaggcagctctgtagttgctaatttaaccaataagtcaatttgctattcatgaagaaacgattctgagaatcctgtcaggaattggggaatgaaaaaatacacaaaataatggtctttgtcccagtagagttcatagtctatttagtgtgcatgtttttccttaatgatgtatttgatctgacttttttccttctcaaaagaatcatacttgggattacaggtacatttgatgttatatgatggataagtgaaaagtttttaaaggagattttataccttttcacattaaaaaaggtatttatattattactttgtagtgattgtcttaagaaaaaatatagcccaaatgtatagtaaaatcagcagctcaagaagaatttctgcttctctttgtagttgatgct

SEQ ID NO: 15942 - DNA, 1641 bp, Homo sapiens
attgttttggaggaggggcaaaaggaaccatgatcaggcttttactgggattcctgatcaagtaagcctcttccctttctaataaaatatacaccttatacccaagggagagcaaagacaaaatacaccagtaacatttgaccttttcagctccctagctaatttattagattgtgttgaaggtctgattctacaaaggccaactctacatatttggtagccctaactgtctgagcagtagtggctgctgtgatgtaaacttagggtgctgagataagcaattagctctagccttctgccttaagaatgcactctactggggatttcctggcatagttaagagcgctgcctataaggttggtgaccaaatctttcctcggtgactttaagctttatgtgaaagcttagttaaggtgaggaggggcacactcctaaattgctggatgactgaactttggattttctctcccctttcacatggatttcatgtctctttagataaaactgactagttttatttataaaatcttaagttttggaagtctaaaggagaaaccattccagtatgcatatttttttctcctctagattcatacatttatatagcattgaaacactttcaaactcctgctggtagtaaaaggggatttaaaaatagaatcatagccataagcctgttagtatcatatgaagagagaacagttatcttagtacctatggattttctttatttgctgtttgaatggattgaccttggttatgtgttgagaattaaggaacattctttgaaatgcctctctcagacccatcttggaggctgattacttactgcaccaaagctatcactggggtgagatttactgtttggacaaatttagccccatcccttcaaaaatacacttgtaaccaggtttcccagagttgttgataggcttctgctgaacatatgccaacccacctgcataatatatttttgttgcttttataaatcatgcattacataaagtgtgacaacttcaaaatgtattctctgttcttggaatacagtgccctaaaatggtgttcttatgacctgcagaaaatatttacacatatttccaaatatttatttcatgagcagtacagctaattaaaatatataagcttaaattttatatcttacatttaaaatattaagattcctttgacttgccatccatataagcttgctaaaaatattaagaccaagtcatgcaataattgaatgtacctcaaatttttaggggagggtgggttagggactgatactcagattgtggataataattgaattggtttttaaaggcaacatagcattctacagcagggttaatctattatcaagaacagtcaccctggttaataacaagttttactgatcagttgctggttggttggttggttggcatgtgggtgtgtgggtgtataggtgtgtgtgggtgtgtgtgtgtatttttccccatgagtcctttttttaatcctgtggctttttcacttacaactagcctaaccctgtaattttcctacatccaagaaaacaatcacaaagtagtggtttaaatactttgttgtatttggctaattttgctgtcttaatgcagcctattaagagttgggttaaaa

SEQ ID NO: 15943 - DNA, 1641 bp, Homo sapiens; identical to SEQ ID NO: 15942

SEQ ID NO: 15944 - DNA, 1182 bp, Homo sapiens
aaaggagctctacccaaacagaaggacaggaaagagaaaaatgactgttctttgtacagtgcatcatgttgtagtctttatgaagaaaaatttagaatatggtttatatattctgcctcaaaaggcacataagttcataatatattttaagaggatcttttaaaaatcaatatagttcagttaaaatcagttttagaacttacagcactcgactccatatattatcatctgcggaacgttgcacttcagtttttccatatgaatgatgttagtgcatttacatgacgttccagaaggctgagagatagcatatcttaatgcaccagttctcaaattcttctagcccagatcccttgtgcaaaagatgttttgactcagaatcctgatttgtaaaacaaaggaggaggcattgcatttcattgaatgcatgaggcttcctgagttttctccgcatcttccttccatcttcagtgactttcgtaacagactaagaaatccctggaactccatagaacttaatgcagagcgtagtgtcaagcacgaagctagactaggacaggagttattggcaaggagggaggcttttcaggcatccttaaatcacagcctgtaagtggttgcctacctgtggtaatattgcattgcttatccacaatgtaatttactaggagtttcatgggaaatgaatagactaaaatcaactccagtttcctttgtgtcgctataactctgattagcaatgtgactcaaatgccccatgcattttccacaggtggtgccaaagcagtgattcgcaccaggatatccataggaaacagaagggaaaccatgatttgcttatgggtgctctaccctgtagagcaaaatagaattttttgattgtccttttgattgctactgctgtgttactacgattactactgtatgttttcttgttcctccccctccttctttttctcttcttcttttcttttttagtagtagaacaagacactgttcagtagtgtagctagatgctttggtttcttttatcattgttatgtgcaaaagcaattgtcaaatgtatttcatgtgctacaccatgttcttccctcaggaagaggaaatccgagagtgataaaagcatctgcaagcagaataaaggaatctcagtcagtggatttcttctacaagtttcatggc

SEQ ID NO: 15945 - DNA, 1218 bp, Homo sapiens
agtaactacacacatcttgtgtgcacatgcaccgacatacatattatcacctgaaaatataaacccagatgcaaacacaggtgagcactaaattaattctaaaattcatttgaggatttggcaccatgaagttgcatagccacataccctcaggtagacaagacaggggaatggcagaggtaccttggtagaaagtgaaggagaagaagaaaggttggtggtccagagaagtcagtatttccttgcctggaatgagtgcctgcctatcgaattttgataaaacttcttgattgtcatccttgtttcattacggtcctcccaggaatattttgcttttttctaagctttaaagatcatagcttcgtgacttaatctttggactggatttccccacttatatgagaagaactaataatgccacatggagcacaccttttcaggactcaaggagtctaaaaaaaagaaaagaaaaatgagtcagaacttctgcctgtgagtctgagtcagcttagtgtgttaaaaaaaataataataaaaaaagaaaagaaaaaaaaaaccgtgtgaggagacctgcctggaaaaactgctgaatggaaagacttgagaacagcttatagatattgacggcagatgaagaattttcatgtcttttcagaaatggttagcagccactcataacagtcctgtgacgtcacagaaatcttgactcctgcttgtctttctcgttctcctttaagcccttccctcctccttttcatataggaccttaacacaagagggtcaggaagagaagagaagggttgctcacaggaggaaagaaggcaaggggtagctgttactttacctggtgggccatgtgtcgctacaaatcaggtggtctctttggaggagatgccacttggtaagggaggcttcctgagcactcgaatactactagcaactcagaatgtgggaccgctggaaggaaaaacacccctggatggggcgaaggttgagttcaattttattttttactctgtgtgtgtgtagggggagggtaatgggaaatgtgtgttttgcagacacattaacataaggagaatagcggatgcgactttattatcctcattcacgtaaaggtggacatttaaatttttttttacagtagggaaaaagaaccttctgagttgatttggtatagtggaaattgcatggaaatgtttagcttcctctgttttc

SEQ ID NO: 15946 - DNA, 1306 bp, Homo sapiens
ctcccttcttctctctctgacacacacacacacacacacacacacacacacacacacgtgcacattcctcccttacatgctcatttgtgccttaaatgtgccttataggtaaatccaggatgactgaggaatccctcgtcactgggagattttgtatatattcttttattattagattgagttgggtgtggggaaaaatttttttctgaaggctcaaaagtggtttcctaaaagtgagccactatcagatttgcacatcaggagaaaagaaatagggttacgtccattaggaaaatcccagtttgcaggagtgcaatcacatcaaaaaaacaaccagccaggattaaaggtattataaatcctcatagcggaacatttctcagggcaaaggaacctggctcatttgaagattaatgttccatgcctttgtggtcaaagggtcagcacttaacacaggaaaaaactaggtgttgttttgttttgttattttggacaacataaaattcaggaatgttttatttagccttggtttctagaaggaagggaaataatatttcttgagcatttactagggtgttgcgtgctgtgctaagtaaattttaagtctttcagttttatagatacggaaaacaagggtgactctttaccacaggatgaataaagaactaagtaatatgggaaatgcagcaatttctggactagctgagccgattccttcctgtgagcacactgtaagctttcaagttctctgggcaggaattacagcacctgtcccctgcaatggccctgctgtgtgatgctcatcgcttcccttcgtgctggagcagtcccccaggtgtccatctcctatctttttgttccaatcttctgtgagttccagctagcaggctttacatctggggaaaggaaaaccaggggttttagctctgttctctgctcccatccttcgctcaccagctgagtgagaacatgaactttttgcaccatgtacccatggcttacactacttagaaaatcaccttttcagataaaacagtttatgagttcatagagaacaccagcactctttgacaaaactgtgagtgaccctttttaaacaatgctgagcaggccctgagctataatcaacggtgagctttaatgtctatgctgacagttaggttttgctctcttttgtaacaggttacgtagaccagcagtgtttaaatctaaatacgttgtgagtctgttatctgtcctatcgcgttttttaaatgactttttattctttatcatagctaagtaaataccaaaaaaaaaaaaaagc

SEQ ID NO: 15947 - DNA, 1151 bp, Homo sapiens
ctcagagcgagagatgacacaatgcctcactcaggccccgggctccctggccacaagctttttctatcctgttttcatgacagagaaggggaagccctgttctgacaacagacatttcagacaaccttgctggctttccacacctgcctggccccctcctccctccacacttccactttgtcctcctcgtcccctacctcaacaaagcagggtggggtaggtgacatttgtgtatccacattcttacctttggtagtcaggtttggctactttgcagctcgcccaaagagatacaacctaatccccaacctacttttagtttttttgttttttttttatggttaaaagtaacttttgtagtttaaaaaaatctttcctctttcatataaataagaagtggaaattgcctttttattgtgtaatgtagaaaaccctcaagtgttttttccgagcttgggaaagattttgtgtaggaaatgtgcatagagtttgtattttatttttattagcagctgaaatgcctttggttttggcttctctctctccctctctctctctgtctctccttctctctctccccccaccacccacccccacacacgtcatctgcattgttattggagcctgtacttagagggattaagcccacaccctggcttccattccatatcaggtacaggatttgatgttattaacatttgtcgtcatacctcataagtcggtccctgccttgtctgtctaggcccatttggggctccctgtgagtgattcccctctctctgctatgctggagacggttccagcctggaaagcggccaagttcatcttctcactgtgagtggaagctggatcgggcccccgtagtcctggcagccctgttgtctggagggttcttgttgtccctcccattagccagggcggagactgtctgagctgtgcaggaggagggttgctagtaggttctgcttctgcttctctctgctccactgtctgcagcccagatcctgttgggcctggctggtgtctggtaaccatgggcctccactgacccatccctctcttttaaactgtcaggtcattatcaggcataggcagcctatagggcccaaagaaggcaaaaagataagatttactcaagtagcatttgggca

SEQ ID NO: 15948 - DNA, 1140 bp, Homo sapiens
tttattatgtctttttgccaggcatcgaactgtatcttttacaagtatttcaagtaaattctcataccctatggggatgatgatcatcatcatgaccaagatggttaagagccattgggttgatctctcagttcttggaaggccatacttttgaaaatttaattttataaacttaagagtaacaagaatagtacaaagagcttttctagttcctgaatcctttggaggaaaaaaattcaattatgccctagatatgtgagccctagattaaatttgtttaggtgtttcttttttttcaatatatgtatctcacaccttcttaactagattttgatgtttgttaggcccttgcattatatttctgctgtttcctctcagcatggtgcagtatacctagtggtatgtggtaaatgctcagtgattaaaattcatgccaaatgaacaattctgtatcatagatgtcatggaggaggtgggaaagggaaatagtgaagagaggaaatgatgcattaggaattcaaaagtacattgtcccctaacagtggagagtggatttgcactttctgccgagacttatctaaaccagaagttgaatatgattgtgatgctcccagtcacaactcagaaaaaaagaaaactgaaggccttgttaagttaacacctatagataaaagggtaagtctttggtaagatgcattattgtattgtagtgcaatattgtactgtggtaccttttgtcaaagaggtgtatatccatccagattttatactgatcctttttatttaagagtatttttttttgtttacaaaggtacatgaatcttaaagactgtaactttctttaaattaaaaaaatcacagaattaatgcatgtattttatagaagcttattgtacctgaacaagatggaatatgtaccctagacttttaatctaccttaagtaaatttctattttgttttatttcctactatagataagatttttccttagaactgccaccaaggagctgggttttttctttactcttcctggaaataattccttttttttcactgaatgggactagacttatgcatcaaagccaactgatatatttaactgtaaataacatttaaagctaccaagtcaacactttgtt

SEQ ID NO: 15949 - DNA, 1207 bp, Homo sapiens
caaaacagctcattaatatatataatctcagaagtcaaaagtgtgtcctttttttactcatttttatttttactccacagcctgattcagaagtagccaatgctggtataaaacttgaaaattattttgaagaacttctaaagaacctctatccagaaaaaaggtttcccaaaccagaattcaggaatgaatcagaagataataaatttagtgatgattcagatgatgactttgtacagccccggaagaaacgcctcaaaagcattgaagaacgccagttgcttaaataatatgcagcaccactagcttgtgctggtttttagatttttttgttttcaaaaaaacatttgtcagtaatttaacatcactacaaaaagaagagtttgtgactattctcatctctgttttggacgtttactagactttgatttccttaatagcccatttctgttaacctcttatcactaagaaagaaaggaaagaaggagatgaatagaagaaagaaaatggaaagaaggaaaaaaggaggatagaaaaaggatggaagaaagaagcattgaaaacaaagacattcttcccacttcttggatttttaaaccacagtctggagtgatagctactgtagaaaggaaatagactttgtatgaactctttaagttgaaaagtaaaaaatatatgtggtttggatgtgtgctttaattcagctttagaaattaataccactacccgtgaattatatggcctgacaatatgaattaggtgtactgtactgaagaacagtactccacaaacatgggtggtaacaagagttccatcccaggaggccaaacggtgcaacagaagggtaggttagatgctattaagaaggcacttaatagtacatcatgtaagatggcaactgtattaaagaaaaatccggaaaacaaatgtttgatttttgtttttgtttttatcttgtctgtagaggtattttggtatagcaggttttcaaggccattttttatacatttctagatctagattttcaacttcttccactgagggaagtatatacatttgggtttgctgtgtgtctatgtgaggtttaattgtacaggtgatccttttacaacaagcctcattgtttgcagtatagcttttagtggaactacccaaaatataaatacagcagcgtgcactgtatttgatgtgagggttcttcatcata

SEQ ID NO: 15950 - DNA, 1144 bp, Homo sapiens
ggaggctgagacaggagaatctctcttgaacctgagaggcggaggttatagtgagccaagatcacgacactgcactccagcctgggtgatggagcaagactctgtctcaaaaaaaaaaaaaaaaaaaaaatcctcaggattctcatggcagccatcagcctgggtgcctgccgtggccaacccttctgactttgtgcttgattttacgaacgctctgcttcctccttccctccaccttccagcctctaactgatgtgtttcaatctcccatttcttaccccacggcctcccctcaacaacagggttgagttccagaacaagttctatgtcggggatggttacaagttttctccattctcctttaaacacatcctggatggcacagccgaggagtaggctgagggctgcacctcccacggtggtcaccatgccaatgaaggaagttcagtcttgtctttgatatcagcccctgcaaggcgctcaatgggaaggttgttcttggctcacctgaagcatgaaactgtgtattatttggacgtcagcctgtggatttgatacgacttaaccacgtcagaggaaggactttggcaagtgatattgtcttcatgtggggtattaattctcaaataataaagtaattgacaaatgaggggagaatgctaaacagatgtcttcttgcaatattttaaatattgtatttgagaaaataaacatctgagtcattcactttttccttaagatgtctttattcggccaggcacagtgactcacgcctgtaatcttagcattttgggaggccgaggcgggtggatcacccaaggtcaggagtttgagaccagcctggcaaacatggtgaaactctgtctctactaaaaatacaaaaattagctgggcttggtggcaggtgcctgtaatcccagctactcgggaggctgaggcaggagaatcgcttgaaccccggggggctgaggttgcagtgagccgagatcacaccacttcactccagcctgggcaaaagagcaaaactccatctcaaaaaaaaaaaagatgtttttactcaaaattattccataccagtctgggcacagtgactcacgcctgtaatcccagcactttgggaggctgaggcgggtagaatacctga

SEQ ID NO: 15951 - DNA, 1266 bp, Homo sapiens
ggcaggaggatcgcttgaggccaggagtttgagaccaccttgggcaacataacgagaccccgtctctacaaaaaaaatttaaaaattagctgagcatggtggcatgtgccagtagtcccagctactcgaaaggctaagactggaggatcgcttgagccaatgagttggaggctgcagtgagctataatcacgccactgcactccagcctgggctgcagggtgaggtcctgtctctggaaaaaaaaaaaaaaaaaaaaggaataggtaaaagggacagaggtgaaattttgagtgacttgagtctcttgcagtccctgattacacagaacctttctgggctacttggagcatcacgaatagtctttcctgtacttaccagatttcaagtattcataacttgactccctaagtgtacaagttgggaatagtacagggccaagttcaagtcgcatatgctgtactgttcctcctgcaaatgtggggaaagaagagggagatactagaggaactgaggctccacccattcattcagttgctctaagcaccagaggacttgtttcagaaaaggggagtgggaacgccctcgactttgccctcctccggagcatctctgggacgcagggagtctggctagcgttaataggaaaggttgctcggcagagctgccctggagtactgacttgtctctccctcctttgtcaaggtccatgtttttctggctcttcctgcacactcatccctagattatgagcgttaatgtacgaaatgtgcagagcaaattgaggccaactgtggcatcaatactgcaacttaaacttgacaatcatggtttgctggtcctcaaacaggcactgaaatctcagtatgggtatacgatttaataatcggcccctcccttctatttgtcggttttatgtttctatccttcaatagctgcactgttttctaatgtgctgtagagtttttgaaataatttatgcaagtatttggtttccatgtttacaatttatacagctttcctagcattttaaatggaaatgtcaataaatgctatgaattggtgtcaaagtgatattttctgttgatttcctttgcaacatgatagttttctcgtttgtaaaacatgaaacattggatgagatgatctttctgttctctaattttgtgtctctggtgagaacacccagtacttttgttactggtggagggtgtccaggttcttggcgtcttgaacaaagagttggacaaaacacacaaagcaaggaa

SEQ ID NO: 15952 - DNA, 1695 bp, Homo sapiens
tcatcaaagcaatccgcgaggagctcctccggctctcccagaaacagagcaccgtgcagaacttccacagctgatcggcctcgcctcgcagatttgccaagtatccgcttcctgtggaagcaagaccaaaaggaaatcaactgagtgggtgtttggaagaggaaggagcaactctcgggcagcctgcccaagggagggagcaagttgcaatttagaagatgccatacgtcgtgtgacagctcatgagcctttcactgggctggcaattgtctgaacacttgggttcagttgaaatatatgtattttggccaaaagccagcagcacttcacaaaaacaaaacacaaacctaagctaacaaaatgactgcattcgtctcttttttaaaggtagagattaaactgtatagacagcatagggatgaaaggaaccaagcgtttctgtgggattgagactggtacgtgtacgatgaacctgctgctttgttttctgagaagaggtttgaagacattttattaacagcttaatttttctcttttactccataggaacttattttaatagtaacattaacaacaagaatactaagactgtttgggaattttaaaaagctactagtgagaaaccaaatgataggttgtagagcctgatgactccaaacaaagccatcacccgcattcttcctccttcttctggtgctacagctccaagggcccttcaccttcatgtctgaaatggaactttggctttttcagtggaagaatatgttgaaggtttcattttgttctagaaaaaaaaaatccctcccaaagtggggcaaaaagctttatatttatttgattatccaaaatacagatcaaagtttagatctacattcttcattgtatttgctgtttcttaattgggcacacacaactcctggtcatgtcccagttcagcaccgatcgctaaggccgatcctgtagaatgcggctttcaagaggtcctaactgatcctttcttccactttgctgttgatttgttcacaaattatgtctgaatgagaaatcttctgtaagcagaagttatttaataattcccagcaccacgaaattgttatacatacatccctaccagtcacattccctgtgttcagagcctggaaatgaaattgagttcagttcagcctctctgtaatgaatcaagaaatgtaaaagagctttgagaccccaagggaaaggagagagttgcttctcatttctgattttattgtgctgttactctgtcgagtggctattaaaattgtcttatgctctttgggctaagaggggatcatctcgcttaagatgtactcctgatgtaaacatttcccccactttccaaataatggtaaagaaaacagtggcaagggctgttctgttttctggtacctgagtgaaactcagaagaaaagcaggcttagctaagagattttcactattaacctgtttttattagatcagcgaagacagtcatgcatcgcttaatgatggggatgcattctgagaaatgtgtcattaggctgttttgttgctgtgccaacatcctagattgtacttacacaacctacatggtatagcctactacacacctgggctgtgtggcatggcctattcctcttaggctacaaacctgtacagcatgttactgtactgaacacaatggtaagtatttgtgta

SEQ ID NO: 15953 - DNA, 1193 bp, Homo sapiens
ctgtagtcccagctactcaggaggctgaggcaggagaatggtgtgaacccgggaggcggagcttacagtgagccaagattgcgccactgcactccagcctgggcgacagagcgggtctcaaaaagaaaagaaaagaaaaatgttccttctgagagcttttaaagcctcatgttttgttgtcagggacatagccgagagacagcctggaatttgtccaggtgaaaatgagaactggaagctccttgtcccctggctgggtcatcactgctgattcctgatctaacctatctggggcaaagagggttttcttagtgtgttgagctgatgctatgcagagttgacctggtgtcttcaaggtccccactgctgttcttctccaggtagttagcagcaactagatccttaacccctgttctgtcttggtctggcctttattttacaaaaagacttttggaactgctaacacattttggcacagtgctggggtccagaagtctggtgtgtttgttattcataatgacatgaaaaggcatttggtggtttgctttcatttgcagtgctggccagaagagctgtgcaggagtacatcattacagcaatcaaagaagtactgaggattcacttcaaccgtgcagtggaactgaaggtgagtcctggtggctcaggagtgtgatgtctggtgagactggggctgatgtgagagccccaggttagaggcaggtgattatggccatggaatcattctatttcatctcttccctcttgtctgttcctggttaagtcctgctcatcctctggatctccattccaccgtcactgcatcgaggaggtctttcctgatcccacatgaggtcagggttagtcctttaggggatgtgttggcagagttggaacaaagggctctcagaccagaggcagcagtctggggtgacagccttcgtgattttacttcccttgattcacatgaaaggacttggattcgtgtttaaattagacgttagagtgagtacaggtgcatctttctggacatttggtaggatagagatggagatccaaatcttttagactgaatgatcctagaaagccacagtccatctagagcagagccatccggaaccagaaccgcgccccacgcatggcgatacagcagtgaaatggggctcgtccaaacggagatgggctgtgggtggaaa

SEQ ID NO: 15954 - DNA, 1091 bp, Homo sapiens
tagtctccattattgtcatgtttcttgatttttttcattatacttggttcttctttttgtctaggttttatatataccttaattaattctttcttggctgttttatatctatgttgctgtcagcatgggaatctctattattagaaagctattaacttttaaaatatgtatcttttggtgattttctttgttctaacagttttagatggcctgtttgctctttctaaatataaaatcataggtatttctattttgtttttgtgtttcataaaattgtaataagtttttttgatattttttcattacatatgaagttaattgttggttttaaacaaatgttctttgttaggataacagaaataacatcttctattcttgtttgttggaagctaaaagcttgataaaaggaattggtgtcttttgatacaatcaaatttttatcacttaaattgcctaatatgattataataagggtttttgtaatattaaaacatccttaaattcctgagataaaactctacctggttatagtatatgttcttttaatgtattatctttcctatttgctgtacatctatacattcataaataaaattcatttatattttatgtgtgtgtgtagtaatttcctttttatttttactggcatatggccaaactataaatctttttctaaatactgtctggagcttttgtaaattggtttgtaatgccatttttatttaaaaaataatgtattattgtatttttaattaccctgttattatttaggaatattttcccaaaattattttttgaaaatatatcattgtggaaattttggagagtacaggaatgtatgaaggaggtcatattaatcatctcataataccactgtataatcgctcttaatactgtatttttttctttctttcttttttttttcttgagacagggtttctctgtgtcacccaggatggagtgcagtggtgcaatcacagctcactgcagcctctgcagcctctgcgtcctgggctcaagtgatcatctcacttcagcctcctgagtagctgggactgcatgcatgcatgggccatcgcgcccagctaatt

SEQ ID NO: 15955 - DNA, 1162 bp, Homo sapiens
ttctatatttgttcacatcgtacataatcatgtttttgcacagatacattaatattatcatagtttgtttaactacttggctttttctaacagtttttttttttgagatggtcttgctctgttgcccaggctggagtgcagtgacgtgatctcggctcactgcagccttgacttcctgggctcaagtgatcatcccacctcagcctcctgagtagctgggactacaggtatgcaccacgaccagctaattttttgtattttttttttgtagagagggtattttgccatgttgcccaggctagtcttgaactcctgggctcaagcgatctgcctgcttcagcctcccagagtgctaggattacaggcatgagccactgcacccagcctcttaacaaattttgaatataactcctgtcttaaaatctgcagaatattgaatttttccagctattttttacttttgcttagcttatagatgctaaaggatactgtcatttgcatttttaaaaatatatgtatgagtgaatagttttctggtgtctgctttctgattgttcttattttttcattttatatttggccttttattaatggggccctcatctatgctgatgtgggacagcctttaacgaggcctcaaattttcatgaaaggacctcagcaatactgtgcttggatgatattcaatttttgtaggtccatcctcagccagtagtacagagtatataacctttgggttctctccagagacttctacctcactctgtctactcttttttttttttttggagacagagtttcactcttgttgcccaggccggagtgcaatggcgcgatctcatctcaccataacctccgcctcctgggttcaagtggttctcctgcctcagcctcccaagtagctgaggttacaggcatgagccaccacgcccagttaattatgtatttttagtagagacggggtttcaccatgttggccaggctggtctcaaactcctgacctcaggtgatctgcctgcctcggcctcccaaactgctgggattacaggtgtgagactctgtctactcttcatttcttgctgagcttttaccaaagcccagtcacaatagtttgaaggatgagcagtatatccactcctttaaattgtatccattcttcctg

SEQ ID NO: 15956 - DNA, 2225 bp, Homo sapiens
tttacctcttaaatatctctgttcccttctaagttgtttgctgtgttttcttcagagcaagaaggttatattttttaaaatttacttagtaatgcacattcaaaacacacatcaagtcttcaggataaagttcaaaaccgctgtcatggccccatgtgatctctccctcccctacccctctatcatttagtttcttctgcgcaagccactctggcttcctttcagttttgtggttcccatttttagctagttcagtggttttcaatgggcatttctgcctttttttttctaaacgacaaatagaaatacatcttctttattatcctccaaatccaattcagaggtaatatgctccacctacacacaattttagaaataaattaaaaattaaataaaactaatatgaacataaagaggaaataaaaggtacctaacttgggcacagctgtaactgaagacctaatgaagtagtcagatgcttacaactatttataatgcatcaatttgaacttagaaggtaggagatcagatcatatgtgggaaaatgtaaaagcagggatatcagtgggcattagaataaaaactagggatacaataacttctttgcatatgacaatacttatttgtatataagagaaagaacgaaataacctttattgaaataaagatactatgcaagaaaatgtacagttgtcgaagtggagaaaatgaggatatattcttgcagacgagctataggtcatacatgaatgtctagtgagacattcaaaattcgtatagggtgcagagtaatttcttattgtgaggaactgtccaatgtattgcaagatgttctgcatacttggctctcacatactaaatgctagtagcgcccccacccccacgcccagtcacggtgacaaccacaaaccctatcagatctattcacctttttcagagcagatattttgtaacattctctttgctgacctgaaatgactcatagataatacaatctacttacacacatgaatttcttaaaaaaatcaatttaatgccctaactctcttattaaggagaaatagaaaagaagaaatttataatgaaaagaagatgaatttcattatgtaaacgctcaggcatgactacgctgtttgaaacagacagatgtttactcttccttgtaatgagtaggtttggatttaagagccgattagaggctacttcctgtaaacaagtacaggaaaatgaaactagacgggtgggggacactagaatgaaaaccagtgttagggtaaagacaaaacagactatgtacataatctgtatatgggaaaagaaagagcgaaattaccttacttaaggataataggacaagacaaattacagattgtctcagagaaaacaaatgagttactctctcggacaagctgtaggtcctacctaaatgtccagcaggacattagacagtcgtacagggtacagaataattcttcgttgtgtggcactaacccacacactgcaggacatcgttctccctggctgcatccactcagtgctgggagtagtccccagttattatgaaaccaccaataacccactgaccacagtgagaaccactgattttttccactgacctactgaatatctagcatccttagattggctcaactgttactttcctaaggagtccttctacagaataggtcagatcttggcctcccaaaccccttatttttaaaatactttgcgccttgctttgataatttgtattatgtatccaaactgaaattatctgctttctgcattagaatgtaagccccctgagggttgagtcagtctgtcttgtttgctgtgccacgcctgatgcccagcccagcagcatgctttgtacactgatatattgggtaaattttgttgaataaattaagctcaactatttgtatttcaatagttgagttgtattgcttcctgttcttcaagcttaatttgaactgtctaataaaaagaagtaattaatttggttctactgcctttatttgatctatttctaggtatctcccaaaacatcatcaactgcagacaccagttattcaatgggagagagatgatgtgttttgccccttccagctttatcattccagggttcgatgaccaagtcacctgggcaaggcacagtggtggtgatggcccccacatcttttgtctggggatttagagagggaagggttgaaagctgctaacac

SEQ ID NO: 15957 - DNA, 1143 bp, Homo sapiens
ttgcgtctgcttcagcgtctgctgagaggtcctgcacacctagtccagatcagatcagccacagggcttccctggaggacgcgcctgtggacgatctcacccgcaagttcacgtatctggggagtcaggatcgcgctcggcctccctcaggctcgtccaaggctactgatcttggaggaacaagtcaggccgggacaagccagaggtttttagagaacggcagtcaagaggacctcttgcatggaaatccaggcagcacttaccttgcttccaattcaacatcagcccccaactggaagagcctcacatcctggacgaatgaccaaggcgccaggagaaagactgtgttttctcccacgctacctgccgcccgctcttctcttggctctctgcaaacacctgaagctgtgaccaccagaaagggcacaggcttgctttcctcagactacaggatcatcaatggcaaaagtggaactcaggacatccagcctggccctctttttaataataatgctgatggagtggccacagatataacttctaccagatccttaaattacaaaagcactagcagcggtcacagagaaatatcatcacctaggattcaggatgctggacctgcttcccgagatgtccaggccactggcagaatcgcagatgatgctgacccaagagtagcacttgttaacggtaaatacaaagggaagacactttgggctagtacatttgttcatgatataccaaatggctctagtcaagtagtggataaaactactgatgtagaaaaaactggtgccactggttttggcttaacaatggcagtcaaggcagaaaaagatatgttacgtactggaagtcagagtctgaggaacctggtccccaccacacctggggaatccactgcccctgcacaagtcagcactctgcctcagtcacctgctgccctttcctcaagcaacagagctgcagtctggggggcccaagggcagaactgcacccaggttcctgtttcctctgccagcgagctcacaaggaagacaacaggctctgctcagtgtaagtcactgaaggacaaaggggcctctgtgtcttgagtctgcagcagagtggctatggctggtggtttttccttggatgttcccc

SEQ ID NO: 15958 - DNA, 1164 bp, Homo sapiens
ctcgctagggtctgctctttccgggaatgggtggggtgcgcactcctcaacagggctctcaggacttgcgtcacacgcctcagtcggctggcttataaaacaccggccagagccccaagatcgcttttagtttctcttctttctaaagaaggctcgcggagcccggctggagaacctcaccctcgccgagcctagaaccgagagggggccaccccaggcggtcaccagcagatttgcccgcgcgttctctttctttccacccagttgcccttgcggccggctgtaaacctgccactaggacccggtcggtgagatctagcctcttgacctgagagccgagagtggatcgctgggctgggctaacggcgacggagagcgcgccctcgctgactccgggcgcgcccagcagtagcaccgcccgcgcccgcccctggacacttgtaagtttcgatttccgatttccgcggaaccgagtcccgcgccgcggcagagccagcacagccagcgcgccatggcggacccggaggtgtgctgcttcatcaccaaaatcctgtgcgcccacgggggccgcatggccctggacgcgctgctccaggagatcgcgctgtctgagccgcagctctgtgaggtgctgcaggtggccgggcccgaccgctttgtggtgttggagaccggcggcgaggccgggatcacccgatcggtggtggccaccactcgagcccgggtctgccgtcgcaagtactgccagagaccctgcgataacctgcatctctgcaaactcaacttgctgggccggtgcaactattcgcagtccgagcggtgagtgcacccggagggaggggcgctgtccgcagccgtggtcggggtggactgtccaggcgggcaatgttctgggaggggcacggcttcgccgggaccccgcacctgacagcctccgcctccagccactcccttctctgctcccctctgggagcctctgcagggcccgcgcttctacctttgcagttcccttccttccggcacctccagacattttctcgagaatggctaaaatgctagtgcctggaggagaccaggctcaacctccacccctttccccgcccgcccgcacgaatcagaagaataaagtgctctggagccagccagggcctagagaagcggtag

SEQ ID NO: 15959 - DNA, 1120 bp, Homo sapiens
agaaaatggcaggagtggaagcagccaagaagagatcgatgactgaagatctccttcaccttcaggactgtctcaaggggttatttcacctctactcatgaggatggccagtttttctgtcttttatctttagacccatatataatcagttcagagcacaaatcaaaataaactggcctaaataactgaattctaggaagcaaagctacatcttttttcatatgccaaagcttctgtttcctcatgttgttcctactttttaaataataaatggctctcagcatcttaggaactagatgggtcccatctgggtagaacctgctataatttttagaatcactcttgtaattcttacctcacttaaaatattaggaaacacagtaatagaaaagacagggagaactcgtctgcaggttttggcagtgaaatttgtcttccagtgaattgctattattttcaaattgcctatagtcaaaaagcttttccattgatggagacttactttcaaatgagcttgtgttgaattcagcactctagattctctctgacattttcctgtcttttgggaaaaaaaagcagatattccaaaaatggcagaaatctaatttttgtaaactttttcatctataggattgagccaaaaaacatacatactattttaaagaaaggtaccatctaattcttttattaaagatagctacttctgaaatgtcttaacagagtttcaagattgcaaagtagtattgcatagctggttttcttacatgtgatgatggaggagagaggaagacccagacttaggcatgtagtgaaatatgtacagtttctggcatcagtgtactatttatagtctatagcatacattacttgcaaatgggaaaagtattttataattatttttgtacctcaaaataattattatattctactgtattatattcaaattaaagtttattatttgattcttagtatgatattctgttgagtgtgatgagggtgggacctaagtatgtcatgtgccttctaccctttctttcctagccctagaatgaaaggagagaaagttttgggccccataagttactctttagaagagagaaaagtacatattccccaagaa

SEQ ID NO: 15960 - DNA, 1166 bp, Homo sapiens
ttacctatttgcctttcgtgggtgacattccagattatactgaagaaggtgctattgtaatagtataagttaataagaaattaagaaaactgctctgtcacctgtcaaattattattttaattctgtgcctgcttatttatgtgacactttaacgtttaaaatcacacatagcctaactgatcatttttgtcttcacagagttgtggctctaaattcacacaagtctgaaaaaaagaagaaacgttataaagattctctttctctagctgccatgattagaaaattccagaaagagaaggatgcattaaagaaggagtctaaccccaaagtcccagtgaccttgtcaaccccttctctgaataaacccccatgtgctgctgcagcactggggaatgacgtcccggacttaaatctgagcagcggtgatccagaccttcccatttttgttagcacaaatgaacatgagctgtttcaggaagctgaaaatgccctagagatgctagatgattttgacttcgacagattactggatgctgcttctgatggtagccccctatctgagtcggggggtgaaaatggaaccaccacccagccaacctacacttctcaggttatgcccaaagtggtacctacactcccagagggtctacctgtacttcttgaaaaacgtatcgaagaccttcgtgtagtaagtgtaataattctcttgctttttatttgctgcacaaacataagaattaatgcttttgttcgtttgtttttattttccacataacactggtataattgcttttgttttttaaagataaaaataataaactacaatctgaacatttttataactttttatttgccatgtttccttttagacctttcttttttctttctttctttcttttttttttttttttagtagagacggggtttcaccgtgttagccaggatggtctcaatctcctgaccttgtgatccgcctgccttggcctcccaaagtgctgggattacaggcgtgagccaccgcacctggtgttttattttatttatttatttatttatttattttgagacaaagccttgctccgtcgtcacacaggctggagtgcagtggcgtgctctgctcactgcaacttctgcctattaggttcaagagattctcttgcctcag

SEQ ID NO: 15961 - DNA, 1276 bp, Homo sapiens
tatatgaatgttccttccacttggtgttaagtatgacagctatgtgcaatatatcagatactttgtcttgtgaggacagctcagtcaggagctctgtcatctcaaaaattatttttgttttgatagtctctgaagatttccagtagaaaaacaattgtaattgtcatgagaatcttttagttatttaaaattaactttgtaattttttattcaccatttctatttttttccatatgatgctttacattaggagtgtagtccaaaaaaggaccagaaaactccaacatccctggtggcttcggttagcggtcctccaacgagctccagcacagctgccattgctgcagctagctctagctctgcaccagcccaagaaaccatctgcctcgacgactcactagatgaagacctttctttccattcaccttcactggatcttgtttctgaagctttagcggttatcaacaatgggaacaagggccctccagttggctcaaggataagcatgccaaccacaaagcctcgtccaggactgagagaagaaaaattagcaagtatcatgagtaagctgccactagctactcccaaaaaactagattctactcagactacacattcttcaagtcttattgctggtcacacagggccagtaccaaagaaaccccaggatttagctcatactggcatctcttcaggccttattgctggttcttccattcagaaccctaaagtttctttagaacctttgccagccaggctacttcaacaaggacttcagaggtcaagccagattcacacttcttcctcttcacagacccatgtctcctcttcttcccaagcccaaattgctgcctcttctcatgctctgggaacatccgaggcccaagatgcttcttcgttaacacaagtaacaaaggtgcaccagcattcagctgtccagcagaactatgtgtctccattacaggccaccatcagtaaatcccagaccaaccccgtcgtgaagttaagtaataatccccaactctcctgttcctcctcacttattaagacttcagataagccacttatgtaccgccttcccttatctaccccctcacctggaaatggttctcaagggtcccaccccctggtttctaggacagtacctagcaccactacctccagtaactatttagccaaggctatggtgtcacagatctccacgcagggtttcaaatctcccttctcgatggctgcctccccaaaacttgccgcatctcccaagcctgccacatct

SEQ ID NO: 15962 - DNA, 1102 bp, Homo sapiens
tatgcttttgaggtcagagggtaaatgaaatcgtgattttaaaacagcctgaagaaaaaggttttgggaaaggaaatgaggctaatctgtagtcataaaattctgatactttgcggaaattagaagatggtgatagtgcattcttttgtgcccaccccccctctgatggatgttgttagcccaaattacatttttcatatcatggacattgaatagggtttattgaatcaggaaggtaaggggaagaaccgggcacatatgtgttggaatactgtgggtttgacacctggttgaaaacaacttattggacatgatttttaacccaggatatttttttcccaaagcagatctaaattgtttactacccagggttggaaagggcaggcacctctaatctagtctttgtcctctggttgccctctcccacacccctttccacctatacttggttcaagacattttctgaaacgaaaattctgctgttgttcaaactgccattggttatgagaactctgcgtcctttgggatcatctcttagaactccagtgatctatcatatttgctgctacatttgtaaaatgaactttgcctgtattggttgactttaatttacagttctttatttctaggatgttttgtcctctagtttgactcatgtatagaattaggatactttattttaggagtgtaccgtaaaagcacactggtccctttgttgtttttattatttaggtttggaatttgtttgctttttttttgtttgttttttgttttgtttctgtttttgtttttttttaaagttggaaatagaagaatgagaaaaatctataatcaggccaaacttgagaactttcctgtgcttcagcactgtaattctgctgacctaatgttctcaaaagaggcacttttactttctattgtgcatgtatgattgttgttttttgcttttgagggggcttttgtgtttgtaataatgaagcagaagaaaagtgcagtagtagataaatgatcacaacatgttatgcaattttattttataaaattttaaggggaaaagtttaactctttgtaaatcatttcttagctctggtaaaatgcttat

SEQ ID NO: 15963 - DNA, 2439 bp, Homo sapiens
atattaaattttatttttctcatagactctcaaagtaccacttgcttgaaagtagctacttgtgatctttaatttccttatattgtgatagttctacttttcagtctttcctgtgtatctccatttcatagtgcgttagtacttaaacttcggacacttttccaaactgttaaacaagtcaggaatgcttttcagaatcgcagtagtattattagggtctctgtgtctaggacttacagtcatcagtggtcatcactgggactagaggtgttcttttttttcctcttctcctttgtattaaaaaatagattttgctactgtataatgcggcatttcatgacttcctcttgttacttttcaaggttattctaaagagatggagatcttcattagaggctatttctcataatagtctgccttgcttattttcatactccccctgaaataagcctacttttgcaaacaggccatatgaatcaaattttatgtttgttcctcacaaaattttctacacattatttgttcccactttgctaataataatataatgattttattgtaaatctgtgttttaaatattttataacagagcactaatggaaacctaataaatacaaacaagataactattacccaagataacatggaaatacttctgtttttgaagttaacaacaccgtctgccctcaaagcacatttaggagtatcaaccaagaccagccagttgacatgtttttctgtgtggcaacctgcccttaaattgtcagatcttaactatcttgtgtttgctgtgcttgcagccataagctttcctccttttttgcttatccctgctgtttgtagggttagtgtgccctctgtcagaaaattgggttttctttactatacctgcaaaattaccaagggttaccccaatattgtctagaggaattaaaaagaacttattctcagttgacaaaagtattactgttatacatagttaattggaaagttggccaactttggtcacctatttttgagtcttggctatgcctttgtaattagttacatataccttctgagaccttcagataatcaatgggcctttccccattagaggtaggttcccagcctacaagtatttcctgtgatccatggcaagcctccagagaaaagattcaagctttgcactgcccttttgttgattgtcattgaaaacttactttatttcagaaagtatcaaaaataccaaattggtctttcagagagtatgtaaatctggggcttgcccttggatttcacttgttaaacaccctcaaacttaaaagaagaaaatagatctccagctggtgaaaattttgtgccccaaataatatattaatccaagtctaccaaggtaactaagtaatggatgttttctctcttttattacaagcaagaaagttcatttgcagttgtaaaaatgattaccgaactccagacctatttgctataactgattggaaataatgattctgatttttagtctgggtaaacacatacttcggtgtgaattttgataagggaaagacttgtttggtagcccaaggaaaaacaggatgtatttatacagtgaatgttcactctgcagaggaacttccctccagttacatcttcctcatacattagccacctccacacttgacatagatgccaacatgtttcaaaaccaatcttgaaggagcctaaagagttgatggtcctctaggtgaaagacaagaattactgtattgcatttgcttatagggaggtgtgtttttgctaacttgaagggatatactgtatttcaaataagtgtgtgacttaatattttgggatttttttttcctcctttaaaaactggacctgaacacaagctttgagttgatgtttgtaataatctcaggacctgaaagattgtagcatttagtgtgtcttaaaaattatgtactgtaccagccatggatttttgtaaatatacctgtctcccttttttgtattttagtaaaaaaaaaaaaaaataaatttaaataaaagggggtggtgatgacatgtgaatgggtgcgggtatgtgtgcgtgtgtgtttgtataaggctcttttgagatgaactggtgcttgtttaatttccagctcaaatcggagcaggaatatggacaaactgctgctactgaaccctgcactgagccgaggtatttccatttggttaactaaacgctagctaccaggaaatgacgcagaagtcacgttcttcttcccactgccatcttgcctttgcattctcagttctacgtgccctttgaactttaatggtaaaacatttcacactttggatggtttgcttgtctctagtttttagaaagctcttatcactccttcctaagaaaaaagaagggcaggtaaatttttttaaccaaaaaaaaatcacacatttcataaaacc

SEQ ID NO: 15964 - DNA, 1129 bp, Homo sapiens
gtctgagccgcaggtcccctgggatttggggagacgtcaatacgttgaattttgatatcccttttataaatcatttaaaaatgtcttctcagcgtgttccatatcaaatccacacccacaccccccgccgggcccgcttctcctgagactcagcggttggtcggctaacgggcatcttcaatgacgcagtgaagaaaagcccctgtttccccaaacccttgttctgggttagaggtcctggtaccttcagttaacagtcgggtttcgtttgattttgttacggcgcccctgggccttcgattaataaggttcggtcaacggacaagtgagcggttccactgctcgtcagtcgatagggggagtcggtagtctgtccgaccgtaccattaggcgcctgggccggaggaggggttttcagggtcgtaggacgccgttgggcaccacgctcggagaaggacaggacaatggcggccttagggtccccgtcgcacacttttcgaggacttctgcgggagttgcgctacctgagcgcggccaccggccgaccctatcgcgacaccgcggcctatcggtaccttgtgaaggctttccgtgcacatcgggtacgggagccatgtcccgggtgctctacgtgctggggagggaggaagagccgggtctgggctagggtggggagcacggtgtttaattcctgcatttctgaggccaaccctcccacggagccctggttctgaccaaaccaacccaggccctaggctccatgctctggcataaactcggggaccaaaggaccagcgggggggggcgcagagtcgctctggggacgtcagcctgtcctgcagaggggcggacccgtcccgaaggatttcattggctggtctgttgcctctgcggagggcagtcaggaaagtggaatggaggattcaatgctggggataaaacaatgaagatggagttgaagggtgtactgttgctagacttaaagccacagcatctggccaacaatttcctcacccgtcccctagaaaagttattctaagaagcatttctttttgaggcggaaaagaacaactgggctttagggaaggaaacttgctgcccttgagcaatgtggggaaagggagaacga

SEQ ID NO: 15965 - DNA, 1129 bp, Homo sapiens; identical to SEQ ID NO: 15964

SEQ ID NO: 15966 - DNA, 1091 bp, Homo sapiens
actttttaaagaaataattttttaaaaccccacttggctcaaagacattgtccagagctccagctttggacttttacctgtagtcagtcatacaattatctggggttatacttgttaagtcagtatttaaaaaaatgaaacaccctgattttgttcacttttgtttttatataaaagaatctttacagtcaacatgtacttctagatgctgtattgaaattgctggcagagtttattctatacaaaatgaacaatctggccccttgttttatttgtaaaggttcaatgtatctatgcctgcctacctcaatctgcaagggagtgtcagaaaggccccgcattcgccaagccgtgagttatcgctaacttttcagatgtgttaatgaatgtggaacaaaagcagttgtgtttaaaaggaaaaaggaccatcaaaataacttttattatagtagcaggcgtaaacactaaactgaatattccaaattgtgtcaaaaataacctactagagacgagcttctagaaaacctattgttgaactgctctgaagctatcattttaactataaattactgttgttaaaattttatataccctggttgcaaattagaatgttttaaaaatatctttaaccacgttaaaacaatttgaacaaaatcttaccccatctaaaaatgatagtgtttagttgaatttaagttaagctctttagtatatgaccatatgaaggggtaaagttttaatcttttttgttatttacatgtgaaaatacagaaactaagtgattgaatcacatcctacacgaaagtttttggagtgctccaggcatatcatgtgaaatacagaggtatttatatctcttttggcaccaatagttcttgcttcagtaattcaccagtaggttttcattcatcgataatatatcagtttaaggctaaaataaaacacctacatttcttagggcttatcattctatatagaaagaggaaacatcctaatgagttttttcttttgtttttccaaagagattctaagcaaaaaaattttaactaacatctatattttgttattggagctagttacctttctttttc

SEQ ID NO: 15967 - DNA, 9703 bp, Homo sapiens
ccagtctggtttttgaggactccatctttatttgaaaaataggatgttcttcaaagcacattgacatctcaacaatttgatgtatatattcttttagtttggtttaaaattaacttgatcttttttgtgttgtggagctaaatgaactatgttgtgatatagaagctagcttttttcagattctgaaaagcttttccatatccatttattcttaaatacaagtgatccctgttcccatctgttggtagacaaaattggtgccatttttttcttctgacaccacgttttatatttgtctatgaaattttgtaatttggaagcccctacataaaaaagcatctgtatgacttaatatgtattctgacaagaactgtggttgttgaagcattttttaaaaaacttttttttgttttaatattatgtcttttttcccttccagagaatggatcttggagaatgtctgaaagtccatgacctggctttaagagcggattatgaaattgcatccaaagaacaagattttttctttgaacttgatgtatgtgattttgctttaatggtttgttgttatcttttgctgtaaaacattgtgaatgtggattaagatctcttaataggaaaaactcttagcagtttatcctctggttatatgaagggtaagactcaagtaagatcatgtactttcttgacaactcttttaaaaatatgaggtgagactgtattttaagaaaatgtgtaacagtcgtatgattcatatattcttttggaaattaagcatattcttcccaacaaaatagtaatgattaaggaaatatcaagcaaatgtaagcaactaatttatagtgtatataaggacctatctttagtaatatactgagtttttacattcatatttatttttgaatctacttatatatatatatacatgtatatatagttggccccccatatctgtcgttgaatctgtagaaggaaccaactgggattgtaaatatttagcagaagaaatggattgttgcatccgtactgaacatgtacagacattttgttcttgttattattccccaaacattacagtataactgtttacatagcatttacattgtattaggtattataagtaatctggagacattttaaagtatatgggaggatgtgtactgggagattatatgcaagtattacaccattttatattaaacgtgcattcatggattttggtatccgctgggtctcctggaaccaatctcccacagatactgagggacatgcatatgggtgtttgggggattttttttttttttttttttttttttttttttttttttgagacagagtctcgctctgtagcccagactggagtgcagtggcccaatctcggctcactgcaacctctgcctcccgggttcatgctgttctgctgtctcagcctaccgagtagccgggactacaggcgcctgccaccacacccagctaattttttgtgtttttagtagagacagggtttcaccgtgttagctaggatggtcttgatctcctgaccgcgtgatccgcccgcctcagcctcccaaagtgttgggattacaggcgtgagccacggcacccggccgtttgggggatattaaggacagtgtttttaatgaaaaaccaagaaatggaagacaccatttagatacctaaaaaagcctgaaatgtaactttatattgctgtttttatatgaaaatcgtttgcataaaaataaagtttttttgcatatatataatcagcattacataaaacatactaatgtgcataaatctttgatacattttataagtgaaataatagatgttttaaatttggttttaggagataaaccaacaaacaggtcctcttgtcttctgaatatccaagaatttctgctaatggaaatgaaattgttttcagaaatataatttacaacacattttccctacttttttggtggtttttggccttgcgggggtatttttatatttatatcttctgatttatcagtctttaacaaatctatagccaggcgtggtggctcgtaatcccagcactgtaatcccagcactttgggaggctgtaatcccagcactttgggaggccgaggcaggggtggatcacctaaggtcagtagttcaagaccagcctggccaacatggtgaaaccccatctctactaaaaatacaaaaattagccgggcatggtggtgggtgcctgtaatcccagctactcaggaggctgaggcaggagaatcacttgaacccgggagtcaggttgcagtgagcctagatcatgccactgtgctccagcttgggggacagagcgagactctgtctcaaaacacaaacagagaaaccaaatctatttcattagttctaaacgcttttctttttctgaggtgctaagagttctctcctgtggtttcttctggcatattttggcttcattttatagacttttaagtcctcgattcatctcagatttattctggtttaaggaactgagatatggatctagtctccccccaaccccacatagctacttagtcacccaacactatttgctgattagtccatcttttctctcactgctttgagatgccatctttatctttacataaggaaatttgaatagatttctgttgtgatttaaaaattttcaaattaaaagaaattaactatttttatgttatcacagataaaagctgtttaagaaatgatccttattgcttttcacattgaagaaattcttgggttatccaactatttttggaattcaatgtgtgctgaataaatttgtatttttagttcaaacatttgtatcttgaattagttatatttctgtacagtaagatttggaagtccaaacttgagaatgaattcttaaagtttacttttaaatgaactattaattgtagacattaatatgtgcctcacaaatgtcttatataaatattgaatttttatagtgtagatactgctaaaattctcaatggtttattctctgaaaaaagataagttttcctgatgtgcgagactcttgtctcaaaaaaaaaaattctaaagcagtttggagaattaaaagaaaaaagggtaaaaatgttcggaaatacttactgttagcattttgtatagttttccattttttctgtattttctttttgtccattcagatctagacttgcagcagatttttctgtctttattttacaaaattgggatcttactgcataacatttgtaatttgctttttatttacaaatgaatcctgaacatttcttcatgtcctcaagtgattttttttgagacagtctcattctgtcacccaggctagaatgcagtggtgcgatcttggctcactgcaacctcagcctcccaggtgcaagtgattctcctgcctcagcctcccgagtagctgggattacaggcgcgcactaccatgcctggctaatttttgtatttttagtagagacgaggtttcaccatgttggccagcgtagtctcaaactcctaacttcaggtgatctacctgcttcggcctcccaaagtgctggaattataggcgtgacccaccacgcccagcttcttttttttttttttttaatgacagggtctcgctgtgtcacccagactggagtgcagtggcatcatcagggctcactgcagcctcagcctctttgggcccaagtgttccttccgcctcagcctcccgagaagctgagactacaggtgtgccccacccacctggctaaatttggattttaagtagaggcagagtttcgccaagttggccaggctggcctcaagtgatctgtctgccttagcctcctaaagtgctcaattactgacgtgagccaccgtgccccaccatggtagcattttaaaaagcaaagtgtgatttttgtatgaagatatttctgaataaaattgactttctgacagtaattgtctttaattaaactttgtaggccatggatcatctgcagtcattcattgcagattgtgatcgtagaacagaagtggccaagaaaagattagcagaaactcaagaagagattagtgctgaagtagcagcaaaggtaagaattttaatcatttcattagtacaaagtattatttcgactccttttgtttaagtttttattttgaaataattagatttgcaagagattgcaaagacatatacaaggaattctgtatactttcttgtctgccccagtgtaaacatcttatacaatatagtgcaatatcaaataaattgacattggtctaatccttatattttattcagattttgccagttatgcatgcatttatttgtgtatgcatgtctgtatgtatagctctgtgcagtttttttgtttttctttttgtttgagacagagttttgctgtgttgcccaggctggaatgcagtggtgtaatcttggcttgctgcaatctctgccttctgggctcaagtctcgtgcctcagccttctgagtaactgggattacaggtgtgcgtcaccaggcccagctaattttttttatttttagcagagacagggttttgccatgttggccaggctggtctcaaacttctggcctcaagcgatctacccaccttggcctcccaaagtgctgggattacaggtgtgagccaccacgcctggccagctctctgcagtttaatcacatgtgtaattacagccacagttaggatgcttaagtataacattgccacaagactccctcatgttaccccttttatagctacatccatctttacccccacccagcatctctacccttggcaaccactaacctattctctatctctgtagttatgttatttcatggagtgttacataaatgaaatcctgtgtacgcttttgagatttggcctttttcattccatataactttcttgagattcattcaagttgtgtgtatcagttcattcctttttatttctccattgtacagatataccacagtatttttatttgcttttaaaagcaaatgttaaatgtcaatatttcacctgtaagttataaccacagtaatacatacataaagttaacagtaattttttaatgttatccagtgtatgtttatttttcttatagagtcgatttattagaatccaaacaaggtcttttatattgcatttgttgatgacttattacaacataattatattccattcagtatgatcaagtgtgttttatgaaaatgcagaatgggagaaaaagagttacccaggtggagtttagatgacagtattaaaatatggtgttcagatatgtatatacaaatgaaaatagattccatcgtttgagaaaagggttgcttttagtcaaccttttctgaaaattctctgaagatggggactggaaagacgggcatcctgaagtacaaaggatctagtatctcatggttggaagagatctgtaagtgcttggtagagcctgagttgtattggttgtattggttatccatcactacacaaatgctgtataacaaaccacctcaaagctcagtgacttaaaacactatttatttagcccatgactctgcagtcagtgatttaggctgaacttgactgagcagttattcttgtttcagctgggcttactcacatgccttgcagtccactagaggatgcagagccatgcccagcaggctagcctggccgtgttctcatagtggtggtagaggtgcagaagcatcaagccccatcacacaggcctctcctttggtcatgtttgctaccatctcagtaaccaaagcaagttcatggccaaattcagagtcagagtacgatggtacacaattacatggtcaaggacatggatacagggaagaaagaagagttttggacaacagtttagtcattcaatgatacatttaaaggaaaataccatttggtagagagggaggatagtgataatagaattggactctcattgagggaagaaatattttgggttgaaggatatttgagaagtaaagactattaattaaaccagtaaactggtttgttgggactggaaactcataccaaactaaaaccttcggccgggcgtggtggctcacacctgtaatcccagcactttgtgaggccaaggtgggtggaccacttaaggtcaggagtttgagaccagcctggccaccatggtgaaaccctgtttctacaaaaactgcaaaattagccaggcatggtggtgcacgcctgtaatctcagctacgtgggaggctgagacaggagaattgcttgaacccaggaggcagaggttgtagtgaactgaaatcatggcactgcactccagcctgggcgacagagcaagactccatctcaaaaacaacaataacaacaaaaaattaaaaccttctttgctaacatattataattggccatacagcaaagactttgtggcccaaataatgattatatgtatgttttatgtgccattacaacagtaggaatgaactaagttgctaggatgatgatggtgatgaggaagaggaacgtattctttcccaaggccagagttaatcctggtggaaagctaaggactcatagagtggagttgccaggcgagtatgctgaaaatcagcaaggtgctatgcagggtacatacgaggcttattttctcatttctcacaactttgtgggataggtacttcttagatgaggaaatgaattcaggtataagtaatgtggccaaaattacacagatagtaattggtttagcaataagtcagatctgatggattcctgaacttgatccaccaattcatttctttaactcatatttgagcctaggctatttgctgagcactagagatacaaagatgggaaatacagatagctgtccttaaagtagtatgatatttatgaaaggaactgtcaaaaaagatacaaaggtgacacaaaggagagagtatggccatctttgctgatgtgtttaagtggggctgggatgtggtgactgttcaggaatgttttacagaaatggcccttgagttgtatcttgttggaacgagtgaatattcagtaggcaggcgagaggtaagggatcccatcccagaaagaagagtatatgcaaagtaacagaggtagaaaacaacagggtaagtttggggaaactataaattatgttgtgaggtgggggagtagcaagagatggtttagaaaagtacaaagggccagatcatggaagaaatcgtattttacactaggaatacaccacctcgccagaggatagaaagttatattgggcccagtagtagccctgacttcattgaggtaaggcaggcaggctcagaacatcctgatgtctcagtagttcatttgggatacgctcagaaagcattctttaaccacatactgccttagataacaagttttttctcagcagttctgaaatactttgaaatttaaaattcattctcttgtttattcatgatcttcttttttatttctttttaggcagaacgtgttcatgagttaaatgaagaaattggtaaattgttagccaaggtggaacaactaggagctgaagggaatgtggaggaatcccagaaagtaatggatgaagtagagaaagcacgggcaaagaaaagagaagcagaggtaaattcttaatagtagtagacgaattctgcttaatttggtaagactacaaataaaaagtagtagatgaaacttcagtatctatacttctctaagaacatgtatttgaatggaaattattgaacagttgttaaagagaagttgaactaaaagacaaaaacaaaacaaaactcggaaaaagctggttgtggtggtgcgtgcctttggtcccagctattttgcaggctaaggtggatcgcttgagtccagttcaagtccagccttcttctttttgtttttttgagatggagttttgctcttcttgctcaggcaggagtgcaatggcatgatctcagctcaccgcaacctctgcctcccgggttcaagcgattctcctgcctcagcctcccaagtagctgggattacaggcccatgccaccacacctggctaatatttatatttttagtagagacagggtttctccatgttggtcaggctggtcttgaacacccaacctcaggtgatccacctgcctcggcctcccaaagtgctaggattacaggcatgaaccactgcaccagggccttttttttttttttttttaagacagagtcttactctctctccaaggctggagtgtagtggtgcgatctcagctcactgaaacctctgcttcctgggttcaggcgattctcttgcctcagcctgctgagtagctgggactacaggtgtgcaccaccatgcccggctaattttttgtatttttagtagagataggctttcaccatgttggccaggctggtcttgaactcctgacctggggtgatctgtccacctcagcctcccaaagtgctgggattacaggcgtgagccacccggcctggcctgtttttttgttgttgttgttttttaaaatacttttggtaaatttgtctttcagaaaatctctctaagttgtatttattgatataaagttgttcatagtgttctcttttaatatctgtagaatgtttgcaattcgtgtcttttcttaattaatctagctggtcagttttattttgtttttcaaagaaccagtcttctgattttattgtttttttcttgttttctatttcattgatttctgttcatgtttattatttccttatactccagtggagagaggcgctaaggatagaggatggggataaagggaacctataattttcataacaaaatagccatgcttttgtggtttttttttttttttttttttgagctggagtctcgccccagtgagccaccgtgcccagccacttttgtgtattttttagaaaacacttttggtataagcatagtatattttatttaattgtatgacttttagtgagatttatatggtcattgtttttctcacttttgtttaggaagtttatcggaattctatgccagcttccagttttcagcagcagaaacttcgagtctgtgaagtctgctctgcctatttaggacttcatgataatgacagacgactggctgatcattttgggggtaaactgcacctgggatttattgaaataagagagaagcttgaagaattaaaggtacattggtaaaatattcctcactttatcctcttgttcttttgatctgtatcagttgcctttttgtacaatattcttgactatgattcagtaatatagtatctaatgattaatactaaacagtgtaggattatagatggaaattcaagttggtttaatggatgctgcctgagaaacagacttaatattatcctgttattttgggagttaccattttatattagatatgacaccgagttagggatctttcaaactagttactaaaagagtcccataaaacttcattgttattgttcttttcaataaggtcaataagaatgtaataatataatatttataagaagtttgagaaaatgaacccaatattaatttgaaatattttgcaattctttattaaatagcaagcttgcagaatctctagttttattttatgctcctgcttccacttcagaaaggacttatgaaaaaatttatatttttttaaaaggacaatcactattacttaaataata

SEQ ID NO: 15968 - DNA, 1136 bp, Homo sapiens
gccactccgcacacatggggctgaggcgtggcgccgggcccttgtcatccacctcaccacggcagagccagcaggccctgtagggtgctgctgctgtctcactgggtcccagcttcaagcgcatcagtgggtgacgggggcaacaaatcagagtgactggaagtttccatcccgttttgctttgaccacgtgtactgagctgcagcctctgatactctgtcacgtttccaaaaatggtatccattaggatagaaagagaatggatctgcagaaatgtttacctttcaactgctcatgaattcaggacactggatagaaagactcactccccaaaatgagaacagggaagaggagacccggcgacactaagtcaccaggtccaaggaacgtggctccctccccagggtcatctcacctagatctttctctcccaggtcatctcagctcaatctcaataaccctatgaaagccctggtctgttgtgttccttcaccgtacggtttctgtaataaaaagtgttaatccatgttaatctgtgtgaaaattattgcgtgcaacagtattttctcgtgtacctctttttcctatgtgaattgtccctcttttttatttataaatgtctacttttgtttttttaaagacaaaccaatgtgttgtagacctatatgtaacctattccttagtctcatattataggtatgttataagaatggatattttacttggctttagaatgttttacaagaaaactaattcttaactgatcaagtccttgctactaaaatgcttgtgtttttcatcatgacgtcgtgtgcttctaaattaatcattttcgttgtagaaaaatggagtgaatttatattagtcttggaaactaataatagcattgtaaatttatgagatgattttaacagaaaaaatatagaagaatatagttattttaattgtaatattactaactgtagggtgagaaaaaggggggggggtcccattgtggtgaactatgttatagcttgttactcatagtttctttttgatcattttttcggtctccgaggtgaaatgacttattaattaaaatttgtaaactcacatatgcatattgtatatgtgtagaaatgtaatcacactttgtc

SEQ ID NO: 15969 - DNA, 1211 bp, Homo sapiens
tagccagcttgatcttggaatttaaagactatgaattctctgtgggctgaaaataatgattacttcatacccccggtcatcgttgcttaagtgaattctgaaaatagctcatctttacaacaaaaattaaaccaaggaagagattattctttgtgtgttgtactcaaatgcgatgttcaaatgcacatgttaagtatatatgtttttagctactgtaaaatgctgttagccttctaagctatcaaaacagtcacattttaaatgagtaaactaaacaattgactgtggatacttaagcatatttctggctacgttttatagttaaagtgttttatagtttacatttagactggtactttttaaagaaaagttctgtttataactgacatccgcaaaccccagtgaatgcctcttagttggaggttgtgtctcccccaaggcaagtgtgttgtcccagactcttctgtagtccagcatgcgcacttccctctggattattactttccacgtgaactcaagagaacatgaaaggcaatccagatggagggaaaaggtgtgagtccgcagcccgggccagatgcgaaggtctcatgcgtgtcgtctaaacacttgtcttcaaggccttctctctgacatcttggaagagtcattgagaacagataacctggttcattgatttttgtcttgatttgaatatttaacttattaatagatccactgatttccaggcaccaggcagtagaagagactgggattcaggtgaccatgaaggcacagctgctacttctgggccgggggtgatattttgatcagcgttttgtaggggaggaccatatacccctattcccatggtcgctggctgggttttccatatatctgctgtcatttattcgttttccccttaaaagcaaaatcaatgtaaaaggctatgtttacgttttactcattgtccagcttagactcaaagtctagttcggtgggagggggaccttagcatcctctcagagatggtcagggctgagcaggaggaggcagagacagaggggcagctcagcctggtccattgagacccactctaaacagacatcatatttggaacaagaagatgcttcgagacaggaatgggccccactgtcatgcagaaacagactgggggaatggcagtttccctgagtcttggtttcttttatgttttctcttgtgccaccacc

SEQ ID NO: 15970 - DNA, 1844 bp, Homo sapiens
ttctagtcttcctggtggctgaggtgttcacgggctgggggagccagctgacctttgtcctcttcaacctagaagactcagcccgcccagacaccaacgtgtgagacggatggacatcaggaagggaaggggagattagcccaactgctgacagaacgatttcccttggttggaccttgggaatggcaaacactcatattggaacaagcttggggtggaagatttaggccgtgtgagcatgtgtgagtgagtggaacaaactttcttggaaactggagggaggagatgaggaggcttcgggaagtattactgatggctcatggttgagagagcgacgtggggacccagctcgccccagcttttgtcccaggttctctttgtctgatgctgagggcagggtggggtgtgggaccaccactcttgttggcctgtcaagtagaccctaggacagaaaatggaaagaaggaaatggctcggtgctctcaactagcagagagaattgaggagaggtaagggttccttctgcaggccagcctgggactccacagcgccagcaggagtgacttggccacaagacattccagccccagggactttgcaggcttcattccctgtctgtgtcttttccttctggtgtgttttacagacttctgatggggaagcttcaaacttgagcaggccagagatgtccttaccaaattggaaaggaaggtgaaactgttcctttctttagccaaagaacccttctcaaagacgcctccagaaatggacaaaatggccttcccttcgttcctttccaggcaataatgacatcattagtgatgcaattctatttgtctttctctttcctctctgtccttttttttaaaaaaaaaaaatgcatttatttcaaaactgtgctattcttttaagaggagtggaggtgaccccttcgatgctgctgctatcgggagacaaggtgccataccaatacgtgggcttgactaatcccaggccaccatgggagagagcaaagcagggctgccaggagttcagttgcatcaagggcgtagagcacgcgggggctgggctcggaatagcagtacttttccactttgatgccttagaactctcacttctcatctccacagaccagactcagtaaaatctcaggccactagagaatggaaggcggtgaaacaggatttaaatgcaaaaaaaacctattggaggcttttggcaccgtggctcactagagggacccagcatagtagaggtttctcttgttgcagcttctgaaaagttcaaaaaagaactccaggccgttcttccctcaaacccagtgagagtttgcagagaagtgccccctgcagggctcccgtcccagaacaccagcaccagagagggtcttcccgatgccccccgctggacttgcccaagcctctgggagcccctcatctcagatccctgtgttgaacatgacactgactgtcccttatttgttaaaatttgcaatatctctcaagtaaataatagccaacatttgttgaatgctttcatgactcccgggctaaggcctttatgagcgttgtctcaaggggccccaacagccatcccacagggagggggataacagcccccatttatagataagggagctgaccggatgctctgagaagtggcaggtgttgaaggaaggataaagcagtgatgggccagaatccccaaggttcccttttttgttcatcaggcccttcctgagatgtgatttttaatcttttaactttttttaattaatagcaatgcgtggcctcatatttctatgaaccatttagtgatactcccgcttcctgcatgccacacac

SEQ ID NO: 15971 - DNA, 1128 bp, Homo sapiens
cagcagcctggccgtcccccgtctttcctgactagggagcccggactgggcttcgccaatcccacaccagctccaaacatcagcctcctcaggctgcagcccgacattctggagggctgttgaccctttcgagttctggaaaaatccctaaatcttatgttcaattaattaaaaatctatttgatttccatatcaggtgtccctgacagcagtcttccgtatcacttgctgccatatgaaaataatctttgaaaagttcataaagttcttcaaaaactggggccccccgtttctggaatcttcctgttgctctcttctcctttccagtttggcgtagaatgggttcttgagctgggttttttgttattgactttttttttttcctttttcttttttaaaataaaaaccatagatttcccaccctctttaatcccttccttttaaaaatgttctcttctctgctctacgtcctcccacttcccggttcaagtttcactggtgtcccgacccgtccccctgccctctgcccccccccccccccccgcccctgccccgtttgcattgtttgtgtgcggcatcttcagtataaaaggccagcgcccacggtcccaggagcgcctccctccttctctccctcctccctcgggccattctctccctccctccctccctccctcccctccagtgtttatatgtaagggtactggttgaccttggcggggctcagtgggtatccagtgtagacggtggaggctggcgaggcgctgatgtaggtctggtgggcaaattgggctggatactgactcgggtggatggtgggcgagggcaggacccgggggcccatgctcacggggacctggtggacgatgctggctgggtaggcagtgtgctgcacggtgtggcgcgcagagccttgcgaggccaccaggtgggccacggtgccggtggagcccagggccgccggcgcagtgtaggtgtagaggtggggctgggtggggaggtgggcagcggcagcggctgcagccagatgcgggtgcacagtgccgtggctggggctgttgtgcgggaaggagtacggagcctgggccatggtgggagtgatgtaggcctgctgccttcggtggctcc

SEQ ID NO: 15972 - DNA, 1257 bp, Homo sapiens
tcactgccttcacatgcttgttatcttgtctaataaacccccttggcttctaaattgatgaccatctttgaaacttcatgctatctttgggtctttcctttgatcctcatctgcagtcaatcaccaagttctgtcaactctgccttcaacacatgtcttgagtgagttcttcattcttactcctaactggcactgccctatatcaggtcgtcgtctctcccttgggcatagagttttcagtagggtcctgaactggcctcccagcctctagcttctcctatcatcctccaatcagtcctccacaccaatgccagaagaagcttgctcatatgcaaatctcatcatgttgcagccctgctcagaattcttccttggctccctgtcactttcagttcaagcactaacctcctttatttggcacctagggtctttggtgatccggccacagcttgactgctagcctcactgtaagtcatctctgtccctaaattaggcttgggcaatcttgcatgactcacacgttcctagttacgccatgtcgtttcaccgttctgggctttttcccaggcttttctctagggccaagacaaaggagaggcaagaacaaacctagggtacaaaatttaaggaggtcctcactctcagggctgtacaagtgccacccctgctcttgtacaaccctgagagtgagggccttcttaaattttgggcctaggtgcttgcttccttctctcacccttgtcccagcccactctcctctctgctgatgcatccactctttctccatttgcaaaggccagattgctcttcggctttctgctcaagggttgcctcctccaggagcccacccaggctatcctgggcacatggagatgttttccttggccactcaaagagttccactgattccctactggggatgattgccaatgaagagcaggagaacacaatgtattatttgtaggaatctaatcctgtctacgttcattatttactgtacctgattctgtttccatcatgtgggcttagtcatctgcagttaatcctttgtttttatgaagtccttaaagaacccctgagacttgtggtgaaagagggacatctgcctccggtgaaccccaacagatagttaaattagagcccagaggggtcagctggggctgcccctgcctctggatcctgcgtaataaaaggaaacagttacaggatgcttcctgtgagccaggagcccggctgagtgcttcccacacatgagct

SEQ ID NO: 15973 - DNA, 1106 bp, Homo sapiens
ggcagatccggaacttgaaaggaatttgctatctcagtttggtaactcctcagatgctgccactcagaagggtgttggtatcactgatgcatgtgacttcatgagggagagtggagacatggcacagagggagggagggagatgcggggtggaagagtagaggccctggcgttgcacatcaccaggacgctattcgcagtgtgctgacccttcctggctgcaggcccctccaccagctgagccctcgtgtgtcatttcagggagctactttgcccgagatgctgcatattcccaccactacagcaaatccgacacgcagacccacacgatgttcctggcccgggtgctggtgggcgagttcgtcaggggcaatgcctcctttgtccgtccgccggccaaggagggctggagcaacgccttctatgatagctgcgtgaacagtgtgtccgacccctccatctttgtgatctttgagaaacaccaggtctacccagagtatgtcatccagtacaccacctcctccaagccctcggtcacaccctccatcctgctggccttgggctccctgttcagcagccgacagtgagcgcacaggagtgttccaggcctttcacctgctctgccttgaaatggctatttgggcctttccttttctttttaaacagaaacttttaatgaactgttctcttaacattgacctctcaatgaagttatgttcttaatctcttgctaataatgatttttacttttaagtcacttttgggttcactagtggattaaccagaagtgattgtagttgagtccagttttgctttttaataatgtgttgaagttttagtttttactctttgttgactttgctgcttattggcaccagggacagagtttctagatacaattttatggattggttttaatttttatgagtttgtctctgcagtgattcggtttctcagagtctcatggcatcatagtttttccagaatgacacagtagccaccggtggatgacagcccacgggcggcacagtcacttctgcctgttgctctgacaccaacccaggcagctctgctgtggcttctcctgggctctggcattagttggtc

SEQ ID NO: 15974 - DNA, 2231 bp, Homo sapiens
tggatcatcagatctttagcctagacagagtgtcgctggtaaataaaggagacacaggtaacccagagtggacagtgatttgcgtggggagacacagtggatctggggcctctgatactttgcttcctaaaacagcccccagttttcggcttgccctatgagatgatgttcatgtgcttccttgaaaccaggtggaaagaaaggggaagaattaattttctcattctgttgctgttgaacgtaatgtaatcttaatactgtagccttcctagaagcccttccctctttttcatgctgtaaagtcaaatatttgatatccttaacataaattttaaaaattaaggtcattaggaagcaaatgtctatttccaaagcaatgagcttgttgtgactgtgattttattcttctatagtatttttttcctcattttaactgagaggagaaaataatactcttttgcaatatccttaggttctccccttccccctggtgccccttctagtgtcttaagactttgtcttaacaagtataacattacattttgttgttaaaacctttcgaaactgtattcagtgattcttccaagtttatctgctctgcactatttcactaataaaccctggctaccacgtagcccttgatctccaagtagtttacctatgcaagacctgtgacactctgaattcacttctctttctttcagaaagtagtcataaatggagcttaattataaaggtaaaacttgtctccaaccagtttcattttggccatttctttttcaaaatgtcagctgttttcctccaagatttttcaccaaaacaatgatcataagtgctggaatatataatactttgcaggcataaaataacccagacatactctcatatttctttggtgtattttggttggtaaaacttaccagcattaaatgtaaaatataatgaggagttaattccttacctagaactatttcttccttttaagattcataagtaaccttttatttttacagagctacgtataacttccacattacagtcagggacctgaggtgtaacttactaagtgaaccccaaggttattttatcttgcaaaagaaacctaaaccaaactaagggccttacagtttatggttagactgaatcaaaagctataacctcaatttttccaaaaacagcttctgactgcaaaagcaagtcatacagttgttaggtatgaaatagcactgatcaggaaatgcatcttcgcagatggtatttccttcagaaaagacttttctacttttaatataaattaagccataacagtttcatgctgtggaaagagggtgaaaaggttcattttaagagattatataatatgaactttcacatttactgtgaaatgtctaactttgccagtgcttcagcaagtttttttggggggtgatggggaggggtagtattggttttagaggtttcaaatctgtgaactttggagaggggacagttgttggctctggtatttactagttttgtagtaacgttttgctagcctgactgacttttcttactggtttttatgcccacggtccgaggggactgttcttcttgttgggggtgtctgcggaatagcgtctcgtcttgtttgtataggcagtcaatgtgtgtgacatgtgtgtcctttcagtccggaagcccactgtgtgacaatggcgtggggtgtggctgggaggtggggtgctgaagcttgaagagcatttctttgctgattcataacagtatttcccatcttttgcctgcaggcagggaaagtgtacagtatttattttgtttctgttttactttaaatttgtaagtctttaagtagcttacattgattattataggggaggacaagtgacttgtttaaagttgtatttagtattctttccaatttctgtattttaaaatattgaaattaaaattgtattacttctgttttgatttttttagcacttagtgtattttttgctcattttgtttgaaagtataaatgttgaaaattgtataaaatgcgtccttgaaagaaaaagaatctgaattctatatccaattctgactttgttccctttttctgctgattgaatcatgggaaattatttaaaagtatgaaaaactgggttcagcgtctgctccttactacttctgaagacttcaatgtgaaaagtaattgtcttattttattagcagtattgctggggatgagtgat

SEQ ID NO: 15975 - DNA, 2575 bp, Homo sapiens
cgtttgacattgtgattttcttctcaacattaaaaaaaataggcttttgcattttcatttctgctgatgatatctgggtcccaaagagagcagctttaatatatttttcctacttgtgggaaaagtattataagtttggttaaattgtcatgtttatagtttttccaagtacatttgtaactacagcaggccttcttcgtactgctgctgttggacaacaggactggcacctgctgcagaggttataccttatgatacttttatgctccatacctgatttgttgggaaatgttatttaggatattcaaatctgcatcataagccgtaatataataggattaatactacattaagttgtatagaagcaagcatgttggaatagatcttttgtgtgtatttactttttttatttcttaattttctaaagaattacttaagatatggatttggagtaaaatgggtgcttttggcagtttcttccatctatcctaacctgaccagtacatattgaggttaagtatctggttaaactttaaggtattcatttatctcctttatgtatgatttttactaaatgccagttttcatttgcttatagtagcttctattttcccttttttccatccatggcataaaaataagtgatttctgggggtggggcagaaatgttcccaagtctgacaatagagcattttacaaattcctacaaagaaaatataggcaaatagataaaatttatttttatggagaagaaatatggccatattatggatttgtcttttttttactcagcaagatagcaggacttacccttctctattaagtatcacttgaattgctaagaagaaaaaagtctgtaccatcatctttcatggttgcattcaaatgtatattttcaaagagaaatacttcttgtgtccccattccaaaatgtcatgggataaatatgaaatagtttatgaagtagcctttctggttcagagtgactggaccaaagtctgaatcttatctgggtatcaggaaaaagaatttttatggaaatccttagtgtctataaacaacccgtgtaaaccctgtctacactatgccaaaaccagtggaaagatgggtagagtcatcttatctcaggatgtcaaaaatctgggtttgactgattcccctaccttcccacacagtatattcttgtgatttttgcttttctgtagatcctgagtcggtgttacaatagtcatgtttttattttgggttaagaaatacgaggtgtaagagctataatttccttttcgtgttatatcatgatctgggttttcttttttcctttacgtttttcacagctcttgagtattttctatttttttctttagtcacaaaaattaaaattaaactttatttttatgaattaaaatgaaatttaatttatttttatgaattaaaattgtggccagtatccactgtgtccttaggctgagaagtactaatttggagtagcccgtgtgtggaattctaaagtgaaggtactgtggattcatttttagtagttttagccccttaataagtggctaagttagaaaactttcagcgaggtaatagaaccacttgaatagaatccatgtgtctttttctgaattggtgaaaattcggccactgatccagtgactcctggtcaaacgtcttataacattactggccataatgcatccctttatctcatggaaatggctgaactttgtggtagctgctgcgagtacctgggcttaacagtaatagagaacctcatttataccatacagacacagcaacttaggaagacagcactgatagcatttagctagttgtaaccaaatacaaatatgtaaaattgagaattatgattaacatatgcaactttagtaataggaatagatgataattttcctgtattgtttcaaataagtgactgttcagctgggatccattggattataatttacaatgtcacataatattatgcttttcaatattgatgagtgatgtaaacaatataaagttggcagtttgtagtagttcagtatcctagaaatacattgaacttcataagtatcagttcatttttaagcatacagaattgaagattctgactgaaatcataaactcagaggaaacaagcccatctttatcactaattacttagcttgaatacttttctatttttaaataatcctaattattgccttttcaattatagtctactgtatttatttatatgggatcaacaggtatttatcaaacatctactgtgtgcccagcactacctagtactgttggggaacatcaatttgcagttgtggtctctgcccttgaaggtatcttctccaggaaattagcagtattattttcacttctaagcaaacatgagcaaaagaggacctgttcattaaaaaacatgctgacttttttagtttcaactgagatatgccactgtagaagtgaaagtaatttcacaattaaagaaatgcttcaacttggtaattaatatggtcatacagggacttggtgtagcatgcaaggaagcagaagacctgggcttttgtcgaag

SEQ ID NO: 15976 - DNA, 1183 bp, Homo sapiens
tacacaggagcgtgagaatgtcacacaggcaggttcttatttaaattcctggtagctgagcccagcagcatgtggtgggtttgatttagtctgtacagcatttaactctttctatggatgaaagatgaaagtggataaaagttctcatagactgtatgggaaccagatagattgagaaattaactcatgtgttgtgcagttacagagctctaggtgccggtctgatttttccttatagaatctagaacttaactgacataattcctgggtactttcagacacatagccaaacacgtagccaggtgattcatttggtaaattccataaggtctgccctgccctggaatggcttctcagcaaggctgtctcagctaggctgggaaggaggtggctttcagttccggtttccaatcagtgacttccaagaactggttaagaagcaggaagaatagaaagagttagatggtttctgtgttgggctaaaaaaaaaacctctcagatacccagttcctacaatgcatgtctcctggcagccagacaaggaaggagagaaactgtgaagggtgccagggtgccaacaagagcactcgtgttcttggcagagctcagaatagcgttcacagctctcagtgattcatcatctgcaggcctgcccacccgtgatccaagtgactgaggacggggtgagtcaggcagctccctctcctcatcacccttcctccatggctcggttctgtgccctccctgggccctatgggctgcctagcagaggggaggccgatgttgcaggggatgctgccagtgaggaaagggtgcctgctctgggtctgtgccagggtgaagccttcgtggcttcttgaaggactcccggctcccctctgcgttaagccctaggcacgtttagagaagaggggaatcttcactgccagctctagggacgggtctgatggtggggcccgcttagccccagcgagctactcagtgctcctgcactgatctagacaccacccctcatcatcgtatctgcccctcttaaatctaatctgcattctgttctctttctttctcccactcttttctgtttattcttttctttcttcccttgctcagcaagaatgatatttatttaagacatcacagctgttaaatgtttgcctctggggataatttttcggccaggtgc

SEQ ID NO: 15977 - DNA, 1108 bp, Homo sapiens
gatgagctatttttgtaatctaccaataaccctgtcaagtacttaatgaacaagaagccactaaagagaggaatggcatctgtttgttaatgactatctggtgtatagttaagaacagctggtctcaggggaggggaatgggctcgacttatataatcccaaccccttctcccctccccacacagaccattctgccagtttgctgcattaatcgttttcaactctttaggtcataaacccttttgagaatctgaaagccacttaatgtctcccagattgaaatgcttatatgaaaaagtattcgcaattttctcattgggtgttcatgagccaaaacttgaagctcatcattggaccacaaagttagaaaccttggtcaagagaatcaagtgcctgtgattgagattctgcagaattcagtttcatcgctttctgtactgaccctcccattgcctgtctacacgaaccttctgcagcatcagaccagttagctcattactcactgcaaagggcagttgtgcattcatattcataccttcttgtcttgattgacacctctctttaatacccctgttttgctcccagcttcatgaatcttaattttctctcaaggcttggccaagcaccatctcatctgaggaacctttcccaaccagccatgctagtccttccttctctaccgtctctccttcccttggtggtaatgtcagtgttgcttatttggtgcttagctgtttctgtcttccctatttttgtatctaactccccagggagactgctgctgtttttttgcagtgcccagctcctcgcatggttggtgcggaataaatgtggagtgtgttgggaagggtgggaggaagattcaagagtggagtgtgggcagagcaggccaaggcaaagttcctccctgaccctgcacactgccccgccacctgctttactcaggacgctgcacgcctgcaattaatggccgcagactgtcggcgctgcccaggttctcggactacgtgggttttgagtgcattctcctctcctctggctcttggcagcctcgccagctctccctgagggctcagcggcagcgaacagtgagctcttttgctccagt

SEQ ID NO: 15978 - DNA, 2031 bp, Homo sapiens
aaaacatgacactctaacagaagtaaactgttgctgcatatttaatactattttctctttacagacaagttgtacaattgtgtttatctcgccattaatagtgagggaaatattctctctcgtgctaaggagacaggctcacatattgagggagtgaccggtgcccgcgagacagaaagaacaatgtcagccacatcaggaccgctggggcttcgagtctgccctaatttgggtttgtctaggagctccagcctgatcttggattgtcaggcgtctctcaacactgccagccacctgagatgctgaccagcagtgaaggctgcactagttttctacactacaggaattactgttgatgatttttgctgttgtttcatgaatgtgccgagtgacttctgactctgccagcatctttgacctctgactctgcccgcgtctttgtttggcctattgaggtttagcgttttaaccttaactgttgttttggacttgaactttctctagccttgaaaatggagtgaacaggaggcaaagccacgcgtggtttgtgttggtggtatgttccacaaatggaagagatcattgcattttgctttggtaatgagtttacagagagtgggtcatctttgaagcatcaaatcctgatcaaatgctcaagctggaccgagctgcaagcctgccttggacaaagaatccctctgttcactgtggtgggaaagatcacactacatgcctgttgattggctcagtcactctgtgtctgatctaaacgtcattcagccctagaagcatgaattgcttcaaattattgtcaacttgttctcttccattttcattcaaattaactttgactcctggaagtattgagtcttcctttcaaggaccataaggtacatcagttatcttgaacattctgacgtgtaaaggaccataaggtacatcatttatcttgaacattccgacgtgtaactcacagccgaagcactccatcccagatttgttgtctgggaacttaggatcctctaggaagctaatctgcttagtctatttttagaggattgatctctggcacaagcagcttcctggagttacctcagcagaagactagaattagagaaaagggaaagaccttttcttctagtaagtgtcaagtacagatgctctttgacttatgatggggttatgtcccagtaaacccattggaagtcaaatgcatttaatacccctgactggacaccacagcttagcctcgtccaccctaaatgtactcagaacacttagaattgcccacagttgggcagaatcatctaacacaaactctattttataatcgagtgttgaatatatcatgtaatttattgaatattgtacattatgttgaaattgcaaccatttcacaccattgtaaagtccaaaaatcagaagctgaggactgtctgtacatgacattgaatcacatgaatggattactagggcctgaggggtgtccgttctttagaaaaatgtagagtatatatatcttcagggctgtgaattccatactagttatcaatattttaagatcattctgtatatacatattttaaattatgcaagcaaactaggaggagaatgtgcaattttgagggatacctaatttgcattcggttaggggatatttttcaacctcttgctttatactctgatatggggtgtgtttatgaacttgttaatgttatttaatcatgcagatttccaatcagtgtattgctcatttactgacaaaaagggaaaatacgaaacacagaaagggaaaataaactgacttttataatgaatctccatttcgttacttaaatctatataccatgagcactgagatttagaatgtgatcggtgccctcatgtttcctgatactgagcgctcccgggtgagcccacgctgacccacagcattgctgggtcacgtgctccctcacctgaggtgctggggtggcttcatttccatctgttctgtgaaaacttgccctttcccactgtggaagactgtgc

SEQ ID NO: 15979 - DNA, 2556 bp, Homo sapiens
acagagacagaaagtgggaacatcaagcagataccgggtaactctcactgtttttttaaaggaggggaaattccaaggtatcagttgagtcctgcacatattggggtaggggaaggagaaggttaacgctcaggtctgggagcgaaagtgtagagtattaaaggaggaaacaaacctcagaaaactgggagggataggaaaggaagaaaaaatgtgtgttaaagctctagcctaaacgatttccatgaagtaaccagaggggaggaagtggtaaatggaaaccctaactaagaagtctggttcgtcatgccctctggtgtgctggacgttttgccttataaacaacaggatagaagatactgctcgacagtgccatccctatcatggccttgttttttacaggcccaacgaaggaaccacttctgggaactcattgaggaaagagagaacagcaacccctttgacaacgatgaagaagaggttgtcacctttgagctgggcgagatgttgcttatgcttttggctgcaggtggggacgacgaactaacagactctgaagatgagtgggacttgtttcatgatgagctggaagatttttatgacttggatctatagcaaccttgcgtggcgtgtgaactggtctgctgacctcagacagcagctgtcccctgtggtggtgtggcagtgcctgtgttctctcctaggcaggcctctcaactccaggtgctgtcctaagaatttttacccagggcctgtcttctcaacccctcacctttccctgaggagtgtgttgttttccctgttgaaaaaagttacaaaaataaatcttaaagttagttttttgtaacacgaatttaactgtcagacagttagtgtaggtgtgttgcgtcatctgttttcaaccagattgcatttatggacttttcacacactcattttgaggaccccaggttcaaaagtaaaagcagtggccctgctttggggtccaagaataggagtgatgggtgaagggacctaagctggccaatagccctctgccccagacatgggatgtggatccttgaggtttctggtgaaatctgcacatctgtgtttttatatctgttccctaccctgtaatccctaccacgtgcacttgttctgtggttttggtctcttgtttaattgcacacaagtaatactactgggtaaccagaatcaggtgtgaatgtgttgagattttttactgttttgcatgataggaaaattgagaaagaatacgtataaaagatagagaggcataacatcaatgcagagttggaagttggctcccaagggctgacatggtgtgagtgtgtgggtgtgtgataagcttctcatccctgcatagatgcagtattcttagccttagtagaaaaacctggtttagtggtttaagccttgtgtggcagatagatcttaaagggcaaagcagtatattggtagttgtcaatatagcagtgctagctctgtctatataaatagagaaatggggttagccatagaggttaaaactacctggttatcccatataataacacaaactgggtcttggatacacagttgtatttaatgttttacgatctagcctttccagtacaggcactttctgagaaacctttgtcctcacttgaggcattttgttgtcgggtttttgtgtttgtttttgtgggtatttgcctcattccacccctgagctttcaggtagacagacgtgattcaaaactctgttctaaggtgtttattgtagtggagtaatgggtttgcagtgataagtcatacttttccaccgaaagggagggcttgggaatccctgagattagctaaagttaagttgttggaagaattccttgattggaaattgtacctttgtgttttgttgctctgtttcctgaaaataactcggggatgctcctggtttgtccatctactgctttgattccttggatcccacccattctttcactttaagaaaaaacaaataattgttgcagaggtctctgtattttgcagctgcccttttgtaagaagcacttttcccaaataaaacaattaaaaaaaaagttggctgttctgtgtaatgagctgtttttgaaatgtgccgatgtcaaagaataatgatgtttttctttcactgactcttcgatcggtcccttgtcggatattcgggaggataggtactttgagaaatgtgtgtgagagagaaagggaaaccttaactagccggggtcatcaaacaatcctatacttgaaaatgttcaagactaacgctgggccacctgttgagcaaaaggcactggcagttttctgctaccatgcacttgcggttgaacttgcttcatgcccttagataacgggggaaggtcataatataattgtattttgaaagcttattgttctgcataattatttcgtgaatttttaaggagttttcattattgtgaattttttgtgagtaagaaccattctgctactcccatggaagaccttcaggtgaccttttttccacacttgtaaaaataactgctcctcgatttt

SEQ ID NO: 15980 - DNA, 1536 bp, Homo sapiens
tgttcttggcagcattatttataatagccccaaagtgggctaatctaacctaacctaagtgtgcatcagtctatcaagctgagtagttgaaaaatctcgatgaagttgtttttctttaaaggcataagagagtttacgtgcctgtcacccttattttccgacaggttttaactagggtcttaacctcatgtagaaaccagaaataacaaacagtatggaaaaccgtctttaatgtagttgagctccaggtttggggtagagaaaattgggtaatttttcagttcccgaagttgagtcctcatagtttgattttctagtattgttaagtaccaccgcaaaaacaaacaaacaaaaaaaaaacaccacacctgtgtttacttgtcagcaaagctaattttcgtgtcagcttgggaacattgttttttcagttgactatttgattctttgactgtgaatcattaactgttgctcaagtttttcagggttcaatgactggattccacttgttctctctccaccttctctagtcgtgcattgaggcccatgagaaggacatggagctctcatttgccgtgcagcgcagcaaggacatggtgtgtgggatctgcatggaggtggtctatgagaaagccaaccccagtgagcgccgcttcgggatcctctccaactgcaaccacacctactgtctcaagtgcattcgcaagtggaggagtgctaagcaatttgagagcaagatcataaagtgagactcctccccagtcttcatttgtgctttctcttttggggaagaatttagtaacttgtgccaactttcaaccagatggaccgcatttaaatgcatgcattttatcttgaaactgggatattctaatggggatttcttctttgtatttcagctagcttctaggttagttggtctatctacttttatttgaatgaggaaaccctgtgtatcagttagaatcttcgtgctttttctgaggagattgtgtttaatggattattagccagtttaggctcagtgaacaaactgatctagctctgaatgtatgtttcctgacgttttacatttccactttcctattccattcattaagctagccaacaatccaccatcctttaaagattgttctcataactgaacaaaaaccacataatctaaacagagcaaagctacaagaaataaatttatttaaacgaaagaaaaaggagtctgtgtgaaatgtcttcttttgtttttgttttttacctaagttatatttttcaaaaaaaaaaaaaaagaactggctagcccttgagttggatttataaaggaggttgccttgcttgaaagaaatggtcagttgtgtgacagtatgtggaaccctttcaggaaatgcccacgtgcctttcagttaagtctttaagtctggaggcgacacaccagggtgtgtccttgaagagtgggcctgtaaaaggggaatttgcattgcagcctgttcattgtttcccaggtcctgcccagaatgccggatcacatctaactttgtcattcca

SEQ ID NO: 15981 - DNA, 1879 bp, Homo sapiens
acccaggaggcagagtttgcagtgagctgagatcacgccactgcactccagcctggatgacagagcaagactccatctcaaaaaaaaaaaaaaaaagaaaagaaaaaggtatatatgaagttaggcagtgagtgcttactttttttttttttttttttttgagacggagtctcactctgtcgcccaggctggagtacagtggcatgatctcggctcaccacaacctctgtctcctgggttcaagtgattctcctacctcagcctcccgagtagttgggattacaggtgcgccaccatgcccagctaatttttgcgtttttggtagtgacgggttttcaccacattggccaggctggtctcgaactcccaacctctctggtgatccacccacctcagcttcccaaactgttgggattacaggcttgagccaccacgactggccgactgcttacttttgaattttttcttagatatgaacatagcaaaccattgaaacaggaagaagcaactgctacagagctaactacaaagtcatcccttgctgcttcctcaagtctctcatcgatagttggaccacttgttgaaatgaatacaggcgaagctgagtcaagaaattcaaactttgcaactgtaggagcaggttcagaggactgggtgaatgctattgagtttgttcctgggcaaccctactgtggccgtagtaagtattctgaagaagaaaataagagttagagggctggatagcagttcatccatttgcttagttttgacaactttcccctttctgcttctattccttttttagtttaatcttagtacagtactttaatttggattacctaagatttacagatagagtgaaggaaatttttaatcccagtgaaatgaattcagaatgttttgaaaaactgaatcctttcgagtactttttgaaattaaatttcagttacccaagacatagataaagaagcaattttttttttttacaagtctaatcttggaaataacagcggtagaaaaaattcctttctttcaagtgaagaagttagttcagtagactgttttggtatttcattgcagttttattttcattttttgcggttagattctcagttctcttatagttcatgccttatctatttggacctttaccaccctcttacacattttcagctgcgccttcctgcactgaagcacccctgcagggctcagtgaccaaggaagaatcagagaaagagcaaaccgccgtggagacaaagaagcagctgtgcccctatgctgcagtgggagagtgccgatacggggagaactgtgtgtatctccacggagattcttgtgacatgtgtgggctgcaggtcctgcatccaatggatgctgcccagagatcgcagcatatcaaagtaagtctttagggagatgtgtgtgttattagatgtgagaatcattatttgccctttcacagcattgtgggtttatttcagagaaacatttgatgaattgaatggttatcagtgagtagggaagttttcctttcttgggcttcttggatgctttatcaagaagtcatatttccagtgaacaaaattaactgggcatggaggcatgtgtctatagtcccagctacttgttaggctgaggcaagaggatcgctcaagcccaggaggttgaggcaaaagaaaaaaagaagtcctacttccagaaactcagactatagacttctaacatttttttcctcttttaaaaaataatgtttctgagattcacattgaatatgtttaatcttttgaaaatgcacatttcattggtttttagtatatttacagagatgtgcaaccattaccattttactaattttaggataatttgatcatcctacacc

SEQ ID NO: 15982 - DNA, 1250 bp, Homo sapiens
cgtgcctgcagtcccagctactcaggaggccgaggtgggagaattgcttgaacctgaacctgggaggcagaggttgcagtaagcccaaatcacgccactgcaccccagcctgggcaacagagtgagactccgtctcaaaaaaattaaaaatataaataaataaataaataataaataaaaaccttacaagagtatagatcacaaaaaaaggtcagggcgggagagtgcagggcgtgcagctcacatgtggaaacgcacttgtaaaaattatccaggacgttaaactcatccctgtagctgtgcctgcaagcctctcgcataggctctaagtgcctggtgtggcctgtgctgagaccatcatgtgctccaccggatccacatccacgtgtgtcctttcctagtcatcctgtctctgggaggagccttctcccctggaggcttcctcgggccctcgctgagtcggcctctctccctgttctctccccggctgcagcatcctgtccaagtgctgccacgcgatggtggcgctgatctaccccttcgcctggcagcacacctacatcccggtgctgccacccgccatggtcgacatcgtgtgctcgccgacgcccttcctcatcgggctgctctccagctcgctgccactgctcagggagctgccgctggaagaggtgagctcccactcagccctgtccccctccctgcagggtgcggagaacagagcggggcgctggctctgcaggcatcatggagcggttctcagagccagcagtgttggggagcagggcgtgggggcaccagggctttgtctggcatgggtcctgcccagaggctgactcagtcagaccctcagtgactgcaaacactgttttcccttccaaatgaaatgcctggtatgagcacctcttgagaaggtcagcaatgaacaatttagccagatgtcaaaactcttaagtcattaatagccctctcctctcccctgccctctcgcccactcccccacattgaggagctagcaagatctggtccgttgtcatatccgttacaaatgtttttaatccccaagttctgggtgtccagtttagcatcgaagcggggaaagtcctgcttggcacttctggagttacttagccccagccccttcctctaaatggttttgacccggaggactggggacttccagcagtcagagaaggaagcttaaataatgttgctcagccctgaagctccaggaggaacgcctgtccctc

SEQ ID NO: 15983 - DNA, 1104 bp, Homo sapiens
tagagggctacaaaccactgtaatatctaagttttttcattcctcccaaaaaccagttcttacccccttggggttatattaccttcattgagaatgcatgtattagtacaacctgtcacatggccaaaccctaggtcaaaggggcaaggaagtggacttcactcctgagtaggagctgcaacattgcatggcaaagggtgtggacacacagaggagagaagaattggggacaatcatgtgtagggtcaaagggcctgttttggcctcatggggaaagcagggcttccccataattcttgagtcaccatggcaggcccacttcacctagaactgagctccaccttggtgctttggcttcggaatagctaagctgcttttctgacccttgcagatcttggatgaggtggaaaaaagacgaggcatctctcctgccctggttcagccactcatgagaagtgtcatggaagcccctttcccagccctgggcaaaaccatccttgtcaagaacttcctgccaggttcaggaactgaggtgagttgtcagactccttccttctccctggggaggcagtggcccagacagccgagtctccgtgctcagaggggctgcctttcagtgagcagtccaattccttggtgtcttctccccacccctagagctggcccagatcactcatcatgagttccaccctcaatccatccagcctaggactctgcccaatgcggcaagcccaagaactatgctatggcagctggggtgttcctttgcatgatgttggcctcaggttagggatctgcactgaacatccttaatttcttttaatagcccgttttctttcatacattttattgaaacctatttacatttcaagtctgtatcacctctataactttattttttgtttttgtttttgagacaaagtcttgcactgtcgcccaggctggagtgcagtggtgtgatctcggctcactgcaacctctgcctcccaggttcaagctattctgttgcctcagcctcccaagtagctgagactacaggtgcctgctgccacacccggctaatttttgtatttttagtacagacggagtttcaccatgttggcc

SEQ ID NO: 15984 - DNA, 1104 bp, Homo sapiens
cctgatgttatgaataaagttctatggaaacacagccaggtgcattcatttacgtattatctacagctgcttttatactacaaggacacagtttagtagttttaacagagaggatatggcccacaaagccttaagtacaatctggctttttagaaaaggtttgctggctgggcgcggtggatcacgcctataatcccagcactttgggaggccacagtaggcagatcacctaaggtcaggagtttgagaccagcctggccaatatggcaaaaccccgtctctactaaaaatacaaaaattagccaggcgtggtggcactcgcctgtaatcccagctactcgggaggctgaggcaggagaatcacttgaacccgcgaggtggaggttgcagttagccgagattgtgccactgcactccagcctgggcaacagagcgagactccatctcaaaaaaaaaaaaaaaagaaaaagttttctgatccctaagtccaagattcatatcctcactttcaaaggccttcaatagacaattagatgtcttcattgctgtatcatctcttccatctgtttcactgtgcttactctaaggcttgaagactcttttgatctaatttactctccctcaccactattctcagatagtactgtgtcattgctaatactctcacccacagctaagtcttcccattctatcaaataaatatctactgaaatcccaccgcatcatgaaagctccctgaacatttggtggcttatttggggtgccctggaacacatcaggatcccctttctccagcagggtgaccactcagagatgcagcccacacattcttcagaaagctgtgtgttgtgtttccattccttctctggtttctttcttctctgaccttttcataggtcatatctcctttgaatgaacaccatcacaatctacatctctaacaaaagcagaacctacgttttcccaacagtttgacaggagattccagtgcaatggtaggagcatttccttggattttattgtagatggaatttggcctcaaagaaggcttgcccctcttccttctttttgtgctcttatggtgcccaatccaggtcagctctt

SEQ ID NO: 15985 - DNA, 1437 bp, Homo sapiens
gattacaggcatgagccactgcaccctgcccacaaagtgaatttttttttttaataggaatttcaatgtttgtggtttgtgacttgcatataacatttatatctaagttctagcaaatctctatgaccagccaagaacaataagaatcactcacctggtgtttgtctttcttgtgcagggtcaaggtggaaggtccaaggactgagaaagaccctcgaaggcatccactttagtcctccattccattcctagagactgatcaggagtcaggcttcagaaggagtcccctggaaggcctccacaacctcacgctagagtcaagaatggatatgttcagcttggatatgatcatcagtgacccagctgcagaagccagcagggctgggaagaagcagctcagaggtgttcagaacccttgcccatctgccagagccagaccccggcacaagtccctcaacataaaggacaagatatcagaatgggaagggaagaaagaggtgcccactcctgcacccagcaggagagcagacggacaggaggattatctgccgtcctctacggtggagaggaggagtagtgatggggtgagaactcaggtcacagaggctaagaatggaatgaggccaggaacagagagcacagagaaggagaggaataaaggagcagtgaacgtcgggggacaggacccagagccggggcaagacctaagccagccagaacgggaagtggatcctagctggggccgaggccgagagccaagacttggcaagctacgctttcagaacgatcccctctccgtgctgaagcaggtcaagaaactcgagcaggctttgaaggatgggtcggcagggctggatccccagttaccagggacttgttactccccacactgccctcctgacaaggcagaggcagggtccacccttcctgagaacctgggaggcgggagtggctcagaagtcagccagagggtccacccctcggacctggaaggcagggagcccacccctgagcttgtggaggacaggaaaggttcatgcagaaggccctgggaccggagccttgagaacgtgtataggggctcggagggttcccccacaaagcccttcatcaaccctctgccaaaaccccggagaacgttcaaacatgccggagaaggggacaaagatgggaagcctggcatcggcttcaggaaagagaaaagaaatctgcctcctctgccctctctacctcccccgcctctgccctcctctcccccaccttcctctgtgaacagaagactgtggaccgggagacagaaatccagtgcagaccacaggtaggtgccggtgtggccaggcagagtgtcgccacctgactctctcagtggtttgtgtcccatcataaccgtctgttctcagctgaattatttgttttattaaactgatggatcttgta

SEQ ID NO: 15986 - DNA, 1236 bp, Homo sapiens
ctttaactcctgacctcaagtgatccgcccacctcagcctcccaaagtgttggattataggcgtgagccaccacacccggccttatttatttatttttacaagacagggtcctgctgtgtcacccaggctggagggcagtggcatgatcatagctctgtgtaaccttgaactcctgggctcaagtgaccctccttcgttggcctcccaaagtgctgggattataggtgtaaagccactgagaccggcccctttataatcttttaaaaatgctttttactttgaaaataatttttctcttgaaaactttaacttagctcatccttgtacaaattctgagttgacatctaaacaagaagggtctataggacatgcacctctttgcggctgtgatagagtgctgggagcttattgtcacctggcaactttctttctctgtaggttggtggtgctctaggggcgactcactcatgagcattgtgatctccttccagatatttgtggataactttgtccatgcagaccttcaccctggaaacatcctggttcagggtgccaacggcctgtcctcgagtcaggaggcgcagctgcagcaggcggacatctgtgacactctggtggtggccgtgccatcttccctctgcccgctgcgactggtgctgctggatgctggcattgtggcggagctgcaggcccctgacctgaggaatttccgggcagttttcatggctgtggtgatggggcaggtgagacgcactgggaccacagaagttggggtgaattttttttaattaaaagagctggtgaagcatggtggctcagacctgtaatcccagcactttggaagcctgagcggggaggattgcttgagcccaggagttcaaggccagcctgagcaacatagtgagaccctgtctctataaaaaataagaaaataggccaggcacagtggttcacgcctgtaatctcagcactttgggaggccaaggcgggtggatcacctgaggtcaggggttcgagaccagcctggccaacacggtgaaatcctgtctctactaaaaatataaaattagccaggcatggtggtgtgtacctgtaatcccagttacttgggaggctgaggcaggagaattcattgaacctggggggcataggtcgcagtgagctgagattgtgccacttcactccagcctgggtgaaagagtgagactccatttcaaaaaaaaaaaagaaaaagc

SEQ ID NO: 15987 - DNA, 1132 bp, Homo sapiens
acatttactatttgaggtgcccctgcctcactgtaggtcagctgtccggagtatgtacagtatgtatagctgttaggcctgagatgatgatgatgcagccagataagcccttagatcaggattggagatgaggaagtccacctgaggcttctccatttcacagcagtaatgttaggagagttggaaacatattttgccaggactttgccaggatgtcaggaacctttgaaacctattgcctccacttccccctaccctccctctatcacagacacgtaccattggcttaggctggtacctccaaatggggaggcttttaaaattcagaccagagcccatataatgaacaaactaaagaacaggtgggccatcgaataattaaagtagaatttgttcctgtggtcaggggctgagccatattgtttttttttttttctttccaagatttatttaacaatttaattagttgcacagaatgtaaattcttgacttttctttcttttaaatggttgtcaccagggtcactttccgtatcctgatccttcccagtggacagatgaagaattaggtatccctcctgatgatgaagactgaaggtgtagactcagcctcactctgtacaagtgggtgtgctccaaatttctttatgtcatatttaccttttttcataaacattagtttttactttgtgcctatgatggacttgaaaaaactgcatattctaacagcatgaagttgagttaaccatgtcctgtatctgcttttttttttttttttgagacagagtcttgctctgtcgcccagactggagtgcagtggcgtgatctgggctcactgcaacctctgccttccaggttcaagtgattctccttcctcagcctcctgagtagctgggattataggcacatgctaccacacttggctaatttttgtatttttagtagaggcagagttttgccacgttggccaggctggtctcgaacttctgacctcaagtgatctgcccacctcagactcccaaagtgctaggattacaggtgtgagccaccacgcctggccatgtatctgatttctgccttaagttttcacatttgctttggtctcttcttccttttcattgtatgttttattt

SEQ ID NO: 15988 - DNA, 1188 bp, Homo sapiens
aatttttgttaattgtggaaagggtaattaacagttcctatcaggtatttttaatgtggaaaaggacagaaacccaactcctaaaatcttaaattaaggtaacagtgctttaaaaaaaaaaaatgcatggggcaattagtcggcaactcaatgagtgactaaagtacttttatttaacatccacaacttcaactgttaagttttattaattactaaatcagctttattaaaatgttgacatttatttagctattttgaataattatagtgacttgacgagtgtgtatgaggacacagccaatgtaagccagtgtatccattttttagaggtgcatttttttttaaagaattctgtagatagaagtgctctgaaaacaactaaaatatgtttattcatggtagtatcaaaaaatgtttgtacaaaccatctgcttctcccggccagccgagttcattctccagcaccgtgaccgctggttctcatgtacagcacatatgcgggagagttggcagaaaatttgtgaagagatgccgcaaaggaagggtctgttgacgggtgggattgggggttttgatgaagttgcttagtcctggttttgttttgaaaattactgcgttgcatttttgtgttaagtttttgaacccacgtgtgttttggtggagtatgagttggaagtcactgcaaactagcataaacaacaaagctcacagagtaggcacagatgtagagaacagagaccaaaatggggtgaggtggcagtaaatctaggatagggaaaaattaatgtgagggtgggaaataaactgtaattacctgaaatcaaatgtaagagtgcaataagtatgctttttattctaagctgtgaacggtttttttaagaatcattccttcctaatacatttgtgtatgttccatagctgattaaaaccagctatatcaacatataatgcctttttattcatgttaatgaccaacgtaagtggctagcctttatgtcttatttatcttcatgttatgttagtttacatacaggggtgtatgtctctgtgctgtccccttctcctgccttcattttaaaatgcatccatgggtcctccgtgtttcctttggccatgccacatatatagactcagtttggccttcatgatatcgcctgatttttgaggactgtatcacagtgatatgta

SEQ ID NO: 15989 - DNA, 1588 bp, Homo sapiens
gatcatttgttgttaatgtgcaccttaaaagaagattctgtctagctgtcaaattctggttcccgaatatctcacccctgattgtatttgagatctagtagggcatactggggcattttagaagataaaatcccatacaaatgatatatgctatatttatgttggtgttggagaagaaagagcagtatataaagaaataattcaagactgcagcactgtcaacctgaaactttgtaaatatttcctagcttctggtttggtgcggtgacagcactttcatcacaggatgttaccttgtattcaccaggcggagtgcgagctgctgcacatcctcctcagatctcacctgtccccactgtacatccacccgccagctgcttgcaaacctcatctctagctttagttcgaaaccacattgcagggttcaggtgacctctacaaaaaactacctcttcagaatgaggtaatgaatagttatttattttaaaatatgaaaagtcaggagctctagaacatgacgatgatttaagattttaacttttttgtgtacttgtatttgagcactctcattttgtcctaaagggcattatacatttaagcagtaatactgtaaaaaaatgtgttgctcggaatatctgaatgttgttgaaagtggtgccagaaccggtttaggggtacgtttcagaatcttaaccttgagtcaattgcatgaaattaaatagctgtggtatcacttcactaacagtgatgtaattttaattttcagtaggcttggcatgacagtacatcctcataatgagtttgctgcagctttgtcacatgcacaggcattcatagaaagaccacccagctaagagggtagaatgattactctttttgcaagattctcttctttgtccaagttggcattgttagtgctaggaataccagcaccttgagacgagcagattccaaccattaggctataaacaccatagccagagatggaaggtttactgtgagtatgaacagcaaatagcttacaggtcatgagttgaaatggtgtaggtgaggctctagaaaaataccttgacaatttgccaaatgatcttactgtgccttcatgatgcaataaaaaagctaacattttagcagaaatcagtgatttgtgaagagagcagccactctggtttaactcagctgtgttaataatttttagagtgcaatttagactgcataggtaaatgcactaaagagtttatagccaaaatcacatttaacaatgagaaaacacacaggtaaattttcagtgaacaaaattatttttttaaagcacataatccctagtatagtcagatatatttatcacatagagcaactaggttgcaaatatagttcagtgacatttctagagaaactttttctactcccataggctcttcaaagcatggaacttttatacaacagaaatgttgacagaaattgctgtagtttagggttgaagtactgtatgatgggcagcaatcatgtattaacttagaaggggaaattgaaatataggaccgaatttggttttatcagtttccagagtactgctgccaacctagac

SEQ ID NO: 15990 - DNA, 1261 bp, Homo sapiens
tgaagattaactggtaacacaaagattcttcatgaacaaattttagtaatgagctggaaagaatattgtactctgaaaactaaagacatagattaaacttctctcctgacagactatggccttactaattatatgttataataaacctagctatatcttatagagaaaataaatgttatttgcctctagtagataaagcaggatttttttattccaatacaaaatacagcttattgtcattaaataatgttactttttgttgttgttgatggtgttttcgttaatatgagatcatgaaagaatatttttccccaagggtagataccttatgtgctgcaagtacattttttttggaatgaaagaatacatgtgacatttaccaaataaatggacttttactgaaaactttgctcttttcttttttaggtgtttggcaatcaactcattcctcccaatgcacaagtgaagaaggccactgtttttctcaatcctgcagcttgcaaagggtagttccgtttgtgacttgttatatacttgctttttctaagggggaaagaaatcacagactatcaggcagctagtgagattgtgtggaattggaagaactaggtttagtactcttctagcaataagattcatttgtaatgtagaaataacagttaaatgagaaataactataaaactaatggatgcttagcaaacttgtctaattgaagtttaataatcattccatgattaacacctacaaagatgtcttatttgcttggaagtagtcccctcgggagcgactgctgtactgctaggacgtaaatccttaggccatctctgtccacaggatgttcagaaatggccaagaatactgtgggcttgggagatcagaaatgttctttccaaaagagatgatccttgagctagacctgggaggaagcaggcaggagaagactacccattcttctcagctgaggaaacagcccatgggacaggggcctggagacaggagtgacctagttatggctttgttatgacacaggacagcctttaactgaactggctggcctggaaatgtcatgtgggaattgtgggaattaaggtgtgaagaattgttgagacttgggtatataatgatttgatcatggcagttcattgattatacaaatgaaccacactaaaacgtggagaggctgtatgtgggggtggggagtgggtgtgtggagactcaaagtctgttaaggaaaaataaataggcaaaacttttttttac

SEQ ID NO: 15991 - DNA, 1118 bp, Homo sapiens
cattcagagcagtagaaaggtagaaaatatttaatttgcttataatacactcaggcccttggtttgagatattcttttggatggttcttgtgaaaatttgtgcaagcctctcaatttctattttaattcacaataagaagtgatttgtgttctatatgccatttggtggttctttttagtttaaagaatattgagcttggcctgtgcataactatacgtgttcctcattagctgcctttgtagctgaatataaaatgtctcttctataaaatatccttaaattcttgtataaagtatccttaaggtcaaaggatacagccttagtttaaaaataagacagaggactgagtaaatgtggatataaaagttaggtgtttgacattgattgaaagtactggatttttttttccttatgtaatagttgaaatatttgagtaaaaggtcaactaattggtatgttttaacattagtttgactttgagactatgccattggtggaagagattgttttgcaacttctgtgtccctggattcctagactgtgtttttgaattctgacctgaattggacaagagttcactgtcagaatgatatgcataatacttttgaaatatgcaaactctttgaaggctgttttttctcttcttataagacatcgtgttgtttccttttcctcagaatttacatgtctacatttggggcaggtttattcattcgtttgtgcattaattcatcagatacttagtaagtactttctaattgtgccatacataatcctagaggtcaggggattcaaggattaataagatttggtatttatttttagaacgcttccagtctagtcctgacaacagtcttggaagtctctaatcaccatacagtatgaaagtcactaacagagatgtgtataaggtactaggggagcacagagagggcatgactgtgcctgggagtttcagactagcttctggtgaattagtagtttggtctgctttgttatgttgtattcctagctcctccacctgtgtctatcacacagtaggtgctcaatgaatacttgagtgaatcaagcattgttgcctgaatggaaccatatctagtgttcgttcttcccctag

SEQ ID NO: 15992 - DNA, 1365 bp, Homo sapiens
agttttactatgtaaataatttggagagtgaataaggagattgtgctatgaaatcctgacagcgctctttaggaggcagacttgacagtcctaggaaggttgacataaaaataccaaccttcagtaaagctctagtacaaaaaagggtaaatgtcatcattcttatttttaggcctctttcttgagagaggtgggagtgggaggtagtgttataactggcactttaatttgtttttggaactagaatttaggggcagttggatgaaattgcaaatttagaaggggaataagaattttctagtgctatataaagaaatgatgatggagacaaaagccttgctttcctctttttagaatttattttcgatttttagcatactgtggggcttttagagctaatatgatctaaattcagaaaatttaattttcatagtaggccaggtgtgaattacttatgtttgctatagaatgcttatttagactaacaataaatttactttgctttctaaggccagtcagcgaatgtggggatgaggcaggatgttttaaatgagccagagatgatccacaaagtgaacagtcgacacagaggtctttgagttggatggttgcaaatatattgacattagagtgaaaactccttcctttgggtaaactaaagaaagataaagtatactaaaaaattttaagatggtgttatacaaaaaaaagtttgggtctaacgtgtccacaaagactgtcaagtgaagaatggtggagattcttggtgtttgagcagccaacctggatgagtgacttcagggacagagcagaggaaagcaaaatgaatttcctttatttacccaaaacttgttgactgaatttttgtataggtccgggaaaataagcctaaacaaatagttgtagccttagaaaaactgttttcccatttctttctgagttagaatcagcatagcctccctgtcgccttaaatgtaaaaatcctattttgattaataccccagcctaagagttatagcaatacgagagactgaatctatttttgtttcgggtctttacctcatagtatgaaattagtaagacactgcatagattttgccctgaatactggtgtgcccaggtatgccgtgctctctctctgtttccagtggtggtaattttaaggcctaaagaaagctggggttaatcctgaagctaaaagtaaatgtttcttgaattgattttgttctgtggtacaaataacatctatgaatatcatatctgtatatatctgaaccaagttgtgtgcagagaggttgatataactatatttacagaaaatgatttttacaattaaagttcacattttaacatgaacgtgcgtgc

SEQ ID NO: 15993 - DNA, 1270 bp, Homo sapiens
ctatagtcttgggatcaaatcccttttcttgttcattagggcaactttatgtcttctctgtttacttgagtagggaccacaaagagggaaaaaaggatgtttctgacaccaaatatgagcttatcttatggtcagaatgaaagaggttgcttatcagtgagctgaaaactaaaattatagaatgaagcctggaaaccttcctcaaagtaacttgatggtggccatgcaatgtaatgttcctctttgtctgaaccttcctcttcttgggatgaattggtgaattgctaagggccaatgctggccttggagcttgcaagcaaattaattttccagtttagtctcttaagggttcaataatgctcttggagtaagttgggtatttttaaaggctgaagtttggactaccggaggatagagcaattgaagttcgagcaggatggagaagccactctaagtctcttcatctggacacgaattctctggaggcattagcagcagcacctctgggtcaacacagatttactggattccaaaatctagcaaggatctgagctggttaactcagagggtggagcatgatgctaacaagacggtttatcattttggacccctcacaaacacacttctctttagcagaggtgacattccttaggctaaataattggatccagggacataacagatttgttgagagaaaatgtggcagtgccttcacccgggacagtggtcaggaagccctgagcatccctgatggatttatccatcctcttctgaagtgctctgctctaggctgggtcctgttgccacctgcctgttctctggttggcttttgcaggagggcagcttacgtgtttgtcaaccagttagaaagccagttcctgtgggtcgagtttaggcctttttggccatagttgagaattttgacttgggatactgggttgttggtgacaaataatgtcttccttttcccccttcccgcctggctcggttatgggaatagccgtcagtgcatccatgtctgtgaccaacacccagccagactaatgtacacagcagggagaaataacattcaaatggtggttcacacatctcatctcaagataagattcttagggttcactgctttattcaaaagtgttttcactgtagctccttcatatggaatatcaaaactgaagaaattcacatgtggaaatgcaaatagacattgattaatcaaggtagcatctttatgtaaatatataaataagtttgggcattgaaatgtaaa

SEQ ID NO: 15994 - DNA, 1203 bp, Homo sapiens
ttaccaggttacttacgagaatagctgacttttagtaagcctttgctatgtgccaggcaatgtttaaagcacttacttttattcctggccaaagccatatgagacagatattacagaggaggaagaggagagaactgagttacagagagggacagtgacttgagcaagttcattctgttagtaaggtacaagccaggaattaaaaccaaggcagtctccgtggctcccctacttattttcaaacctgtttgtattgttggatgtttttgccctacaccgatgacatctctaacaggggactctatgaacttcctccttcaagggaaaaatccacattttgttgtgctttattaattgcatgggaattcaggtagaccttatttagattaatggtaagcttttagtgtggaatagttaggagagtttcaaaggataaatgtcccttgatagcaatttaaagttaagtttagctctttctccaagtataaggcaaatagcgatctctcagattattttccttatcatggatgattaacaaatggatgtagtcggagaaagcagtcgtatctgtttattgactcatcaaaatcaattatagctagattagcagggcaggattatatagatcattcactggattcattgatgataaaaaggacaccaagttgatatgtgaagaaacaaaattgcaggaagggcatatgcttcttaaatgacccactgttagaggtttcttttcagttatggaaatgttaagcaatcttttcatagaatcttccagggaactaaaatgacttggtgcaggaatgataagtggagaagagtttaaagttaatgcaaatgcatgatctaacttatgcaaacactgtggcaaagcacacagactaaggaacccaagttagcaagcacatcagctagcatcctgtttacatttctgtcctcagctctactcattaaaatcactaatccttgtcagtggaggatagtgtatttggatttttgcacatgttaaacgttcacacttacatttatacccacttttgcctttatttactcgttagcctttcaaatccaggaggtttaaataatatttttagactgggagacttctgttgttttgttttaatcagccagattctcttaacatgaagagaatttgcattttcctcgtaaaattggaatttctgagaagaatcagaaaag

SEQ ID NO: 15995 - DNA, 1115 bp, Homo sapiens
acaccaagctcacggccatctagttgcccaggtctcagttcccaggcctgtgggtttctagagtgtaagcctggataaaatcccatcctggtcctccatttccaggagaggactggaagctcctgggttccccaatgttgtctgcccagtttcagctgtactgctggggggagggagggtatgggtcacagccatggccctcaggtgggagtggaaggcagggcattgggggaggaaactagttgttggcctcgccttcctcctcatcaaaggactgcacacctgaggatgtgacgtcagacaccttccggctgagagcggtagacatctcagggtcttctcgtggggaaagtgactccaggtcccggcatcccgcatcctcttcctcctcaggtgccaatggcctcttctcctcctcagcagggccccttgccaggtccactgcgcctacccccggagcccagtcagtgtctccccccagcaaaggtggaggctccagagcagagtatcctgaagctggttgggaaggtcccatttcatgcaagctgggttgtgagtcatcaaatgcaggcccaagataggatcctgtggccggagaggcaatgagggactgatcgctggcttcccaggcatctgacgaccccagacagtacataccctgggacacgtaagagtgaggccatccatccatgggtgcttgagccagggcatctggaaaaagaatcatggaggtcagtggggccacagaatgtcaagggcaggaatgacagcacagacagcacaagagacagctaagagacagcacagagaactggcagtaagacacagagtgcacagtgagtagggaggacaatgggaaagctgagatggacaaggaagtcttaaaagaacggagctgagtggaggcagctgagatagttggggaggcctcataggctccagagtttggattctggaacatctctcaccctgactgtccatcagttcctggtagttgtcactgtagttgcagcccaatggctcctgggtggagttcacactcatgtcctcaccatccatggaagaccaggccatgagtgtggcctcagagatagcaaactgctccatgacgcctg

SEQ ID NO: 15996 - DNA, 1369 bp, Homo sapiens
ttcccttattttcttacagcaaatgatgtgcttgcttttggaacattggtcagtacttccaatacctacgacgggtctggtgttgtgactgtggaaactgaccacccactcctctggaccatggccatcaaaagctaacctgttgactggcatccataagtgtgcctctgccttatctcatttctcaacagttcattgctcaacaagaacgattcacctgggtttgcaagaatctaaacctctctaggggaagcccactgggtttaaagatgttagtgtttagataatacaggtaacattataaatgacagatctcaattttatagtagtgggaaagatacatgctaagaaagcaaataagctctattatattcggttggaacctaatgggaatcattccactatacaattcagtactgattattcttcttacattattaatcattccatttatcctagaaaattgtttttaatttgaatcagagaaaactgttgaggttcctcttggagtctagaacatccttaaatgtctaacaacaagggctacctctgagtaccttttagtattagttttctgtatatgatatatattatcttatactgaaaaaaaattcctttcagattggggtgttagaagtgcaccaggtcactctgaccttattactgtctttggtattgtcttaaataaatcaagaatcattgacctaattgttaaatttaaaaataggtagttagcaataggtggaaagagaaatgatgtgaaagataaatgatgattcgtggagccctactcacacattaacccccaaattcaaaagtaagaatgcaaaagtctagagggggtaacagtctgcatcatcatcacaacctaaatggagaaagctgtgcagaggaaacttaagcataaaaattgaattcgtttctgacataccttagactgaaaaactgttggttcatccagaagtgtattcatattaccagaaaatgagtttgtctatggggatacatgaacttcatatactaaggagcctaactccaaagcctgcgttctcatcccagtctgatattcacctaagtttccggacccttttccttagctgtaaaatggaagcggttggactgatggtgtctgaggttctttcccacactgaaattctaaatattgacacttagcagtcatagggctgataatacacacagttactgacttagcctaaacaacctggtgcatcgaaatgtattcacctttcttttgtaaagagaccatcttctatcttctttccacctttctctgttttatgaaaccaactgttgacatacaaaccatgattgaaggagaacctgtccaacatgttttatgtacacaaat

SEQ ID NO: 15997 - DNA, 1177 bp, Homo sapiens
ttagagtttaagcaatggttgaaatttgtaggtactatctgtcttattttgtgtgtgtttagaggtgttctaaagacccgtggtaacagggcaagttttctacgtttttaagagcccttagaacgtgggtattttttttcttgagaaaagctaatgcacctacagatggcccccaacattctcttccttttgcttctagtcaaccttaatgggctgttacagaaactagttcgtgtttatatactatttcctttgatgtcctataagtcggaaaagaaaggggcaaagagaacctattatttgccagtttttaagcagagctcaatctatgccagctctctggcatctggggttcctgactgataccagcagttgaaggaagagagtgcatggcacctggtgtgtaacgacacaatcagcacaactggagagaggcattaaagaaccagggaaggtagtttgatttttcattgaattctacaagctaatattgttccacgtatgtagtcttagaccaatagctgtaactatcagctgcaataccatggtgaccagctgttacaaaagattttttcctgttttatctgaaacatactggatttatatatgtataagcgcctcaatggggaattagagccagatgttatgatttgtttgctctttttcttttatagtttagttatagcaaaaatatggataatttctagtgaatgcataaattaggttgcgtttcttattttgctttaaatctctggtagtttttccacccctgtgacacaatcctaatagacagtgtcctgtaaatggacacaacacaataaagtcaagttattattgctgttactctggatgatatggaaaacactgccatattttaaatcaactactccacgtgtttttccatccaatcacactgctgtgattcagggatctttcttctaagacggacacatttgaacctcaggttcatcacaaacctggtacctgttgcttcccagaggatggagaagtgtagttaatcacacctcttagtttaatctgaaatcttgacccagttatttaacaaataaatacctcattgattatatttaaaagtaatacacttcctgtaaacaaatggggacaatgcatccaaaaaatctttttaaacagattacacaaaaattatttccagaaa

SEQ ID NO: 15998 - DNA, 1215 bp, Homo sapiens
tttgcattcttgctgagttctaagtgaagagctactaaaagtcataggtaacccgtgagattgtatgatttttcctatttattagctgtttgtgttcctgggaatttcctgagcatatcctttgcccttttttctttgagtttgtctttctaattgtcatctaggtcaagtgatatatatttttgataacttccgaaggcaaaggaaggcaacatagttgtgcttgtgcaaacttttacccaggttttctcttgagtgctgatatcataatgattttgaactaaaattctaagcgtatttttgtacacagaccatatggttaacatgaatgtgtttgcacatagaaagagaaatggtctctagagtgggccctgcagactgagtttttctgtcagtgtgtctcaccttattacagtaccccagagacaatccactgattctctttatttcttcctcaggtttgcctgcaatgagatttcattctctacatttaaaggacatcctttctgagctgctgtgaataaatttggaatggtactgtatattttcatctaatggagaactagctgtactttgaataaggattgctgcactggacgactttagaacatccctcacaatgtcgtcaacccggagccagaacccccacggcctgaagcagattggcctggaccagatctgggacgacctcagagccggcatccagcaggtgtacacacggcagagcatggccaagtccagatatatggagctctacacgtatcctcctgcctagcgcaggttgattgcttagagttttgattatttactagtatgacttatgaattattagaattttatattgttttctcctcccagttcatcatgtaaaataatcgcagggttcatttttagccttaagtttttgaacagagtagaactggttcatttttagtcaaatgcagcactgggcagtacagtcaccactgggcacatgtggctgtttacatttgaaatattttaaagttccttaggcacactagctgtgtgattaataaataaaacatttctgtcatgtagaaggttccgttgggcaaagctggtctaaagcaaggtcctgaggttctcagcagatcatttgttttacgtccatttgtttatatattgtctatgactgccttgtgttatgggaacagagttaagtagttgtgtcagaaacagttttgtccatgaagc

SEQ ID NO: 15999 - DNA, 1122 bp, Homo sapiens
tctgagtcattttaaaataaagtttgtgttatttcaatatttagaatctgtgcctctgaaaaagttacagctgagcatcataatagacagtgcttattgttagctttttgtttttcctggagtcagtaattgcatttttcttttgggacagttttccacaaggtcagtcacatcagataatctaaaaggtccagatttttttataggcaacctccctcctggaatgttcccttctccaccttggcggtgttgctctcaaggcctaccaacaaccttgtgaatggggcttgttgacttttagctttatggatagtgtgaatgggatctttgttccattctagtttttaacaggttttggttgatatattgggaatgcattggtaatgaaatataagaaaatatgtttatgttaatgaccgttaacgtctgtgatatatgttggtttccttaacttttctccaagtcatgtttataactactgtactagtgttcaccagtcaaaccaagcacgaggagctggagttcctccttctaagtcgaaaaaggggcagacacctggaggagctcagtttgttggcctggaattatataaacgacttaaggaatttttgaagaattacttgacaaatcttcttaaggtaagatgttttatatatatactgagtattcataacaggatataaaaaaagtgaaataatggttctaacttgttaaatctttcactgtcatctgttactgttttagacactaacgtaggtgacagtgttttgctattgcatagtcttttacctactgtgaatatgaaatcaccataaactatattctagggttttgttttttcgagatggagatctcactatgttgcccaggctggatttttgatctcctgggctcaagtgatccttccacttcggcctcctgagtagctgagactctgcaaatgctcaccaccgtgcccagctctttctgttttttaaaattagaaagctttgataaccttttagcataatagtgctttcgttaaattaccaaccattttggatttggttgttagaaatgatgaactttttcatttaaagcaaatatgtattcaaattatctgcattttactgtgaacccaat

SEQ ID NO: 16000 - DNA, 1164 bp, Homo sapiens
aaatgtaagcactggtcaagaaatgattggaaataatattaagaagtacaattcagggtgtgcttaagaaaaaagcgaaaagatgaggacaactcaaatccaatcggcaaaacactaacccatcgtagttcacattttccaacaaaactactcacagaacgtcaagaatattaaaccaaatgatccaaatttcattattccctacctgagaaagatcgaaaaaagaaaatggcacaaagaatgagaataaagtgcatcatcagctttcaaacaaccaagcagggcaaacaccacaagctagggtacgggtgcaggcaggaaacagaaacaacacagctacacattcttgagataactctggtctttatactgaaactaaccaactaagaaaattattcaatgcattatacatccttaatcctcacaacacgaactttcacagaacagtaaaacccagttattagacgtgtcttaccagaggagctcgaagtttcatctttcttctcttcttcttctttatcattgttctctccccccgtttcagtccctgcttccctatcactgtctgtatcctttgattccagcacattaatggtgggggtgctgggcctgctactgttattgggaagccgtcctcttctgcggcctcctggacgttttggtggggtctttatccgctcagcggtgagagcagcagcaaactcctttgctccctcctacgaaatgaaaaatgtcaacatcagggcaaagttctaaaactcattttgatggaagagaaaaaaaaatactatataagccaggttagtcaaaaaatgtatcacattatccatttatcacaaataatcatttgcatgtctaatatacttgttttgatatgcttttgatagtctgaaaatttcagaaagagaaatatgggttctatatattcctagaatggtacaaaaatcaggcaagacagttctatattgtgaatttgtaaaatatattagctagttataattaagttaaaatataagaagataaagtatgaaatatacttcatgtaataaaggtaattatctctatggacatacagtctatttaaaagtgaatctttacaaaagaatcatatacctaatgtgcacggagtcagactacctatgcagagtttaagataatgcatac

SEQ ID NO: 16001 - DNA, 1159 bp, Homo sapiens
ttttattatatggtgaactgtatgttttctacttttagtactgtttgtaaattttacttcttcttggatttacctttttcagttatattattccattatgccttgctactgtaacagctaatgatgaaaaacaggatctgtctttatattttcttccctccacaaatgtggatctcatagagttgaaaactaggttgtgatatagtatagtatacctaattcctgtaatgggatcatgttcctataatatggccgcaatttagtgtagaatttttgtaaataaaagtgtattttaagtttaacttaaactttcaatgaagtgttttaaggatttaaccatgcagcacaaatgagcacctttctgtaaatgccaacagtgtaatatgtgtcatttcttcactgattgttagtttgctgcggattaaaacacaggtgatcatattcaggctggttagattagtgattttaatatgaaaccattgcttttagaataatcatgggccagactgggaagaaatctgagaagggaccagtttgttggcggaagcgtgtaaaatcagagtacatgcgactgagacagctcaagaggttcagacgagctgatgaagtaaaggtataattttatcttttgtgaaaatgaatatacaattaaggataggttttttcccctcctaagttcaataagtttttatttaaaataattctagccaagtttgtatttacaataagatgagtgaatacttggaagcttaggttcttgatctgtcttaacattataccatgcacattaatcagtctttgtttagtatacttttatttgcatatgcagctgcagaaatgcctccctaaatataaagggatgcatttcatgattttatgtttctaaagtcattgtgattaaaaaaaaaaatacacacacacacacacacacacacacacacacacacacacacacagtcaacaaagaaaggatggcaatcgtttcctgttctctaaccacttgcaataaaataacagatgtggtgtttttgtattatttgaatgtgggaaactatagtgtaaaatctatatgcacctaagaaaatgttcttgatatttttgaggatacactagatttttaacctgctttacaggtgttatacattttctaacaatgaac

SEQ ID NO: 16002 - DNA, 1175 bp, Homo sapiens
cccttgggctcacaggcccacccaccacttgctggctgcgcagccttgggcaggtggctgaccttgctctgcccacccctggagggcgatgtctgtgagggactccagtcgttgtgaagtgtgagccctcaggacctcctgcgtgaagaccgcacaagctgaaggtggaaagttccacacagcccagcccgtgataacccttcctgtctgccaagagccaggcctaccttgagtggtctctttgtggggttagtgagcctacacccccaaggaaagggccaaggtgtttgccttttcccaagaagccacctacggttcactggagggaaaggagccccaaaagacggtagggaatgactgggctgtgcttgagtggggtcgagccctggggtgttttgcctcctaagactgatccccttcaaagtcgccactcccccaaagtccctcaaacattgtactcaagaacaatggtggggagatggtgggccccctcacctgttccctctttgaagcagggctccacccaggactcggccatcaaggacttcgtgctgaagtacgccctgcccctggttggccaccgcaaggtgtcaaacgatgctaagcgctacaccaggcgccccctggtggtcgtctactacagtgtggacttcagctttgattacagagctggtgagggacccccaccaagacctgcgggggtggggggtggggggactcgttctttcaggcaaggtggagtgttgaggggaggtgtggctgtatgtacatggctcactcagaaatcccagcctggggcccttgcacgttggtggctcaggtatattttttaattgatggcttccctttttagcaggatgggagcttagattcaggtgcagaaccctcttagagttgacgtagctgagacttggaggagttcagaggctgcagagctgggactagaccagccctggccccaggcaggcgtggccgtgccacctgggcacaggtcttaagggcctgttgggcttgcagctgtggcccccgtgacaagtggggcttttccagaaacatgtttccctccaattgaggtaaatccagggtttgagcattgtcagaatattagcgacaggacctgaagcctgacctcagagtctgagctgggacttgctctgtgtggccgcctggcttat

SEQ ID NO: 16003 - DNA, 1177 bp, Homo sapiens
tctcaggtaatgccactgcaccttgagcaatgggagctactgctcctcttttaaatttttcctttttttttttttttttttgcatacatcttatgacgtatgtaatatagtaacattagatgtgaatgactaaatatgtatatattttgtatgtgttcaggagatgccccacaatgctatccataggcatatgtaatcaaaaccattgggagttggtgagggtttgcgtggagttagtaccatagcctgatggtaaaggaagtctcaaccatcagtaagtcttaggccctctggagaagtctgcaggctgtggaaatgcgatggacaattgttgggaaatagcgaaccttctgactcttggctgtgtccccaaaactgcagagatgcagccaggtttcaggaaatcagacacctcctgttcttgtgggccccgacacttgctttcttccccctcctcatctgcttctggagggaggtgaagtgcctgccagtttgggccttgtgtgctcagtcttgcttggtttctttcagaaattgttgccaaggtcagagaagtctcccagcccgactggacgcctccaccagaagtcacgcttgtgttgaccaaagagaactttgatgaagttgtgaatgatgcagatatcattctggtggagttttatgccccatggtaaggtggtgtcaggccctttccatattcagtaccctggtgggcactaggtgcggggtggcaggcccctgcccgtgaggcaggaacagcagaggagcaaggtgggcacgagttgtaggccaggattgaggctccaggtcttctggaagaagcgtggatgtaagagagctgttgggggagtgaatgtggaaggaactgccaagtagtccattcttgggtgggagaagggacccaaaggaaagaagatggcagaaagagaggtggtcggagtgggagcaagtacagtggctggtctgagctgcccagcttggggaactgaggtggctgcttcatggggaggggaggggagggacgcacaaccagttgcgtggataagctggcagcagtcagagtagagagcagagcggaagaagacggctctcaagggagaggggagcctggcttcaggagagaccatctgccttcccaggagacggcccagggtaccatctgtcttggtgattttgt

SEQ ID NO: 16004 - DNA, 1199 bp, Homo sapiens
agagcttccgccggaagctgtgtctgctgcgccatctggcggcccacacggggaggggccccttccggaacgctgacggtgaaatgtgcttccgacacgagctgacccatcccagccaccgcctcccgcagcagggggagaagcctgcccagtgcaccccatgcggcaagcgctccctcccagtggacagcacgcaggctcgccggtgccagcacagccgggaggggccggcctcttggagagaaggccgcggggcctccagcagtgtgcactcgggacagaaaccaggctcgcgcctgccccaggaggggaacagccaccaggaaggggacacggaggcgctgcagcatggcgcagaggggccctgctcctgctcggagtgtggcgagcgctcccctatgagcgccaggctcgccagcccctgcagggcgcatactggagaaaagcccttccagtgtgcgcattgcaccaagcgcttccgcctgcgccgcctgctgcaggtccaccagcacgcgcacggtggggagagaccgttctcctgcaggaagtgtggcaagggcttcgccaagcagtgtaaactcacggagcacattcgagtccacagcggagagaagcctttccggtgtgccaagtgtggcaggaacttccgtcagaggggacagctgctgcggcaccagcggctgcacacggacgagaagccctttcagtgcccagagtgtgggctgagcttccgcctggagagcatgctgagagcccaccggctccggcacggtggggagaggccgttctcctgtagcgagtgtggcagaggcttcacccaccagtgcaagctccgtgagcacctgagagtgcacagcggggagaggcccttccagtgcctgaagtgcgacaagcgcttccgcctgaagggcatcctgaaggcccaccagcacacgcacagcaaggagaggccgttctcgtgcggggagtgtggcaagggcttcaccagacaatccaagctcacggagcacttgcgcgtgcacagcggggagagacccttccagtgcccagagtgcaacaggagcttccgcctgaaggggcagctgctcagccatcagcgcctgcacacgggagagaggcccttccagtgtccggagtgcgacaagcgctatcgcgtgaaggccgacatgaaggcccaccagctgctgcacagcggggag

SEQ ID NO: 16005 - DNA, 1130 bp, Homo sapiens
cagcaaacgcttccacggtgaaggcaacgggagattcaggtgcaaggtgcagcctagcaagacccctggccacacacgcatcactgcgggaggttggagggtcccctctaccgggctttccagggcttggcgcgtgctcggagcgtgcactcagcggccattgtgtgtttgatttttcccaagggcagggccggcttttgttcatttcgcgcttgctccagagtctggcgcaaggtcctcagaggtcctcagtgcacgcgaaatgaacggatgaacaagccacaggtgacaatgtgcgggaagaaacacgggtacaatcccaaatctctgcccagctgggatggagatgattttcttcattaaacctgatccaacacctttaaacgctatcacttaaaaatggattttatcattccttctgatatttcagccccaatattaggtagagtacccggatcactgccaaatcctcttaccaccgttgcaggtggctggtgtgcggcagaaatcctgctccacggccctgccctttgcagcaaggtcacccagctgcctgataaggagtccagggacgggcagcaagcgggactgcggggaaagcgccgggcacgccgcgtggcacccgaggcccgcccgcccttcctggctgggtatgaacaccagccgcgcccgcgggcggcgaccccgggcttcctctcgttcaggtcgcctggcgcggccgtgccttcctgcttccctacggcagcggcacaccgggaccttggggaaccgggaaggggcccttccccaagccaggcctctggcccatccaggtcccctcgagtccccccagctcacccagagctcagcgggtcccgtcctcggtctccccgccggcctcgcggctccattgctgccgcccgagaggccctacgcgagctcctaaaaccctgcgccctccatttggcgcctgtgggatggggcacaaccgtgtcggtctcactggtgctgtgagtgcagctgagagccaatggagcaaggacttaacacaaacgattatatttttattttaaagatgtatttatgcgtctctatccatattttaaatatgcacattttctcgattacattaattttgatgacttgacttt

SEQ ID NO: 16006 - DNA, 1170 bp, Homo sapiens
tcatttgcggttcataatagtggtataattgatgtctaaattggtgctgtggtctctagaagagattcacatatgaggggcacatattattgctaccaaacggaagcactttttatgtgtatacttgtctttgggttttattttgctagctggagactgtggcctttaatcctcttttcctttcttccatgaacacaggttcagcagctggacatggagaaccaacgctcatcacctctgtcgttccccagtgttccacaagaagaaaccttacgtcaggcccctgctggactcccccgagaaactctgttccaatcccgcgttcttcctcccaaagaaattccttctttgtctcccaccattccccgtcaaggctccctgccccaaacttccagtgctcccaagcaagagacttctggccggatgccacatgtgctccagaagggaccctcactcctgtgttctgccgcttctgagcaagagacttctctccagggccccctggcttcccaggaagggacccagtatccacccccagctgctgctgaacaagaagtctcccttctctcccactccccccaccaccaggaagcccccgttcactcccctgaagctcctgagaaagaccccctgaccctttccccaacagttcccgagactgacatggacccgctgctccagagcccggtttcccaaaaggacacccctttccagatctcttctgcagtccagaaggaacagccgctccccacggcagagatcacccgcttggctgtgtgggctgccgtccaagcagtggagaggaagctggaggcccaggccatgaggctactgaccctggaaggcaggacggggacaaatgaaaagaagatagccgactgcgagaagacagccgtggagttcgcgaaccatctggagagcaagtgggtcgtgttggggaccctgctgcaggagtatgggctgctgcagaggcggctggagaacatggagaacctgctgaaaaacagaaatttctggatcctgcggctgccccccggcagcaatggagaagttcccaaggtaagcacatcccaactggggcttcccaaggaagtgatctgaattggagtgtggtttaggaatgtagtgtaatatgaaagaaaggggtggttgataaaggaaaaaatacag

SEQ ID NO: 16007 - DNA, 1159 bp, Homo sapiens
gtgggcctagcgcaccaagcccctgggcagtgagggccattgggtcccttggagcacacctcagtgcagcaggaaggacccctccgggagtagcggttgcatttcccagcttgcctctcctgaaaaggccccccaaaagtgctggccccaacttttctctattttgggccatctgtggtacccgtcccaagggcacttggtggtgtcccctagtgtgtgactccctggcctcataaggacgagttgtctgaaatcccagcgttaggtctggggagatggagaagctgaaactggggagctgcaccacaaacgtctagctctcagcagagctgggagcaaagcctggccgcccaccccaacctggggctgcctcccactccgtgagatgcttctgtctcctgttcactttgtgtggtagtttcttattttcaaaatgcatctcatttgatcattactgtgaccttgggaagcagcaggacagggatttctttttagaggtgcaaactgctcagaggggacacacctcagcctctcactgtgggtacacgtggcgtgccatgagtggggaagagcaacaggcgagatgcctcattctactggaacatcactgtgggtgaacagagatttccaggttttccctcttaaaatatttgtcccacaccgacaagagtccagtcaccaggcctcaaaggaacttctgcttgtagcagccgcctcccctgtgccccagcctccttaatgtgtgcactctcagagggcacagctcgcgaggctgggtttgggggccaagtggcttgttcattccagcatctaacatcataaaggtgggcccagatttcttgattcgaccacagtgctgttcctaccacacaaatatccattcctgttttgttgaagcagccactggtcctcttgtttcccctgcagacggagggacctggcagtgcccattcattcagccccctcatgcatacttttattaggcgatagactagttaagaaaattgtttctatgtactgtatattttgtacctgtttacacttctaatattgatataactgatattttgaaaaataagagaaaacatcctgttaaaataaaacctaaccagcaccaaggcagtttgttgggttccattcctaggcatgtgtctttgtc

SEQ ID NO: 16008 - DNA, 1198 bp, Homo sapiens
cagatgtccccaagggctctgccacaaaggggaacagacaagcgggcagtggctgccggggtagaggtcaaggcaggattgcttgtattgcccttgagaagatggcatgaggtgggatctggtgccagatcgaagtggggctttggctggagggttgacagtttagcagtcacagaagtgaaggcagagaagggggcactggtgcaggcagatggcgtggagagggctgtgtgagtggtgcgtttctcttttaaaaaacgggttaaaatataaaactgttctcagctgtgcaccatacagaaacagatgagctaggtttggccctcagccacagtttgctggcccctgggctaaggagacacggtgtgactgtgtggcagagcgcccactgaagtcgctggtcatgaatgtcacgtgacaccagcagccagcttacctggttctctgcagccacgtgcagctgcttggctgcaggtgcagaacaccgatggatttcactaagtggatacaatgaacaaaacaggggcaagagtgctgagggtgtgtgtaaggggggaccacaatggtgggcatggagggaaatgaggatgagtcagggcagtgaaaaggcagcagggtcgatggcttgcaggtcttgaaggactggaaaactgctggaatcaggacaccagacggaattgaagggacggcaggaggcggccagggagtggtgtgctggagatggagatggtgggtatggtaaagtcactgtcgtcacagtcacggatggctgtgggatgggttgggggggcacaggacaatcaacaaggaggctgccatggccaagactgagggcaggaagagtgttgagaagagagggaaggtctgcagaagtagcaaaaagacaaggcctgggacccaaaggcaaggtctctagagagggattgaggctggcagaggcacaatctgaggggtgaggaccctgtcccagtgggcctgggctcaagacagaggcagggaagaggatgacaagcactcagagggctgcagtcccctggagctcagtccgagcagggaacactcaggacctggcgggtctgctgagccctgagtcccacaaggctcagtggagggatgtgcaggaggtgaggagaaggggaggtgaggtctcacaaggggatgggtcaggccaaatgtggcaagggatgagctgggagtc

SEQ ID NO: 16009 - DNA, 1170 bp, Homo sapiens
gtgtccatccattgggtttctccagtggagaagcttcttgagggggctcccgccgtccactgctgctgcttggtttaacttccagcagaattccttcctagatctgctgcagggcctgctgggatgcctttgctgaataaatgcggttttgctgaccctcccatcagacgaggatgggccctaactgagccccacccttgggctgctggcccctgtgagatactggggtgcagggatggcacctgcctggtgggagaagccgcctggcctgtgagacctaggcctggctagaacctgactgctaatggcttccaaggactggagacttccagaaagttccccagcagactttccaaagctgctggggtcctggccaggctctggcttcacttttgtcctctttctctggcaagagaggcagccatttagggtccactagaacgcatgctgatcgtgggctgagctgaaaaggggaccggttctgtgtgcccagacactaaggcagagacctggctctcttcaggctgatgacagagcactctctggtcccctgcccagggtctgcccccaagccctccccgctgcactgcctggagagcgccctgagggggatcttgcctgtaaggcccttgcgcttcgcctgcgtgggaggccccagccccagccccagccccggctccagctcgagcttcagcggctctgaaggagaagacccgaggccagagcctgatctctggaagccgctcccccagggtgagcctgtgcggagagggaggatagcgggatgtgtgccagggcgccagtcaccactctgatgccagctttgtttgtgacgttagagagggaccgccttcccagctgtaagcctcctgtccctctgtccccatgtcctggtgggacccctgctggcagcagtggcggcagccctggtgaagaccccaggagaacagagcccaggtactgcagcggcctcggtgcaggtgagcctggggtctcctgagggggcgcccatgcgttccccagaggaccaggagtccagactggatcctttgagtcctgcctgtcgctttgcctggctcttgccagggagtcctgcacattggccgtgctttagttccctgtaaggtgagctgtgtccgagaaggagggcggggctgctgggggtgctgg

SEQ ID NO: 16010 - DNA, 1200 bp, Homo sapiens
cagccgccatgccactgtgggaagcccctgcagcaggagctgcacagcctcggtgctgcccttgcggagaagctggatcggctcgccacagcgctggcaggcctggctcaggaagtggccaccatgaggacccaggtgaatcggctggggaggcgcccccaaggccctgggccaatgggccaagcttcctggatgtggaccctcccacggggacctcgctgggctcatggccctggtcacagacatctgccctactggaggcagaagggacccacgaggcctaaaccaaagatcctgcgtggccagggagagagctgcagggctggtgacctgcaaggactctccagagggaccgctcgccgggcacgtccgctgcctccagacgctcccccggcagaacctcctgggctccactgcagctcttcccagcagctgctgtcctctacacccagctgccatgctgcgccgcctgcacaccccctcctcgcacataccgggggccaccagagcccccttccccctttagtgcctgctgccttacccctgcagggagcctctcctcctgcagccagtgcagatgcagacgtgccgacctcaggagtggcaccagacgggatcccagagcggcccaaggagccgagcagcctgctgggaggagtgcagagggccctccaggaagaactgtggggtggggagcacagggacccgagatggggggcgcattgatggcattcctcttctccacatctgctcgttcttgccgagggtgcagtggtggcgtggaagccctgtcaccccaccccaggccaccctctcccagaggacgccatctcccttactgttgctgggagcctcgccctttgtcccaactgggtagagcccccaggtgctgtttgctcaggaggctgctgtgggggtgccttcctcagcctctggccctcttggctcagattcaatcaaatgttgcttccctctcctgtctttcccactggagccgcccaagcttgtaggtgggtggtgtgcataggccacgtgtgccccacatatgcagggggtgccccacacagctagagcggccaggagagcgcctcctaaccaccagccgttcctgatctcaggagccttgaagggctgggctcttgccttcctggagtaaatattggcacagatttcatttgagagaactcagccccctggtct

SEQ ID NO: 16011 - DNA, 1131 bp, Homo sapiens
ttttgaacctggcattgtatgaatgtactacccatttaaaagtaaaattataaatagaattatacataaaattaaatgatatgcttataggactctgatataggtgctttaaccacagtgcacagggatctgctttggagtgaaaactcactttgcacttgggatcagaactatgcagttagaactgacttatttgtagtttcatagattataactctgtctgtccaactagactctaagccccttgcggtagaagtatgtccttccccctgcagccaggaggcactgatgggaacgttaaaagtattcgtttaacctgtaggttgttggacattcagacagtgggggtgaaggaggtgggcttcttgcaaaaggggcttggcagtggcccagccaccctgctcagtgaagagggtgggatctggccctcccaccatcccaccctgcctaagatgggaaaggccaagggaggggaggaaactccatttggccctagttcacccgctccctctcgcccaggagccatacctgcagagccagtgtgactgctgcagctaccgtctagacccggagagccctgtgcggatcctgaacctgcgctgtctgggtggccacacagagcccgtggtgctgccggtcatccacagctgccagtgcagctcctgccagggtgggtctgggcagggaggggacggggcaggagcctgggcaaggacccagtgttgtgaaccagacccaggaacacacgtgtagctcctcactccatccttcttccttgagtccttccagtccacgtttttccttcttctcggtgttcttgttaatttcatctcctatcatgcatacttgtgggtgtctggggtagttgcacctagttcaaaccccagctcatctgtttcctttgtttccttgctcagcctccctgacatcatctttttttttttttttttttgtgatggggtctcactctgtcacccaggctggagtgcagtggtgtgatctcggctcactgcagcctggaactcctggtctcaggtgatccttccgcctcagcctcctgagtagccgggaccacaggtcacaggtgtgagccaccatgccgggctaatttttcttttccttttttttttt

SEQ ID NO: 16012 - DNA, 1241 bp, Homo sapiens
ttaactcccctccaggagtctggtgagaatagctcggaggttcctcctagagctgacatcataaggaatccagttcaacttcgtaaactctcatttttccaaaatccagaaaaacagcatagctcatttcttttcctgttcctgatattttttagtattagaagctaatgaaccgatgtaaccttttatcatctgaattcagcagtgaggcgtgtgtaaaccagtcactggtcataagcatctttagcttttttgaccacctctttgttcccatcccattgggaaatcttaggtgctcctagaggcacacagtcaccttttagttgtaggtgaccaggaggcagctctcaggactctgaggacagcatgcagtgagaggctctgcccagctgcctgttctttccacacgctttcatttccgcccaggagatcctaggatctgaccaagtctcacttggcttttacctactaattctggcctcctgaatttgattctttgactttcagtggataaattaattcctctgagtgcatctgggcctcttggtgagcttcccaggagaaatagggcttccaaaggccccagaagtgtcacgtgggagtctggctcggcaggcggtgctgagtggccgctgctctttgttccaggacccttctgcagaggggctgtcggaggaggttcctgtggtgtttgaggagctgccggtggtgttcgaggatgtggcagtgtatttcacccgggaggagtggggcatgctagacaagcggcagaaggagctgtacagagacgtgatgcggatgaactacgagctgttggcatccttgggtaaagacgcaccgagcctcttattcaccaccctcctttgacttgggaagcccacaaggggagctgtggcttgtggttatcttcccattcctgccccctccctgtgtgtaggcagagaccgatcctgtcttttgcacctcataactcccctgcttggggtaactgtgctttatcaccttctcatccacccacctgttcatccattcgtcccccaccaaacattttggagtacctactatgtgccagatgaacacagctgatccatggtctctgctttcaagggcctagcacgtttgtgggagagacagacattttaataagaaactataaaataatacagtctcccataaaagagcttccagaagagtacccggggctactgaagaagagggatttgatttcctgggcattggtg

SEQ ID NO: 16013 - DNA, 1896 bp, Homo sapiens
cgccagggatgaaatgggaaccatgctcccagcacccccctcccccatcctcacagcgcttcaccccaaggcaagaccctaacctgggccctaacctggacggagggagggaaagggtaagctgaggactatctgggcaggggtgagggggctttccagggagggttgggggcagtggagtctccactgcaaggccgggacccttccatgtgatgtgcttttcaggtgcccagctctcggaatgactgtggctccactgtccctgacaaccccttcgtccggaccctcccccacacaactatgtctggtcaccagctccctcctgctggcacccagagacccggacccgcagggcctgcctggttcctggaagtcttcccagtcttcccagccagcccgggccctggggagccctgggcacagcagcggccgaggggatgtcctgctccaatacccgcactgctctggagtttgccctctttcccaaggagatgctgctggggagctggtatgggtggggtctttccctttacagacggggcagatgccaggactcagcccatcctgaggaggacacgtgtcctcatggagagggtgctccggcccaggcgggggagtcagtgcccagtcagcagctctgccaccatcctgctgggaactgggggggcctctattgggttataggcaaggccttttctctggcatggaattgttaattttctgacacgtctagatgtgaaatttctgaaaatgttgaagcagagaaacattcacacacaaaaagcaacatagtcatgtgggtccagatggcctcagtcctagatgttggcaccctttgctgtgtctcctcagagtatcctgttccgcctcctgccacctggacctccctcagtggatgtcttccctcccccgaccccagcctgtcagtccgagcacagtgcaggtttggctctgacttgggcttttggctgcagtgggggtggatttcagagcctctcatggcagcatctaagtgaccagagctgggatgagagaggggaaggggcaatgtgagtggcgctatgggacgggccagccctgctcctgagccagccccgccctctgccccctggccctgggctctgtgctagggatggtgaagaatgggggcgtgccagcctggcaggagtgggaagcaacacgcaggggtcccggacctctccagccttgccctcacgcttacccgagctcccagtgtggttagcacagagctcacccaccttgcctggctcccagctggggcctgtcctcactggtgctccaggggaagaaacgacagcctcacttctgtatggactgctgatgtggcctgccatcctgttcagcgggcattgtctttggagcagcaggagaataggatgcctctcactcacatgccagttcctggctggccagctgctcagggctcaggctggggcctcccattgacatcctccccctacactccctctctgagcctccgtcgcccctcctgttgggtaagggtgttgagtgtgacttgtgctgaaaacctggttcatatataataaataatggtgatgaaaagattactgtttggtgacaaagccctggcctctgcctgtgtgcaggtcccctgccccgcccacctgattcttgtttctccagtgggtgggtctggggaggggagcagggaaggattctgggagctgcagttatgaacacagatatccaggactactttcctgagatctggaggaaaatccggccccctgctgactgcccggattcggcggagaaccaggcctggcaggaagaccgaggacttgttcaagtgcagctttgagcaccactcgtctgggccccagaggacacagtgcaggactcctgcagtgaagc

SEQ ID NO: 16014 - DNA, 1210 bp, Homo sapiens
tgcccacctgactctcctcttggccctcctgtcctcccgtccatcctctgtccccgggttctcctgcccctttccctccccttcctcctcctccatggcctcttcgcctgcccatgctctgtgtgtattgcaggtttcccagttcatggcgtgtgaggagctgcccccgggggccccagagcttccccaagaaggccccacacgacgcctctccctaccgggccagctgggggccctcacctcccagcccctgcacagacacggctcggacccgggcagttagtggggctgcccagtgtggacacgtggctcacccagggatcaaggcgctgctgggccgctccccttggaggccctgctcaggaggccctgaccgtggaaggggagaggaactcgaaagcacagctcctcccccagcccttgggaccatcttctcctgcagtcccctgggccccagtgagaggggcaggggcagggccggcagtaggtggggcctgtggtccccccactgccctgagggcattagctggtctaactgcccggaggcacccggccctgggccttaggcacctcaaggacttttctgctatttactgctcttattgttaaggataataattaaggatcatatgaataattaatgaagatgctgatgactatgaataataaataattatcctgaggagactccagtggtgctgggagggtgtaactgttacttgctgtgtcctgtgttcctgtctggacatgcataggtgtgcctgcacaggaatccgggtctgtctgcatgcccaggcccacagggctgcccctgtatccaggtctgggtgtgtgcagtgggggtgctccctgggggctgacacaggtcatctccagggagacagaatcttgtctctgtagggccctggattcaagataacaaaaaaccccctgaaccacatgcatttagaggcagtcctgatgggacactgacctggtgtctagcccctgagggccatgtgcctctgctgggtggggcaccctggctcccacagcttggcttcacactgactgtggaagcagccctgcacttgtctccctcacccagttcctgagcctgcgttgaccctaacctgaaattggtctgagtcctggctccccctgccacccacaacttagccttatcttatccaatacaattgggccccggacacactggtgactccagccc

SEQ ID NO: 16015 - DNA, 1122 bp, Homo sapiens
gtccaacattttcagcttctggggggacagtcggggccgccagtaccaggagctccctcgatgccccgcccccacccccagcctcctcaacatccccctctccagcccgggtcggcggccccggggcgacgtggagagcaggctggatgccctccagcgccagctcaacaggtgagggagtgcaggtggggtgggggggcacgccctggagtctggtccaggtcctggcggtgttgtctggtagagggagagggcctgtctgtgtgtgcagcagctggatccccttcttccattcctagcccagctgggggctgccacacctctagcgcggagggcctgggttgacaggctgcccctcccccctccccttccccttccccactcccggtggaggctgtcactggtgtccccacttctctgagcatcccccacttcctgccccaggctggagacccggctgagtgcagacatggccactgtcctgcagctgctacagaggcagatgacgctggtcccgcccgcctacagtgctgtgaccaccccggggcctggccccacttccacatccccgctgttgcccgtcagccccctccccaccctcaccttggactcgctttctcaggtaagctccagccctgcttcctcgatgtaccgtgacccgcttgttccccgattccagcccaaacctgctttgctgcctttctgctgggctctgtggcccagcctccctgaaccttgttcctgccctcctcccacccctgtcctcctggaggaaggctgcttcaggagctgcaggctcagggtagggcaggagagtcccccgtccaaagcccctagacagctgggtgcagggaacctgtaggctaagtggcccgcagcttcactcccctagtgtccacagcctccaccgccaggccccggagcatcgcctgaagagccagctccaacggtggtgcctgtctcacggccacgggtggtctccaagaactgactgagcccgagacgtggcggtggaggctgcataccagagtatctagggacagggtcccgggtcccttctgtgagtgacactccctggtctcaccgtcctgcccatccttgcccttggcagtggctgtcaca

SEQ ID NO: 16016 - DNA, 1203 bp, Homo sapiens
agccccttccctgtgtggatgatggttgccagcctgctgcccgccatcctggtcttcattctcatcttcatggagacacagatcaccacgtgagtggtcctagccaaaggggtgtgagaggccagagccccaggccaggctggggaactcagcatggaacctccagccacactgggcaatcccagggacctcagggaaccttggatgcccagatggccacagtttattctgtagacagcagaaaaaccccgatgtttgctgggacaggaacagcacgtggaggggcaggccaccctggcagtgctagctgggagctgtcatggacgataagggctgggggcccaggttttgctctgtaacggaatttgaatcctgacggaatggacagggaccgccaggttccaaagccagatggagggactggctgggcattctggaaagaccctgtggtctgcggagctgagtccagcctgggcctcagcagcacccctcccgctctcaggctcatcatctccaagaaggagcgcatgctgcagaagggctccggcttccacctggacctgctgctcatcgtggccatgggcggcatctgtgccctctttggcctgccctggttggctgctgccactgtccgctctgtcactcacgccaacgcgctcactgtcatgagcaaggctgtggcacctggggacaagcccaagattcaggaagtcaaggagcagcgggtgacggggctgctggttgccctgcttgtgggtacgttgcctcttgcctttcccttcccagtggattccccagggctactggggccaggggaccccggggccaactctttctcctgcgcctcccgtaggcctctccatagttatcggggatctgctccggcagatccccctggccgtgctctttggaattttcctgtacatgggagtcacctcccttaacgggatccagttctatgagcggctgcatctgctgctcatgccgcccaaacaccacccagatgtcacttacgtcaagaaggtgagccccccagctccccaccggaaggggtgtgcctctggccatcctggtctacttgggtcactctccagctgccccctcccatctgcccagttcagccagcccccacctcctctctgtaccaacccagctctggcacctaggaatgttcttccatccccgcctccgaagaagagagag

SEQ ID NO: 16017 - DNA, 1120 bp, Homo sapiens
ataaaactgggccctgaagcagcagagggctttgcccagggtggtggcactagactgggacagattaggatgaggtgccgggcccttcctgctactggtgtcctttctcctcagtcacaaggacatagtagctgaggggttgcgccagctgctgggggaggagaaataccgccaggacctgactgtgcctccaggctactgcacaggtgagcaaggggcaggcggcaggcccggggagacggagccctggctaaggccgccggccctgctcccctccagacttcctgctgtgcgccagcagctctggtgctgtgcttcccgtgaggacccaggaccccttcctgccatacccaccaaggtcctgcccacagggccaggctgcctctagcgccactactcgagaccctgcccagaggtaaaggaggcagggtgggggagccctggccaccttgcccgccatgccctgagccacgtccctccccctgcagggtggtgctggtgttgcgggaacgctggcatttctgccgggacggccgggtgctgctgggctcgagggccctgagggagcggcacctaggcctgatgggctaccagctcctgccggtgagtggccctggcctggcccgtggcgcatcctcactcccagcctgcgggtaacctgccgccctctcctctccccacagctacccttcgaggaactggagtcccagagaggcctgccccagctcaagagctacctgaggcagaagctccaggccctgggcctgcgctgggggcctgaagggggctgaggggttgatgtggggttcaggatggcccccccatggggggtggatgatttgcactttggttccctgtgttttgatttctcattaaagttcctttccttccccgttgtgaatctcagttttgggacggggagcagagctgagtcccccgcctcttccattcatgccccgccccccatacaaagacaaaaggccacagataggtgggggccaaagcactttactgcaggggcagtgggggaggagaagactttaaattattcacttaaataaaaaggagggaggggcatgggagggggaaccccatcccaccagcctgtcccctcgtccat

SEQ ID NO: 16018 - DNA, 1163 bp, Homo sapiens
ggctaggtgttaatgaagaatagggagaacagtagaggaccacggacagagacccagcctctcaggcgtttgcccaggaacgcttgctcctgctcccgtcctatgtctgcggcagacatcatgagtcgaacgcactccttccggcctcgctagggtgccaccccagattcctgctaatagagtgccctaggaagccaccataatttgtcacaattggtatgagatgaaagcctatttgccatctttgtatgtactccctacaaaccgtttcgatacctcatagccacatgatactttacatgtctctagtgtttgcacttaaactctagcacaccttcccgctcaggaaacgggagaggagaaaggtggagaattcaccaagtaaccccatgataagaacagcagcacagctctgttaccaggctgccttttacctctccccctcaggctttccatctgatggtcccctggtgtgtgccctggaacaggagcgaaggctccgcctccctccgaagccacctccccctttgcagccccttctccgaggtgggcaagggttggaagctgctctaagctgcccccgttttctgcggtatccacggcagcatctgatcagcagcctggcaggtgctggagggggttaaaatcagatgggggtggggagggctgacaggaggaggaaggtgggctcagttggctgggctgaggtggaattgagccagccggaggtccggctgaggcccagcgtgacaggctgctcttcacagaggcaaggccagaggaactgactccccacgtgatggtgctcctggcccagcacctggcccggcaccggttgcgggagccccagcttctggaagccattgcccacttcctggtggttcaggaaacgcaactcagcagcaaggtgggcttgccacccaccctccagtgcatctctgtcattctcagggaccttgtcaggcccagcgcctcgtgcagctcggctatccttttcctgaagcagacacaccctctctgtcccctgggacctgcatcttttctacaccctttctgtggcttgcccacctcctgtcagcagcatgcattcctggaaatctgcagtttcccaaagcactcttagcagcatcctagctccacccatccctctcgaagtcttcagg

SEQ ID NO: 16019 - DNA, 1214 bp, Homo sapiens
gaccaggcccggccggacgctgcaggctcgctgcatggagaagaaggcagctcggccccacgcccggcgctggccagcgcgacgaggcccagaggggcgggggagtccaagcccgcccggcccggctgctcctggggggcgctttcctgcccctcccctcctctgctccttcctgcatggacctctgccgttcctgctcctgctccggaagccgccgccgccgccgcgcttgccttgccccctctttttggcctccccctatttcctaggatccgcattcgggtggactctgccccaggagcttgacagggtgcagggcctcttctggcctctctcctctctctgtccatccactgtgccccttgggccacgccgacgcgctcggtgccacgtgccgtgtggtgtctgtgccgcagacgggccatctgcccgctcacttgtggactttgcgctcccggttgtcgcgccctgtgctcccgaccagcagccccaccgtccacctcctcgcccccgcttctcttacgcccccgccccgggcgtgctcctcgcgccctcggcctctctgtccttgctcttttgtaaggggcgggcccggctcagtgacctgtgctgctctgtatggtgccgtgtgtaagaataaacccgttggaatactcgtggtctcagttccttcccgtcccgccgccccggcccgacccactgctagggctgcccaggaggagggaggcaggagggaggccgggaagtccaggtgggcagctctcggcagaccctgggcctctttaacacgcctcttgttttctcttccagtctcggaagggtgctgacctggaccgggagaagaaggctgccgagtgcaaggtggacagcatcgggagcggccgcgccatccccatcaagcaggtcagcgcctcccttcccgtgtgctccagggctcagaatgaggcccaggaatgtggcgcttcccagggcctcttctcaggcctctgtgatgggggagatggcatcagaggccagcaccaccctcctaggcggagtccttaacaagggactggctctccagtgagaagccaccttctctgcgccgccaccttcaggccacgagctctgcctgtaccttctgatcaccaccggagggcagcagagagctacctgccgtgttcagccaggcgctcagcctgtcccgctggttctggagttgggtctggagaggg

SEQ ID NO: 16020 - DNA, 1211 bp, Homo sapiens
agcacctgttgctgtattccaaagtccagcaaaaagaatcagaggcttccttttaaactgtttgacaagtgtttattatcagacactgtcctaagggctgggactattctaggctttagaaggttcttaatgcccaggtgggggctgcagtgcttggtggccaccctgtcatccatgtccccgagtgtctccgctcccctcctcagccaggggctctccctaaatcccagcctggcccagcacttggcctgctttgtgctgttgcctctgaagccgttgttcctgagggcctgagcctcagcgcttagctccaggtccttcgccgcccccaactctacctccctcctggcagactccccctagagctgctttgagcaccgtggagatcgaggtggaatccagactcggagacattctgtggcttagaatcctgcttttcaagattggagccttccctctcctcccacagcagggagagacctaggagttgcaaggctcaacgctggagtgactgctgctaaccagtcttcatctgtctctcccacccggcctgcaggattacatgcagaacatccacggcaaggagattgacctgctgcggacaacggtgaaagtgccagggaagcgcctgccccgagccacacctgccacagccccgggcaccagcccccgtgccaacgggctgtccgtggagcggagtaacacacagctgggtgggggcacaggtgaggcggctgctgaggtgggggcctggggggtggctgccttggagccaaggcaagcaggcattctgggcttggctgcttctcagcctgggcacagggtgctggccagcatcacacttcaaggtcatctcagccaaagacatgtgccctaacgcagccctcgtggagttagttgaggtgacagcaaatgcctagacgagcagttgatctggatgtcagatggggccaagtagtgtcatgtttgggcagtggtgctggtggtcctaggcccatctctgcatctggatccgaggcaggcgatgggtgggggccatgcctctgggtgcatggccggcatctcagccaaggttggcatatggagataggggaggtggaaggggacggagctgtctgaggtcaacctggtgcatattctcaggcctgagtgagaggcgggtctctgctcagagaggactgaatttagacaggatctggaggcaagaaact

SEQ ID NO: 16021 - DNA, 1251 bp, Homo sapiens
gcagggtagtgagtggagttgtggcgatagcatgccctgggtgtgcacgcaggccaggagccctgatggcataaacacccccccaacagaggcagaggagtcgtttgaatttgtggtggtgtccctcactgggcagacgtggcacttcgaggcttcaacggcggaggagcgggagctgtgggttcagagtgtgcaggcccagatccttgccagcctgcaaggctgccgcagtgccaaggacaaggtgggtacagagtgactgggcccacacagagcacctggctggggtgggactgaaaggggcctcatgactgaccaaccgccccttgtcttgtctctcctgctgtgcgacagactcgactggggaaccagaacgcagctctggctgtgcaggccgtccgcaccgtccgcggcaacagcttttgtatcgactgcgatgcacccagtgagtgcaaggctggtggggctgggagctggggatggcccagggaaagcttcgcaagcatcagggagcagggaagagggcagggaagccttccctagttgtcccgcgctctggtggcctgcctgctgtcgctgtatcattctcctctccttgcctagatccagactgggccagcctgaacctgggtgccctgatgtgcattgagtgctcaggcatccaccgacacctgggggctcacctgtcccgggtgcgctcccttgacctcgatgactggccgcctgagctgctggctgtcatgactgccatgggcaatgccctcgccaacagcgtctgggagggggccttgggtggctactccaagccagggcctgatgcctgcaggtgagcagatggtgccctggagctggccaggaatgggggaagcgttgggggctcccagcatggggaagattggagtggctgtgatggtattagaagggttaaaactgtctgttgctctgcttggcagttggccccttgggggtgcccctcctgctctggtgcctgtcactcaggcgcctcacaacaacgggccctttctgagcgttatcagcaggtcaggggccagcaggaggcgcatgcgcagggcccctatcacggtgtggtgcagagcgcccactccggagctctgagatggggagaatgggtgagagataggggagtgtgtggccccccagtgcaggcccccacccgctttgttccagcactgccaatccaagagagttcagacggccagataagctgcaacacgggcctgcctggaatct

SEQ ID NO: 16022 - DNA, 2582 bp, Homo sapiens
gtttcggatcttggaatatttgcattatacttaccggctgagcatccctaatccaaaaacctgaaattctccagtgagcatttcctttaagcatcatgtgagcacttaaaaggttttggattttggagcattttggattttcagattagggtgcgtccaccctgtaccacatgattagttacagcaggtgctggagaagttggtcaggggcgtgtgaagctgtggtaagtgaaaaaagcttcagataaggggtggggcaagaattggaggaaagttagaaaggaatcccaagaatgggggctggcaagatttgaacgaatgaagggaagaaaggtcctcaaaaaaaaaaaaatggatgaggtcccagtttgactggggtggaagaactagtggtgaagagggataggggagttcactgtaccaagcgtctgctgctctcccctctcaggaaagtccatgctgctctctgctattgggaagcgtgaagtgcccatccctgagcacatcgacatctaccatctgactcgagagatgccccctagtgacaagacacccttgcattgtgtgatggaagtcgacacagagcgggccatgctggagaaagaggcagagcggctggctcatgaggatggtagggctccagacctgggcataggggtgggcgtcctcccagaaaggcccccaggagcctcatggccatacactgtccacagcggagtgtgagaagctcatggagctctacgagcgcctggaggagctggatgccgacaaggcagagatgagggcctcgcggatcttgcatggactgggtttcacacctgccatgcagcgcaagaagctaaaagacttcagtgggggctggaggatgagggttgcccttgccaggtgagtccctccctccttccctacccccataactcccccatctctccagtgtttagtgttcactccagtggaactgtttggaacaggagtcagtggtaagtgtcaaatgagacatggacatctgcagtgtggagggggttgttgtgtatgggctagagagagagcttcctggctgaagtggtagagtgactcagttttctattggattcttagcacccagcacagagtttagagatcctaggggtagtcctaggtaaaacggtggagtaggtctgtttctgtcctcccaccaggattccctttccaccctttttgtactctagtcctgctaattccagctgtaaagataaaatgttagacggctattatgatagctgtcgttcttattctcttgtggcctggactcaaagtgagtttccatagaccagcattcccccaataatccccccagagtcactaaacaggtaattccttgccccatcattctctgtgaagggaatttataagacttgatatacttctctagaaagttgcctgcatgtgccttagagtataagcacagtggttccacatgctagcaaggattagctgcctccggttcacccaaggagcttttaaaaacacagatttctggtttgggaaccagagctttagagtctatccctcgctagactctggccaccccacaagataggtctatcttcagaccttcagataggtctaatttgttttagcagtttatttcctctgtatttttttgtcttctccgtagtctccaacttcagtgcacaaggctcataaactcataaagacttctacagccttgcctcgaactgtccttatatgcttctgagccccgtattctactcttcaatctcttctcttcgactcttgtttctgtcctgcttctccttttccctctgaggtatagagcctaaaattgatttcaagactcaagccaggagcctactcagaattgcatgtagcaggcaagtttgtcccgtcctgtgtcacatccattataattctgaggtgcttctgtctcctttaccgtccttcagagccctctttattcggcccttcatgctgctcctggatgagcctaccaaccacctggacctagatgcttgcgtgtggttggaagaagaactaaaaacgtaagagggtggaatgggggatgtgagcgggcaggtcccaaagggggaatctagaaaatggatgcccagaaactgcactgatgttagagcggtgagaaaggaactgaaggaaggacagagttcactttcttggacaagcagtgagcacctttagggctgttgaaggctggccttttattttgattgtttttctttagtttgaaatttatgagcttttttttttaaaaaaaatccttgttggttttgtccatatttcaaattcaagatcttaattaaagatatattttttttcttaattgtataaagctaaaaagaggtcttccatctaagatcatgatgcagtgacaaaggaaaatatagccaatatggtcatggtcctacagctaaagaactgaataagctggaatattgtaccaattttaaaagaaggcttttagtggtacgatgacttagtaccttctttcaaaaagtaaagcattttgttttttattgtgtctgtaccagttcttcccacccacagttttggatacattcgtgggt

SEQ ID NO: 16023 - DNA, 1216 bp, Homo sapiens
tgtcaaccaggctggagtgcaatggcatgatctctcggctcactgcaacctccacctcccggattcaagcgattctcctgcctcagtctcccaagtagctgggattacaggcgcccgccactacgcccagctaatttttgtatttttagtagagacagggtttcaccatgttggccaggctggtcttgaactcctgatctcaggtgatccgcccgcctcggcctcccaaagtgctgggattacagatgtgagccaccgcgcccggcctaaacctttttttaatacatatttgtaagagtgcacaactgaaatacttcacaccttcactaaaacatacctacatatttcttagtaaaattttttaagagtggaattctttttttttgttttccaagttaaatctgacatatttagaatgacaagatgttacgtggatccaagctgcccgaacgattgggtgggagatgggagcttgggccacctgctccttcccacatcgccctcctccgaagcctctggatcatcctcctaaggcactgccagacacaggtagaaacccctggggtagagaaccctgctgttaccatgagctttgaaactttcatcttccatccactgacaggtgccaaacaaaaggagacagaaacggagtgaccgccgtgaatgtagacgccctaggaggagaacttgaacaaagtctctgggtcacgttttgcctcatgaacactggctgcaagtggttaagaatgtatatcagggtttaacaataggtatttcttccagtgatgttgaaattaagcttaaaaaagaaagattttatgtgcttgaagattcaggcttgcattaaaagactgttttcagacctttgtctgaaggattttaaatgctgtatgtcattaaagtgcactgtgtcctgaagttttcattatttttcatttcaaagaattcactggtatggaacaggtgatgtggcataaggtgagtgcacggtatgttcagatcacagtgccttatgtccgaatacagcaatatgtcaccgccgcagccggggcgcacgcgtgtgaaacaacaccgagcttgaatgtggaagtctttgaaccttttaccaaatcagtttgttttctttagatttgtcaaaaagttgtaatttgaatataaataattactttaaaattgtaatgacacttttacacgtaagtgttttgttctgggctac

SEQ ID NO: 16024 - DNA, 1579 bp, Homo sapiens
acttttgcttttttttcttttccttttcttttttttttgtttgttttttgttttgtttttcccttgtgggtgggtttcattgttttggttttctagtctcactaaggagaaacttttactggggcaaagagccgatggctgccctgccccgggcaggggccttcctatgaatgtaagactgaaatcaccagcgagggggacagagagtgctggccacggccttattaaaaaggggcaggccctctaacttcaaaatgtttttaaataaagtagacaccactgaacaaggaatgtactgaaatgacttccttagggatagagctaagggataataacttgcactaaatacatttaaatacttgattccatgagtcagtttattgtagtttttgatttctgtaaaataagagaaacttttgtatttattattgaataagtgaatgaagctatttttaaataaagttagaagaaagccaagctgctgctgttacctgcagaactaacaaaccctgttactttgtacagatatgtaaatattttgagaaaaaatacagtataaaaatagttattgaccaaatgctaccaggctctgcagcagctcgggggcttataaaatgttcatagggatgttacaatataattttgtgttataaaatatgccattataattatgtaataaccaaaatttcaacctagagtgttgggggttttttggaaaccgcagtctattagtactcaatggttttatacaccttacttctgacagagcggggcgtatgctacgactacaacttttatagctgttttggtaatttaaactaattttttcatattatattgttgcatccctacttcttcagtcaggtttttttgtgcttacaatttgtgataactgtgaataactgcttaaaaatacacccaaatggaggctgaattttttcttcagcaaaagtagttttgattagaactttgtttcagccacagagaatcatgtaaacgtaataggatcatgtagcagaaacttaaatctaaccctttagccttctatttaacacaaaaatttgaaaaagttaaaaaaaaaaaggagatgtgattatgcttacagctgcaggactctggcaatagggtttttggaagatgtaattttaaaatgtgtttgtatgaactgtttgtttacatttctttaataaaaaaaacactgttttgtgtttgcttgtagaaacttaatcagcattttgaaccaggttagctttttattttgtacttaaaattctggtactgacacttcacaggctaagtataaaatgaagttttgtgtgcacaattcaagtggactgtaaactgttggtatattcagtgatgcagttctgaacttgtatatggcatgatgtatttttatcttacagaataaatcaattgtatatatttttctcttgataaatagctgtatgaaatttgtttcctgaatatttttcttctcttgtacaatatcctgacatcctaccagtatttgtcctaccgggtttttgttgttttctgttctgtataatagtatctaatgttggcaaaaattgaattt

SEQ ID NO: 16025 - DNA, 1134 bp, Homo sapiens
tccctctgcccctcaggtcacccatcctcttcagtcatactgctcagcttcttgtcttaacaagaattgctttccgggcttgtgaattatttttctttgtcatggtttctttatgttgcccaggaatccattccttcattgccacaatcacctatgagagaaacgccttccaaagcatttcatcagtacagcaacaacatctccactttggatgtgcactgtctcccccagctcccagagaaagcttctccccctgcctcaccacccatcgccttccctcctgcttttgaagcagcccaagtcgaggccaagccagatgagctgaaggtgacagtcaagctgaagcctcggctaagagctgtccatggtgggtttgaagattgcaggccgctcaataaaaaatggagaggaatgaaatggaagaagtggagcattcatattgtaatccctaaggggacatttaaaccaccttgtgaggatgaaatagatgaatttctaaagaaattgggcacttcccttaaacctgatcctgtgcccaaagactatcggaaatgttgcttttgtcatgaagaaggtgatggattgacagatggaccagcaaggctactcaaccttgacttggatctgtgggtccacttgaactgcgctctgtggtccacggaggtctatgagactcaggctggtgccttaataaatgtggagctagctctgaggagaggcctacaaatgaaatgtgtcttctgtcacaagacgggtgccactagtggatgccacagatttcgatgcaccaacatttatcacttcacttgcgccattaaagcacaatgcatgttttttaaggacaaaactatgctttgccccatgcacaaaccaaagggaattcatgagcaagaattaagttactttgcagtcttcaggagggtctatgttcagcgtgatgaggtgcgacagattgctagcatcgtgcaacgaggagaacgggaccatacctttcgcgtgggtagcctcatcttccacacaattggtcagctgcttccacagcagatgcaagcattccattctcctaaagcactcttccctgtgggctatgaagccagccggctgtactggagcactcgctatgccaataggcgc

SEQ ID NO: 16026 - DNA, 1234 bp, Homo sapiens
tccttatttaccttcttatccttggccttggctctttcctcatttctgactctgcaagtcacacttatttaagactcttatacatatgtcattgtatctttcataaaatgtttttttaccatcttaacctgcaagcaaaagtaatatctgtttccctctctgtcttactttgtacttagactgaatagtaatctctcttggtgacttagttttattagattcttcttttatactgccattgctttcccagctatttgagaataggcatgtttctttatttttgccctagtgtcagataatcgactctgtaaccattgcttagaagataaattttttttattaattaaagaataatgttaatgaaccatgttgtaatgagttgatactgcataatttttcaccatgtgccaccttgtgtcatcagtcagttttaattactaacaaaagttgattgcctttaggtctttctggatataaggattctagtcatggtattgcagaaagcgcagcactcagaccacagtggtgttgtcattgtaaagtggttattcttggaagtggtgtgcggaaatctttcaaagatctgacccttttgaacaaggtactttgctactccttttatgaccccacctcctacctccagcgaaaatgtccttggcagtgtctcttccaacatcagagagagacaccacttatggtggtgtgatggacacatgttcctggtgatggcaccagcgtatatcagatgtgcttgggctgaacaccaaagagctacaacaggctgttaaagggaatattatgaggactacgtatttttaaatagagtgaaccgtggaccacatagtttggttttatacatgtattttttccctagctaaattatcacatgctaaatattggaacatagtttcctttctactattaagataaagaaccactgtcacttttgaatataacataaaaataatgtatagatcctgtttttattaaattttgacttgttgagattcccacacatttctctttgcttttcaggattcccgagaaagcaccaagagggtagagaaggacattgtcttctgtagtaataactgctttattctttattcatcaactgcacaagcgaaaaactcagaaaacaaggtgagattaggataatctcagctgataacaatgtgtaacgagtgacttctgtgttctgggcatatgggagtgaataaagatgtgtccctgc

SEQ ID NO: 16027 - DNA, 1099 bp, Homo sapiens
taagaccagaaattcttaagtttttcatagaactagggcatatcttaatgagaacttaaaggatattttgataatattttgcaatttcttgattgcattttaaagttatccttcactagctataaccacgaaacttgaagaattgcataaataaaatcaggtagaaaggaaattagcttcttaatttcagagcttaagtagtcaagctgggtaaagtaagcaagttggtatgtccataaaatcacgagtatctgttccactaagaagcctcctggccttgtaggtattgttttcttggtgtgcaagatacatcttgattacatttctgtagccttgcttctatgtgcaaaaaattcacagaactacgttttagcaaggtcattgcatattcgctcagtagcatataatttaaattttttggtctcctgcagcagaataatttaagtaatcctccaacaccccctgcctctcttcctcctacaccacctcctatggcttgtcagaagatggccaatggttttgcaacaactgaagaacttgctggaaaagccggagtgttagtgagccatgaaggtatgattatagcctccaaatttcacacctcggagaaatgtgcctctgccagttgtgtattgtgaaatggcaatagaattgtaaagttctacccatttatcaatattgactgaatgtatttatggttttgtgtttttgcttttccagttaccaaaactctaggacctaaaccatttcagctgcccttcagaccccaggacgacttgttggcccgagctcttgctcagggccccaagacagttgatgtgccagcctccctcccaacaccacctcataacaatcaggaagaattaaggtacaggttatttttttctcaaataattcttagttatttcttcttttaaaaaaaataaatgtatgtatgtggcataatgtctttaggaatagcatgtaaaaacatttgaagagtacaatttggtgaataatcttcaggatttaaagtttataagacattgttaccattaaacataattagtttgcatttttttaagcctacatcatatagagagttaaataatctaataga

SEQ ID NO: 16028 - DNA, 1244 bp, Homo sapiens
taaatagtaatatacagcttttggaatacatttttaaaattgtatgtatatcttgatacgttaaagcatttgataatgccagaggaaatactttcatgtaagcagtaatgcttctgtgaagtttttatagttttaattagaatgagtaacatttctctaaacacgtttaaccatgcagactgatcttggtcagtcgtccatttttgatttgctttaacattagatatagaaatgtatgaaaatgtatgaaaattcttaaattgggaaatgtcttttgttttagaatataaaataactaagctctcaattagtttttaacacagactggaatgagaaaacatttccttagagttcgttataaaactaaatcaacttatttttattctgaagtcttgaattcattttatcgtaaagtggagtgaggcacataatagagtaaaacctctagagtcagcctagctggcttcttattgcagccctactagtccttgtggggaaggttacggaatatctctgaatcttactttcatcataagtaacatgagggtgctaagagcacacttcatcgaattacagtgaggatcacatctgcccagtacatgaaaggtagggctttagtgttttgatgaagaagaaattgccactgttcttctctggaagagaaaactgttaagcacctaatacagtttttaattaatattaataatttctaaacgctcatcacttgatacttgtgtaccctgttttgacaggttcccttttatgggccaggtggtaactggaacacagaacagtgaaggacagaaccttggaccacaggccattcctcaggtaacactgcctgtaatgagtccctctagaatgcacgcttttctgtttcccagcaaactcatgctttagagtaagtcccctgctagagagtagtactaggtttgtgcagaagtaaatgcggatttcaccatatgccatttgccagtggcaaaaaccgcaattactttttcaccaacctaaatagtagccttatctatcagcacagccaaaagtaaccaaaaagacactttactgctttttaaacaaaagacaaattaaggttaaaaaaattggctgtgatttctgaaaaggatttatatacttacgggtaaaaagtcacttgatggcaaaaccacacgctcaggacttttggttttatttttatttacttatttttaactccagaaggacattttcatgtcctgcattttaga

SEQ ID NO: 16029 - DNA, 1179 bp, Homo sapiens
ttaaatactgaggaagaagtggaaaatgtagcagacattggttttgattgtagcatgtgcagaccctatatgcctgcgtctaatggtaagagaataatttaaactgtgagtctgcactcttgtaccactcacttgcaccttactgtccataaccaatgaattagcttagctctactctattttgtctttgtgaaacttactttgacaagtattttatgaaaaatattatttttggttatacatgacttatcacaacttgttataaaacaatttacatgaaacaataaaaagcatatactttagatgtaaactataattttgcttccaaggaacatgatcttgtagttattgacaatatgtcagaatccaatatgttgattgtttcttagccaggttttcctccatgacttgagtatttccttcatcacttcttgttttgttgttgctttaaaaagcacttttaactttagtgttcaaacatttattttaataaaatgagtatagaaacagaaattataatcatatataagtatttaaatacactttaccttttctgaaaagaattacctggatttttttttttcgtttcagtgccttcctcagactgctgtgaatcttcacttgtagcacaaattgtcacaaaagtaaaagagctaggtaaaatttgaaatgctttacttgatttaattaatttactttgcttaatttttacataattggcttaccacttgtcaaacctgcttcaatcatatgggtgttctatccaaattctgtaatgttggtaatcatttccacaatgatatataaaatgtcatccagctttactggggcagtattcctataaatttcagcaagtaggcaacaaaaataacagctcttagaataaccattaatgccatacttgctttagtttcattgatatattactgtgcttaattatcagttagcagaaaacacggcctagttagcgaacagatttcttttagaattaattcaatctcttaatttttaaaataattaataagcctagtatggtgattcatatgatattcttattaaacagtcattcttttgaatatttgtatttaatagcacctgatacaaaaatgtttggatagtacaggaattgttctaaggaacaacagttttgtacatttaaaattaaatctgcaggatttg

SEQ ID NO: 16030 - DNA, 1134 bp, Homo sapiens
gttaatgcataaatcacatggattggttgtttcttttacagatcactaaagtggttcttagcaaaggttggaggtgtcttgagtgcactgtgtgtgaggcctgtgggaaggcaactgacccaggaagactcctgctgtgtgatgactgtgacataagttatcacacctactgcctagaccctccattgcagacagttcccaaaggaggctggaagtgcaaatggtactctagggtttgtttgccttgttagtctttcaagttcagagctttctcataccactttggtttttaaaaattagccacacctatttaattgaataatacacatattctatgatagataccagtaatcagaaaaattttcacatacacattaaatcatttcccccattatgttcgtatgtagcttcctgaattacagtaactgagtaactaagaaaataaaattgagacttttcggggggatttggatttcaggtgtgtttggtgcagacactgtggagcaacatctgcaggtctaagatgtgaatggcagaacaattacacacagtgcgctccttgtgcaagcttatcttcctgtccagtctgctatcgaaactatagagaagaagatcttattctgcaatgtagacaatgtgataggtattgtgctattttttcatctttttaaagcttttctctttgaaatgtagcaaaaaaaaaaacaaatggaaaatagcttttccttaatcacaagttttaggtacagaactttttgccttgtagatttttagtcacctagaaacttacagaagcgatttcctgttttgaattctcaactccggactaaaattttgttttgttttgtttttaaatttagagacagagtcttgctctgtcaccaggctggagtgcagtggcgctatcttggctcactgcaacctccacctccgcctcctgggttcaagcgattctcctgcctcagcctcccgagtatctgggactacaggtgcatgccaccacgcccagctaatttttgtatttttagtagagacagggtttcaccatgttggccaggatggtctccatcttttgaccatcttttgaccgcccgcctcagcctcctaaagttttatgattataggtgtgagcca

SEQ ID NO: 16031 - DNA, 1209 bp, Homo sapiens
gaaggagccgcggccgtgcctggcgggcgggggtgcccgacccgcggagcgcgtgacctagttcgtcccaaagtggatttgacaggttgtcagctccactccccgcccccaccgccttccgggtctccctcctctcggggggaggcccaccgcccgcggtcctcggctcggcctcccattggctctctcgccgcctggcgccccgccctctcggtatcacccttccattggcttgggaccccgcccctgcccctaactcaccctcccactggcttcgtgccgcctggcaccccgcctcagcccagaggacccggcccgccctcccattggcctcgcaccgcctaattccccgccctcgccccggcccgccctcccattggcgtcgtttcgcctagtgccccgccctcgccccggcccgccctcccattggcctcgagccgcctggcgccccgccccttccgcgggccccgctcccagcgcagcccggctctctgcttgtctgcgggttcctgcgggcgttcctcagtgtctgccttcttccttccctcttgagtgttgctcctcttcctctccttttttccatgtctctcctttttctgatctcctcccgtttcggcagcccgagcgctcttgcccggttgcaccccgcagcctgagctgggctcccggtgccggctgcctgagctccaggacctgccctggggccccctacaaccttcccgccgctcccggaacctgacccctctgtgcttcacttctcggttttcttccctgaaataagcagcagcgaatcccttctccaggttttctcatgtgttcagtctgcaaggcttctccctttctccaccctgcgcctcggtttctcccccgcttccccgccctccctaaactcagccaagtggaacagatctcccagcaaaacaaggcagagggcgaggataaaaatgataaatgtcaatatcaacatttttattgctttaggtttttaaaacagaaaattagcaggaacgcccagatcgacccagacctaggatcaagatggagtttcttaaagtaccaagtgagactgcagtgacaaagtcgattatcccagcaatataatcagctttgcctggggaatttacttttactttgtttttatttgtttgtttgctttgagatggagtctcgctctgtcgcccaggctagagtgcagtggcgcgatctcag

SEQ ID NO: 16032 - DNA, 1189 bp, Homo sapiens
ttctaaaaagtgaaataactccccatttagtagtttagtacatcagagaggtaaaatcttgcagcagcggtcctgggagggagggtggaggccgggatgaggagagtgtcttgcctgcttggtagctggttcccttgactttcttctgaaatgagtgtctttctgtctgcctgttgcctctcgtagcccgagttctttcaggtctgccacaccaagaaggactatgaagagtacgggcccagcatctgccgccacaaccccgtctttggagtcatgtcctagtgtctgcctgaacgcgtcgttcgatggtgtcacgttggggaacaagtgtccttcagaacccagagaaggccgccgttctgtaaatagcgacgtcggtgttgctgcccagcagcgtgcttgcattgccggtgcatgaggcgcggcgcgggcccttcagtaaaagccatttatccgtgtgccgaccgctgtctgccagcctcctccttctcccgccctcctcaccctcgctctccctcctcctcctcctccgagctgctagctgacaaatacaattctgaaggaatccaaatgtgactttgaaaattgttagagaaaacaacattagaaaatggcgcaaaatcgttaggtcccaggagagaatgtgggggcgcaaacccttttcctcccagcctatttttgtaaataaaatgtttaaacttgaaatacaaatcgatgtttatatttcctatcattttgtattttatggtatttggtacaactggctgatactaagcacgaatagatattgatgttatggagtgctgtaatccaaagtttttaattgtgaggcatgttctgatatgtttataggcaaacaaataaaacagcaaacttttttgccacatgtttgctagaaaatgattatactttattggagtgacatgaagtttgaacactaaacagtaatgtatgagaattactacagatacatgtatcttttagttttttttgtttgaactttctggagctgttttatagaagatgatggtttgttgtcggtgagtgttggatgaaatacttccttgcaccattgtaataaaagctgttagaatatttgtaaatatctttctgctgtagtgtggtggtctgttggttttctccctgtcgctgtgcctcctttaaagaatattgacattgttttacatca

SEQ ID NO: 16033 - DNA, 1140 bp, Homo sapiens
acagtgtgctgtgggccattcatctgggccccaatgagcttagaaaacaactaagtgaacagcagatcctcagccaggtgcctggccccctgttgacctcacctggggtctcattcactgtcccaccttccctggaccaggcttccccctccactgtccacttaccaaagagtcacaccatttcatctagaaaccctcatctccttcttctttttttctcttttccttctcctccttccagctcctaaaatagaaattaatgtagtcctggcccagcagatgcttcagggatctgcattctgttcctaaatgctcagatactcactaaagacaaatagaagtgttgggtccacagtggatgatccctcagtacatcttgaaataataccttgttaaagaaagaaggtcatatccctgctgaggggagccctgggagcgtgtaagtccatctctgggcagggaagctgaccagagatgcagctgttgacatgcagagagaatgagatgtctgaggacaccctctgccagctcgtgtctgagagaggatcccagggacgtgctggtactgagtttcccctctaagcagaagggaacacttcagattccaggaggacatcgaagatgtctaacggatccttttcctcaccaaagagatgtgttatttggtatttttaataacaccatctgccagtgagaggaaagctccgaattgcaatattgatcttgtcactttggggaacagtttgatatttgggattataaataacattttcatttgctctgttatcatgctcaggcagtgtttgatggctgagcccaagaatattattttcttatcaaatataaagatacgtacttttcctgaggtctgaactctgggttgtgaaataatattgacacatattaaagagtaagatgtattctgaaaccttaacaattcagaaggggtgtaaaatttttctccttaaaaatgaaatcgaggacaatatgaggtgataatagcaataactggctagcgtggattaagaggttaagtcagagtcggattagactgtctgatttaagtaacacgatagcctaacaaggaagcacagcagcactattgttcccatgattcagaccagcaaaccaagatagcca

SEQ ID NO: 16034 - DNA, 1695 bp, Homo sapiens
aaccaaattgtgagccttgttaggtcagagacttgttgcatcctttgtgtctccatcccttagtgctgcttggcatatagcatgagctccataaatactggatcttgaatagagctgtcctatgcaagtcagccaagtcagccatgctccatgagtgtacgtgatgcattggcggcactctgccacgctgttactttactaactgtcatggaaaaccaagcttctaaatattatcaatcagtaaaaacttaggtagcaattattcatttcataattttccataggattactagctctacttttgtacttaaaatatcattttaaaaagttaattttcagccaagtcttttaagactcctgctacaggtgtgagaccttcctatgatcactgctgtatggttccttttcacttttgcctcatgtcctctgtctaaaagatcaaacgttgcttctgtataaaattgtaataatagttgctcaacatttcaactgcattccttgactgagttttttctaaaatgcgtaattgtaggaaatgtgataaaatttacagctttgttttgtgtgtgtttctgctttcctcgtaggagaaatacgaatgtgctttaaagcgagcaagtattaaaattgtgactcctgactgggttctggattgcgtatcagagaaaaccaaaaaggacgaagcattttatcatcctcgtctgattatttatgaagaggaagaagaggaagaggaagaggaggaggaagtagaaaatgaggaacaagattctcagaatgagggtagtacagatgagaagtcaagccctgccagctctcaagaagggtctccttcaggtgaccagcagttttcacctaaatccaacactgaaaaatctaaaggggaattaatgtttgatgattcttcagattcatcaccggaaaaacaggagagaaatttaaactggaccccggccgaagtcccacagttagctgcagcaaaacgcaggctgcctcagggaaaggagcctgggttgattaacttgtgtgccaatgtcccacccgtcccaggtaacattttgccccctgaggtccggggtaatttaatggctgctggacaaaacctccaaagttctgaaagatcagaaatgatagctacctggagtccagctgtacggacactgaggaatattactaataatgctgacattcagcagatgaaccggccatcaaatgtagcacatgtaagtcactctttccgaaaaaaatgtcagtattggatcttagaattggatttcacagtctatttcaatgtagtttattggttttgctttttcagaccaaataacttacaagcagtatttgtgtgagaacctgtttacttgtgtgtgtgtgtgtgtgtgtgtgtgtgtgtgtatgtgtatatatgtatatttcagggtcattgaaaaagggtaacagcgtattttaagttgaagatttaaagcagctgagtagaaccaggatgtcagtgatggagtactatccgttgaagggtttccactcttacttagtttaaaattagcaatggcagcaaagagaataatgaagtttaccagctgtacctgatttgcttataatgaacttcatggtagtaaataaataacacaaattcatgcatttgttgaggaaggcttgatttcaggttacagtttatatagcatggagcttattgat

SEQ ID NO: 16035 - DNA, 1221 bp, Homo sapiens
aggtgtcggcggtggtggggcaggatgggtggcagttcccctgtcctaaatgtgggggtcagcagtaataagtgtgtaaacctggaacttaaatgtttatacataattttaaaaaaatatggtagtgcttcattctgtaattggatttttcatcttgggtattagtaactaatctttgactataatatttctatttgaatattcatacttgtaatctggatgttttaaaataggttgtaacagagacttttaatttctaagaacaacactagtaaaataatatgccacttgtaaattgagaatactttttgatttaatcttttctttttcagccttcttgggtgattctgtccgttcagtgtggaactcttctgccgtatccttttttttgagtgggggaggagggaaagggtaactctgggtttaagactgaaagaaatgatagttaatggagtgaaaagtggattcattcgttaggacagattgttttgtctacatcttatattcctactattttccatcctgtttcaaattttatgtacctgatccttgttattactcatgttaaaagggggctcagctgtgacaagtaactctaggccgggaactggaggcaggagctccggttctcttcagcttttgtggtgctagctagatgagggatatttctaaaattctaagtctatgtgaatcaaatcatgaattgtttgaagagtaagttggggaagagaacatgagaataaaatttataacatgcattgttaatccttttaattgcattgggtagaacgattattaattcagtgcacctgtgctgtgggttgagtactgaaaatagaggggtgaagaagaccatttctgccctcagggagcttccttgcttgcattgttcgttcatggagcattcatagatgtgcccttgccctggcactgtgtcaggagtcagaaatgaggcgttctacaggcctcctgtttactcttctaggcctggtggctcccttttcatcctaaaaggataattcttcatgggactgttacttcaagtgtaacttgcttgtggaaatcatttcttttgcaagtacctgataccatacagttgctaaaattttagacctggcaagagattatgtcatgtgctctattttattttgcagctatgccaggcagttctcttgaaagcacttattacccattgaatcaatgcagatggaaggaaactta

SEQ ID NO: 16036 - DNA, 1059 bp, Homo sapiens
gtactgggtggtggcaggagtgtcagagctgtgatgtgacagggtgtggacagatgctaacctttttattgtaagatagaaatcacaccggatgaaaagacaaggtgaactacatagtcatttaagttctgtgtgctttaggcaaatgtggatattaaatataaggttacatattgctcatattaatatgaataatccctgcttgattccttcctgtgtttactgagacatgttcaactacactaaataatagtgatttttaaaaaacttttccaaacagtacaattttgtgggagtggtactcaaagagaacaagaatataaaatcactctgaagttatagctgataattttttctaggaaaaggactggtttgagtaatgtactgtgttactaatgaccacgttgaaattctggaacttgaatctgctgtattctaacattgtcaacttttttaaaacagctgttgttggcctactgtacccctgtatcgacagtcacctcggagaaccccacaaatttaagagagaatgggccagtgtcatgcgctgcatagcagtttttgttggcattaaccacgccagtgctgtatccttaattttctgtgctacgtccagagtatcttcttaggttatatattgaagcgttttgttttgttatatactcaaatgactccatgtcataatacagacatgatggtggtacctacccatttcagattactaaaaagagaaagaagaatggggctatcgatgacttcatagtaaaatatattgttttatggtcaaaataaatatatatttatttatatttttatatatattatatatatttttaaatatatataatatatataataaatatatatttatataaatatatataagcactttatatatagctttcagcaagtttattcttatggttaagtttttgactcagtgatggcagggagatttcaggtgatcttaatgattactgtaacctgtatccaacaaatcctttctttagcttattacacagtttttatggacagtgaattatctgtggtacaataata

SEQ ID NO: 16037 - DNA, 2843 bp, Homo sapiens
aacctatcataccctaagcatcaccatgctttgataaaattgggtgtttcctttatatagatattaatttagttaaactttcaccaatatcttacacttatataacaggctttatataagggcctcagcagcgtaatttcacctgaggcagagaattatcctaattttgcaggtgagagctgtggctcacggggccagagccatgaagacggtgcaggggagctgggagagctggcctcggtctccagttctctgcacatgtcccacctctcaatcttgttgcttcagtcaaagaaagtgtcaatctttcccatgttaggacctacttaattggtaattaaaatatttatacatttagtgctaattttctctttccttttttttttcctttctacacatagggtgttcctgaaaagccccatagtgattgagtcttcaaaaccaccgattctgagagcaaggaagattttggaagaaaatctgactgtggattatgacaaagattatcttttttcttaagtaatctatttagatcgggctgactgtacaaatgactcctggaaaaaactcttcacctagtctagaatagggaggtggagaatgatgacttaccctgaagtcttcccttgactgcccgcactggcgcctgtctgtgccctggagcattctgcccaggctacgtgggttcaggcaggtggcagcttcccaagtattcgatttcattcatgtgattaaaacaagttgccatatttcaaagccttgaactaagactcaattaccaacccgcagttttgtgtcagtgcccaaaggaggtaggttgatggtgcttaacaaacatgaagtatggtgtaataggaataatatttatccaaaagatttttaaaaatagggctgtgtttaaaaaaaaaaacaaaacaagaaaagcagcagtgattatagagaggtcacactctaagtggggtcgcggcgtggccacgcttcacggtcacgctcgtccgtcctgcagtggcgtgtttacatggtcacacgtgtgtgtatcaccagtgggtcaactgcttgtcattcctcccgtggcagtttgtgtagacaatcttactgagcaaaaggcaatgaaaagtcttggttcccacactgcgatatattggaattttcacctcagtttatgaagtttatttcgaaatccatagtcatctaagaatgaatacctgtctgccatgtatttcaatcttagtgagccaaaattgtttgtttgttactacagaatagagatgactgttttttgccacagccctatggaatttgcaatctgtgattgccttgtaaaaaggagagtgcatatggcactgcattaaacgtgtggtgtttctagtcaatgatattggtgagcacaatgtattcatttaatggcatagaccataccagacctaatttgcaagtattgggtcttaaacttcaagtgcaatgtatatgaaaaccaatctgagccttgtatctcttaaatatttattttttttaacgtgtgagatgttcgagagaaggttctccattcatttcagtgctgcctggaggaaactcggcaatgatttctttcagttgtgaagttcctttcgtgttacaccctccactgaaccctcaaccttcgaaatactccagttttgtgggtttggtcatttttacttataaatttacctttttgtattttgcaatttacatgtgtttggtttgttttaaattctgtgaaagtggcttgattaaaagactccttttaaatggaagccaccagtcagcagaatggaagcttagaggaacttgcctgtgagcgctggtctttgtgtttggttttgtgatgtaacgatctttgctggggttttttgctttgttttgagggaaatgtcttggagtaaattttaagttcctggagttaatttgttttacaggaattttgttttttaaaaaaataggatcattctgaactttggaatgacccccttatatattttctgaaaatgaaaacagttacatgaaaaaaatttccaatgaagatgtcagcattttatgaaaaaccagaagttattagatgaaagcagcgagtgaatctttaaaacagacttgatcacgcacacacaataagtctttctctccgaaaccggaagtaaatctatatctgttagaaataatgtagccaaaagaatgtaaatttgaggatttttttgccaatagtttatagaaaatatatgaaccaaagtgatttgagtttgtaaaaatgtaaaatagtatgaacaaaatttgcactctaccagatttgaacatctagtgaggttcacattcatactaagttttcaacattgtgttctttttgcattcattttttacttttattaaaggttcaaaaccaagtgttgtatttatgtttgctttttaaaaaacagttggggtggtggtctctgtgtaggatgttagaatttgtaatggagaaatattttgcagttcttcaaattttactgaattttgacacaacctcttgggaagtatttgaatcatccttcaatatacacaggacattggttccaggataccccacgtatgcgaaaatctgcatactcaagtctggcacttggccctacggaacctgcgtacactaaaagtcagccctccgtatacgtgggtttcacattcagcaaataaaccatgtttggttggaaaagctccatgtatataagtggacccacaggttcaaaccctgtgttgtttaagggtcaacagtatgtgtttttcttatggtagaaagttttaagtgcagcacgagctgaattgaacctgccaccttacccctcctcaccaca

SEQ ID NO: 16038 - DNA, 1291 bp, Homo sapiens
acagatcaagatttggttccagaacaagcgcgccaagatcaagaaggccacgggcaacaagaacacgctggccgtgcacctcatggcacagggcttgtacaaccactccaccacagccaaggagggcaagtcggacagcgagtagggcggggggcatggaggccaggtctcagtccgcgctaaacaatgcaataatttaaaatcataaagggccagtgtataaagattataccagcattaatagtgaaaatattgtgtattagctaaggttctgaaatattctatgtatatatcatttacaggtggtataaaatccaaaatatctgactataaaatatttttttgagttttttgtgtttatgagattatgctaattttatgggtttttttcttttttgcgaagggggctgcttagggtttcacctttttttaatcccctaagctccattatatgacattggacacttttttattattccaaaagaagaaaaaattaaaacaacttgctgaagtccaaagattttttattgctgcatttcacacaactgtgaaccgaataaatagctcctatttggtctatgacttctgccactttgtttgtgttggcttggtgaggacagcaggaggggcccacacctcaagcctggaccagccacctcaaggccttggggagcttaggggacctggtgggagagaggggacttccagggtccttgggccagttctgggatttggccctgggaagcagcccagcgtaccccaggcctgctctgggaagtcggctccatgctcaccagcagccgcccaggcccgcagcctcacccggctccctctcctcaccctcctgcacctaactccctcctccttctcctttttcctcctcttcctccttcctccttcctcctgctcctcctttcttcttctttttcttctcctcctcctccttccttcctcctcctccttctctttcctcctcctcctcaccaagggcccaaccgtgtgcatacatcgtctgcgtctgtggtctgtgtcgctgtccccagtcccaccgcagtcctgccgcaggcctaaccctcctgccctgggcactgcctccatgcagaagcgcttcgaggttctggggctaaaggcctggggtgtgtggcctaaagcccaagagcggtggggcgaccctccttttggcttggccccaggaatttcctgtgactccaccagccatcatgggtgccagccagggtcccagaaatgaggccatggctcactgtttctgggcgggcagaaggctctgtag

SEQ ID NO: 16039 - DNA, 1163 bp, Homo sapiens
gtcccagctacttgggaggctgaggcaggagaattgcttgaacctgggaggtggaggttgcagcgagcagagatcacgccactgtgctctagccagggcaacaaagtgagactctgtctcggggggaaaaaggatgggactgcaaaatgccttgtcgtgtgagggcagtggctacgtttcacttcagctgctttttagcctcagtcagcacatatcagtggtctccgatgaaaataatttaaaatttactgttaacacttgcattgtgtcataacggaaagcctgttcttatttatcagatctcactagtgggttgtgtgtgttgctggttgtatcgtacttgccgctgctagttgggtgtttcctgcgggtgaagcacatgctgtggcagagtttcattgtcacatcattctttcctgttctctccctagacctccagtttgggctctcggaaagtaactaacacatacacattttttcacatagagctttcagcagaggccaaggcagcattgcttgaatttgaagaaagggagcgacagcataaacaaggacgctacagctccaggcggggaggacggcgaggaggtccgctgatgtgtcgtggtgtgggggaccagaggagagagagcaccgagaggggcaggatgaaggaccacagacctgcgctgcttcctacacagcctcctgtcgtggtaacttcagattttcttgtagtagccctagaacttcagaacaaatggcagtaagcttttgtgggtatcctagtatacatttctctcttcttagtctgaaatgaaaggttagtagcaggggtaatggctgaagtttctgctttatagtctcatgtgatgttgcatatagtcttagaaattcagcactccagtcatctggtagtaagaaatcatcctgtaccacagatacttccagaggaggaattaatgagcgacctgatgccctaagatgacataagctgttggaccttgctacctaaagcctctagagaggtatttctgagtgcattacatttgagagatgttattacagatagaatttaggcagaagttgtttattttataaaaatatctttacctttttactgtttaccatagattttttccttaaatggcagtttctcagaattattaacatgtcctccatac

SEQ ID NO: 16040 - DNA, 1172 bp, Homo sapiens
acctgttcccaacagtttcagccagcccccacgactccctctccaggaccagtggagagccccacccccgcctcaggatcgagaccctttcttcttaggaggtacagaaagagtgagtggtgtggagtaacaacagaagctgcattgggtgatgtgcccaaacacatttattttgtaaactgaattgaactcccagttggagatgttaggaatgccaggtttttgtaccatagcagttctgcctgtcatttcaggtgctaaaattggacattgttggtatctgaaatcggaacatctcatataaaagggaatttatgtatagaaaatgacaaatgaagcaatctagaaataagaggcaaaatctggaattgtttccaacattcataacctgtcaacacttgtgacttctgtccacagtaggatagtgcttcagactgcttttctgagaagcacatggtctttttaacctgaagttaatgatgttgtgttacctttcagtttcaggtgaaccaagattcccgagccatctttttctggaacagcgaagtccccctccaccaccaccgcctcctacccttcttaacagtagccatcctgttcctactcagagtcctctaccattcactcagccaggaccagcatttaatcagcaaggacagcagccagtgttcccaagagagcggcccgtacgaccagccttgcagcctccaggtccggtggggattctgcactttagccagcctgggtcggcaaccacacggcccttcattcctcctagacagccgttcctgccaggcccaggacagccgtttctgcccacacacacacagcccaacctgcaggtaatgcatcctgagtgaacctccagggaaaaaatgtgtagcttcaaggctttgtgttccataaagtttcagatttttatttgagcctactaatttgtggttatttaaagaatagagtattagtctcaaatgtactgtttgttaaagacaacttttttcaacaatgttacttatctcaatacaagaaaaaaatgggaaaatgtcattttttgggaattgaaaaatgctacttattataattgtttaaagggtatactactaataaaattaggacatgttttgataatacatttgctcatctgtataaaatttcatgagaggtttaccagt

SEQ ID NO: 16041 - DNA, 1213 bp, Homo sapiens
aaatgtgcagccacggctgaatttctggttgcagaatctgcctgggagggtttcagggtagcaaatgtagtctctgccagcggagtcaggtacatgatgctgtggcttgttgtgactgtaaggtggacttagcactgtgcacagcaggtcctgcttaaaccagcctatactacactaggagaaatgggggctctgggactctcaggacaggatccaaattctgaactgtcatttgcagcaagtttctcagccctgacgggtgcctgatctacacagaatgatgatgacacagagtgcccaccgagcacaagcgtgtggcccctggagaggtgcaggcttcgtcagctccctcctcttcctccgcctacacttaaacttgctggatatagttgtctcatttagctattaaaacattctctgatagtggatagaaaactacagaaaatcctgtagctcatggtatattttaatggattctaagttatttgttcacttttatatcttagtgactatcgaagaagctcaggcttgaaactctgaatgtatttcctttgttgtcaccaggccatcatgcacggacgaggcagaggagtggccggtcccatgggccgggggcgcctgatgccaaacaagcagaacctgcgggtggtggagtgcaagccccagccctgcgtggtgtctgtggaggggctgtcctcgtccaccacggatgcccagctgaagagcctgctgatgtcagtgggacccattcaggtagccgcctgggggtggcatctgtgccacgggtagttgtgtcccaagacaaaatcatttcttgatttaaaacacagtgccctttgtgttggctacttcatattaaaataatacttgggaagtaagacaaataacctgttgtgcatacttagtatcagaacatttgcctcaaacgtttattttgaaattttcagattcttagttataaattttaagaaataaataccccagctgaacagattatcctttgagatccttttaattgtcatagaaggttcacacttgcacacatacatacaaaattttttgttctatcaaatgacttgttttatttgtaataacattacattttaaagtatttagccttcttttccttgctttccagaaatagcttcatgtgctaaatagctgtgacttggtttagattttacaaatatgacagtatcttggattgtatctt

SEQ ID NO: 16042 - DNA, 2600 bp, Homo sapiens
ttcagtgcaggttagaagagtcttctcaaccaagcttaactcgagttgtcttctcagccctcaaaaggctcttgtacaaaatgtagattaaaatttgggtgattgttgattgacctttgcataccctggaaagccagggtgtgagtggggtggttgggagtggtgccagttgaacagcagattctgcttcttgtcactgtttcaaaagcgtcaactctgtgttcctagtttcgatgaactccccattcatttttaacacacttcccagataaggcaatgtgctggacaggcacacggcatggccctcggctagagcagggtctgtgatggcctcacctggcagccctctggcctagttcccaccacacatgaggtggtggaatggcctgaaggtggaacagacctgtttttttcctttttaaatgcagtaaggtggcctgtttatcactggctctgtgatacatgacattctttgggaatttggtggccactgcttcagtcacctctgtttttctgaaggctgttccagcagggctgccctgttcatcagcggatgttcactctggcctgccgttccccgtggcatgcggggtgagggtggctttcttccagccccaaatgagacgagtctgtgtcatcattgaaactgcttttcgtaattgcgggtaggttcctgtaggtgagacatattctccataaagctactgtagtagaattcattctgggcaaacactgaaaaaagtgccttacagtatttctgctcatgaaagagtttcactattttggatatattctaaagtggacctgagctatttgagcaaataatgatagggcatactcagacattttagctaccttttatacctacgatttcatgtcacatttactaatagaattaagggaaatagaagcccgttctttcttactgcccctggagggagcatggcgctagggctctcagcctcctagaaggaagggactaaggagacgggcacagacttgcgtcatctcgtttccacagttgacgttttatattactttctcaaattaagttaccaaaacaaactgaagagctgaagcaggtcttccagaccctgcgatcctttctgtagcagtgattctaaagtggcgtttgctgtgtgcttgagagtaacactgcacgctgcaggggctgttgcagcagtcagtcccaggaagccacagcgcttgtaggatctgctaggaccctgcagctgtgctgccgccacctctgctccagagtgtcccagccaaccctcggaagatgggattgccagtcagccctgcctcaccatgcctgcaggaggctgtccagggagcaggtctgtgtgcccatcagcaggttcccatggctgtcactgcccactcatttccacagttagatacggatgtgttgatgtatttcgtctagtttatttggctcagtccacagctgcgttggagtggtgactttggtagcccttgagctctaattaagagagatccaaaccactcagtacccactgggcagtgggaaggcctaccgacttactttatcattgagggcttactgatacaatgaaatgagtttcatgactttttttttttttaaacactttttgaaatagagtgtgctgtgtttaaaaccaaaaatatgcatgttgtctctgaaaagtaggcattgaaacagacttttttgtagtcagtgttaataaaacggatcctgtttgggccttcattgttaaggtggacttcatggccactggaaggtctgttttggtgttacctgagtgtgacacaggccctggggtgtgcgtgtttctctaactgtctacacgtgcacataggcagactttctcatagaatgttcttgaaaggtgattggcaaagtcatgcaggcccgccttaaagcgctgattagaacagtccaacacagtccgacctcactcaatacccacaaccatcgaaaatggattcttagtaccagacaatcccagtaatgaaggtttagtttccttgaaggaaactacagaaaaggaaagaagcagaatgagaaaggaatggtacttaggtgtttggtatgctgctcacgtgaagtcagcccacaccagccaaaccctcgtggaagatctgctgcaaccattatctttgttcttgagttcatcatgcatttaaaatgagatgcaagagcatttagcataccatgtaaatatggaccttttaaaattaaaatactattggaagtgctttcaactcagccacatcttagctattagttctttgtgttgtcttatcaaagtttaatggatacagttccacagttgttgatgtgtttgtgtgtatattcgatttttataaagatggtagtaagtcaatacatttatcctgatctgtgtattatttgttcacaaattcaagaagcttaaaggtcgtaaatatcagtatctcataaggtaaaccaatagctgattatgtggagccaagttacttcttttctttttgcattatcttgttttggttttgtgctgtaatagaagttcacttagctactttagataaccttgcattaccactggtctggccacgtttgttaaatccttata

SEQ ID NO: 16043 - DNA, 1285 bp, Homo sapiens
ggcagttcctccagagagcagcagcagaggaggtgtaaggatgttctcaggcatctttttcatcgtgactcttgcttcctgtgatcagttacagccgtcctgtctcggtagagcatgcagtcagccatcctccccatgtaagcagcacgagtgcttgatttttaacatcagcatgagttccgtcgaatgtcgaggggcgttcattctgacctcattactcatcacttgctagtgactgtggcgtgtatgtgaagtaggttaggtctggcttgaggctgtcccactagataatagttacatattttaaattaggatttattcattagagcatctcacgtcacagaagtgagaaagtccatagaattcgatctaacttgtactttacttgtagcacactaaatatgtcttaacctgatttcattaagggctattttatttatttttaacaggaatcactagatttgatctacttggcgactttggaaggtttaattggctgggaaatttctatattgtattatcctacaatttgctttttgctattgtgacaacattgtgtctggtccgaaaattcacctctgcagttcgagaagaacttttcaaggccctaggtaatcctgaggtttatgggtattttttcctctttctactaaataattttgacatttgagttaatattacatcttcagctatttagtttcccaaatttgtaaaaccttagaggtcaaattattgatcccctactttgtgcaaaattccttcattaagccttagcttccttatctgtaatacagtgatagtatcatcttcctgttagggtttttgtgaagatcaacggaaataattctgtaagatccttagcatagcgcctggcacatcctaagaactcagtaaatattagcccctttattatgacgatggtggtcatggtggtggtgaggatgatacggtgtgaaaagcttatctcttggtaataataccttttagttaaagcttttttgaggcttggattttgcaagtattaggctaacccataagtctcttcattaagccagagaataaattcaagatgaaaacgttagcattcttggcattgatgtaatagaagagaggggatttactgttatgtgttccaagagtcacatgtattgtaatggtgttaaaaacgggtaggtttagctaaagggtacaaacgtaacctatgaatgtatttttatgcttatttccacattagtgctaaacatatttcaagttttatactttaaaaataccaggacaaagtaaa

SEQ ID NO: 16044 - DNA, 1205 bp, Homo sapiens
cttgggatagtgtgggtagcttcagcactcattgacaacgatgccgcaagcatggaatctttatatggtatggatttccttgttttaaccagtttccttactggaaactgtagtttgggatataattacacactcaattttaaaaacatttaaatctttgtgtagttaacaaagatgtttgatgttaatttacagaattaagaaatctttagatatttttatctaaaaatgaagttttatttattttatatgtgaagaacaagtaagcagcttttcagattttttttttttgtttttgttaattggtttctgttcttcaaattccgtggagacattttttctccctccagacaggttttgctaaagggttacttcttggttttctattttagatctttttattgtacaatttagaaattatatggcttaataaactaaaataggcaattacaatgtttacatgaggtacagtcagcctctatcttatcgtaagatagactgactatcttaatgtgcagtattttggatttattaaaatatatttacttttttttaatagatctctgggagttctatctaccctatttatattcctgtatatcattgatgggatgtttgttacttctctgtaagtatttttcagacttgatattaagagaaaagtagagttgtccttattctggaaaattcagggaagttttctgatgagatttcttaactatttggattttttttgagttcgccttaactatttttattcaaaataaattttgataaatggaaactttgaaataataagatgcttttattgttctctaaggaaagcttcttctactgggttgtagagtgagacagacggacagacacacacacacacacacacacacactcacactcacacactttcacacactcatatacagtcatacttacatacactgacacacaaaccatgtgcacactcatacacacatgctatagcctcacccccatacctgtcataatgctagattctacttttaaatggaaatggtagaattatgtatgataagtttgtggttttttaaaagtttgttttgttttacttgaagcatcacagcctatctcagggataagtagataaatgtagtttaaaggacttaagactatggttgtcacctttagatattcttgtttgtttctcagtcctattaatacttgaaatt

SEQ ID NO: 16045 - DNA, 1167 bp, Homo sapiens
ttgttaatgggcttggagtttctcttctggggtgatgagaaagttctgaaattgattgtggtgatagttgcacaactctgaatgtattaaaagccacataattatataccttacatgagtgagttttatgctatgtgaattctgtatcagtaagaagttgacatttggggacatctcagagggtatgtgggaattctttgtgctgttcttgcaacttttctgtatgacattacttccagttttaaagttaaaaaaattacaaggccagtggtaggagagaggatgtccagagcaggtcgcggggggccagggtgggagcaggagcgtagtagaggccggggtggccgagtaggtgtggacggtgcggaagggtgaggcgtgtggcgagcagaagggaaaagagatctctggggagtttgggttcccacttgacgttgggggacacatttccattttgaagtattatgtagccctgagtaagcggctgagactagtttagactgtctctacctaaaggctgtcctgactttgtatcgtggcggtggcggccatgtgcatcaggtgtggtagatttcttgccaacttgaatgggccgtttagactgtttgaaatgatggactttccattttttcatttttcttgaagattcggtttatgctagagacgatgttggccctgaagaacaatgacatgcgcaaaattccaggctatgaccccgagcccgtggagaagctgaggaaactgcagagagctttggtgagtcaaggaactttcaattctgttttgctcagagcttccgtgtcggcatgagcctgtcatgaaaatcaagaaatagtcagacctgcacgtcagggtggtgtctggtgagtgagagtgctcagaggcagagtgaacgcggctcggttttcctcaggggctgtcccagtggtctgggcgtgctcgtgcagaatgtccgtgtgtggggaagcccatgttgggcgagcgtcctctttgcctcaccccgggtgctaaacttgggctgcaccattggatcatccgatgctttcagagaaggccaagtccccatccggaccaaggaaattgggatgacgtaggtcctttgactctctctgacatgcagccaggatggagactggggcagcctccctgttggagtgagtctttcag

SEQ ID NO: 16046 - DNA, 1149 bp, Homo sapiens
actgtatacgtatgcctcagtttatatacttacttatcctactgatccgtgtttatttctgattttttgatagttttctagggcagagatatatatggattagtcttctagaagtaaattttatatatatatatatatatatatatatatatatatatatatatatagttttaattaggggatgggtacttttgggaatggaggtaatttatggttcagttctagatactgaatttctgattcataaggtgtatgacccgggaattccacttacactgctgagttgttctcaacggtggctgtggccggccacacctctgccagcagtgtgtaggaattcccaaggcccacatccttgccaacaggtgttcatttcttagctctggaaatagcttcttaaatcgggtagagtgggggaaggggggagattaatttttactctaattaactatattacaaatcattgaaaaagttggctaaatcagtgtaactttatttttctccatgtcctgaccattaggtagttgaattcagtgaattggacaaacccagagtccgttttttacgaaaagtattaagtatcctattaatggaaacagaagttgaagacctcagtttaattttcacaaggtatgtgccccaccctttccgacgagacatggaagagaaatgaagagattgttttcacttgtgttgatttacaaacacaaggttgtactatacgtgtagcttaatcttttcggttttatttttaagctggtatgcattagatctggggaatagaaacttgtctgctagcaaactaacaatgattgttaataataaaatatgttaagaagttcttaattgagaattttatttttaaaagaaactggttatgtctcactatgcgagatacccaggattgagatctaggagaggccagctcagccctgacatgtgtttatacgattcctttccagagtatctgacaacccaaagctgggggtgttacgtgagggtttgaagcttttcatcagccacttcttgctaaagaacgcacaggcccacagaagcgccgacgaagccaacgtgctgagagagaaagctgaccttgcaacgaagtgtctgcaaggaaaagcttccctgagaatgtagtcagggaaggaa

SEQ ID NO: 16047 - DNA, 1628 bp, Homo sapiens
caaagcaaatgtggtttcgggaaaatgtgactgcaatggtaactttactgattggagcaggcacattttgtgtactttgtattaaaactcatgtaatgccatgcttgttacagtgacatcttgcacacatgctgtttttcaggagttgtatcccgcattttgtattcacaacggaggctccgaccttgagcggctccccacagccagcacctgcatgaacctgctgaagctccccgagttctatgacgagacacttttgcgaagtaaacttctctatgcgattgaatgtgccgctggctttgagctgagctgaagctgatgctggggtcagacccctacagagaaccagtgcttccttcgtcagcagcgcctccccagacccacgaggatactcacactgcacgcctgaggctctcctaagctccttctttcattctgccattcctccctcccttccttttttaaatgatttttattacggtgtggtcacttatttagatggacattgcttttcaaataacttaaaataacacgttatgtgccatgtggctactttagtaatattgccaagaagagcacagtttttacactagtggcatctcagtgaaattaaccaaagatgaagctttggctttgctggtgagatcagagccctcctgagcaggcagcgccactccagggttcagacagggctgcacaggcggcagagatacagggtctgagggctgagacgccatggggccgctgctgcttatgtggttggattgtttacaagcctcattattaaaactgaaggcattttttttttctgctgcctttcccaaagtggttaggtttggaaaagagatgatgatggtaatattttatttgtgctttttaagccatttccccaaatgggactagcatgcttgttttcagtataccgtggcctgcctcatgatggtttggagatactgtctgtggatgtgaggtggggacttcattcattgtcctatttctatctccactttgtgcctggagagctttcaggggaggtggaggaggagggtctgccaagctactgcaacatctgtcacccactatacccagttacttgggggaggacagacactgtggtgtcattaaagttgtttgaaccaaagtggcggctgcatctttgtcccgatgctagccgtgccggtctcccatcatccgctcgccctcctttcccctgggctgcgcccacttgtcttcctggatatttgggggtgactcgccatgcttggcaccctctgcttcctggtgctgctctgactcgaagacgggacagtccctggtgcacatccagggaagaggagtgtcggtagttcttgcagtaggcactttatcaggacctgacctgttgctgggtgattttagtctctacaaacagaaagcgtttcaaagcgtcagctgtgggagcagagtgaccctttgctgatgctggggggaggggatctaaatcctcatttatctcttctatgtctcgtattttactgtcactggaggctctgtgggctgtcatagttaattgaccataattagcaatatacttttaaagtgggaaagctgaatgacacttttaagacaatgaacattatcaaaacaaa

SEQ ID NO: 16048 - DNA, 1192 bp, Homo sapiens
ttaattctattttaggaaaggaagatgtgttgttgacaggttggcttcagccatgtttttacagcctgaaaattacttatattcatggtgtatttcagtaatgtccttaaacaacttagttaccctcacacatgcattttctttaccagaaaggtttttaaatgaatttttttcctacagaattgtcgagaacggtcaagaaagagtagaagttgaagaagatggccagttaaagtccttaacaataaatggtaaggagcagctgctgcgcttggataacaagtaattcaacgcacgcacttaacagaaatgttaaactataacaagcaccatttgaggattaacaggaacatttttttgaagatttcaaacgaactcgactttcagtataattgtacctaaagtatttataaacagctcatcggagcctctatttgtcatagacttttgagttgattgttgggaccacataataggaccattttttttttgtctttaaaattgttgtaaatctctgtatgcactttgcttttttattaaacgtactccaaggtgagtcttgactctttagtgtaggacaagattgtacactaacaccagcatggacctgcttttcattgtgtctgaaatgtgagccacgtagtgtcggcctgctgtgaagttaacattgccaggacgattcttctacagaaataatttcaatttttttcagtatttagtagtgaaagatattaatacattaatggtaatacatttctggtttaatataaattaaggatgttttctagttgtgcatgaatgctggcaacttagtaagttttgacaattgtttaaatatgtaatgttaagcttaggtttaaaaaagtaaagctggtaaactgggtctttgtcatttgctttaaaaaaaaaaaaaaagaaaataaatgcgaatgtgttggtgcattcttcctgagtgggatctggagcttttttgtgtctgtgtatgatttgtgcctgggcttctagtgtcactttaatagcgtttcgtgctgttcattcaggtggatgccgcacctcagttacatgtagacattttcttcagtatatttgaagtatatgaagattttcatattgtaagttgtgatttagcaattgatcaaacatttaattatggtaacatttctacaggagagggaagaaaccattgtataat

SEQ ID NO: 16049 - DNA, 1216 bp, Homo sapiens
ctgtcctttctaaggaaatctgagccttttgcttttttttgctaaacaatttctttctgcgaaatggcccggggagctgatgctgcgttgggaaggggggacgccgctttcatctgcagggagccgacgctgtggcaggagtcggggggacgccgctctcattggcacttctctcgtttctcgccctgcaggagcagtttgagttcgcgctgacagccgtggctgaggaggtgaacgccatcctcaaggcccttccccagtgagcggcagcctcaggggcctcaggggagcccccaccccacggatgttgtcaggaatcatgatctgactttaattgtgtgtcttctattataactgcatagtaatagggcccttagctctcccgtagtcagcgcagtttagcagttaaaagtgtatttttgtttaatcaaacaataataaagagagatttgtggaaaaatccagttacgggtggaggggaatcggttcatcaattttcacttgcttaaaaaaaatactttttcttaaagcacccgttcaccttcttggttgaagttgtgttaacaatgcagtagccagcacgttcgaggcggtttccaggaagagtgtgcttgtcatctgccactttcgggagggtggatccactgtgcaggagtggccggggaagctggcagcactcagtgaggccgcccggcacacaaggcacgtttggcatttctctttgagagagtttatcattgggagaagccgcagggacagaactgaacgtcctgcagcttcggggcaagtgagacaatcacagctcctcgctgcgtctccatcaacactgcgccgggtaccatggacggccccgtcagccacacctgtcagcccaagcagagtgattcaggggctccccgggggcagacacctgtgcaccccatgagtagtgcccacttgaggctggcactcccctgacctcacctttgcaaagttacagatgcaccccaacattgagatgtgtttttaatgttaaaatattgatttctacgttatgaaaacagatgcccccgtgaatgcttacctgtgagataaccacaaccaggaagaacaaatctgggcattgagcaagctatgagggtccccgggagcacacgaaccctgccaggcccccgctggctcctccaggcacgtcccggacctgtggggccccagagaggggacatttccctcctgg

SEQ ID NO: 16050 - DNA, 1154 bp, Homo sapiens
ataacaagggcttatgcaccgtcagattttagcttcttggttttcctcaccttttgacaaagttggggagtctccgttgaaatactcagtccgattttccgtctgacattttcagctgtggtgtgatttccacgctgagaagccgggaggagggcgctgtggacaagagctactgcactttgttggattgcctctgctcctgggggcaggtggggcacattctggagcttgttgacaactggctgcccacagagcatgcccaggccaaggtaggttgacatcatgtttccttaaaattaggtgagtgaggataactgtgtattagaaattacatgcttttctagggacgtgtgttttcattatcagtttctctctctcttctttcagagcaacacagcttctaaaggtagggtgcagatccatgacacacgcccagtcaaacctgaattggcattggtctacattgagtatctgctgactcatccaaagaaccgcgagtgcttgctctctgctcctcggaagaaacttaaccatcttttgaaagcccttgaaacgtcaaaggtaactctgtgccctgagagttgagtggtttcctatgattgtgggggtgacaaatcaaagtgtgaagctttcatatttacagtgctatacaagtgttctggctggaacagaattgagagtgatcatgtcacctcattcagttggtacaaggcatggagcctggccagggcaaggttgggagtcaagtcccagttgacacgtgttcagaaatctcacatttgtgttgcacctgctagggcgctaggactcaggaggatggccccagtgtctcagaacacaccctctgcaggagatgtgtcacataccctttcatgtggacactcactccctgcagtccttggcagttttttctgggaatgtttggagagcatttcctgggaacccatcatgctcccagctgtcccacggaggccgtcatctcttcctctcctccaggagccagccctctgaacaccctgttacgctgccctcaagtgtgactgtaccagaagcaaagccccagcagagtggagccaggcagatggggaggacggggcctggtcatgaggcagggaggggacgggtggtgctgcgtgcagggcaagggctgtgga

SEQ ID NO: 16051 - DNA, 2124 bp, Homo sapiens
gttgtgaggtagattggagtgagtagacaggatattgcattaaaaattgaaagctcgatctcattattgtcaggaacccccagtgtgacctcacacataggatgtgggacctttgagccgatgtgcactggccaccaccagggttgggggcgccacagctgcgagcccggcccctgctgttctcagcagccacttcccaggctgcctcactttatgccatgactgaccttaatattgggatattgttatgcaatttttatcctgtttagactgttaaaagcaggtttctgtacttaagagtcccccagacctcctgtgaggtgaggctctgttgcagtgtcgtaggctgtgtgtgtctgtaaagaaagaatgcacatatgtagacgattaagtgtatattataagctatatgctgaaaatggcttccatagccatgagaacatcttaaaactatgtgtaaatatattaaggaaagtatagctttgtaatttaaattggagcttttagcttgtttcatggaactatacaacttgtgggtaactcacatgaccaaacaaaccaaagtgcctgtgacggggcgggtggcgtctacccaccctcccttctagcagattcttattttgtttgaatttataaacaaggctggtggctgtctacccaccctcccttctagcagattttgattttgtttcaatttataacttacactttgaaccatgggtttacttataatggagtctgtagcttcacagcatatttcatgtaatcataaagaccagtatattccctcctgctgaatgacatgcgactgtaaagcctctttataaaccatttccaatgttagtatataggattatttgggaagcgtatcaatacctttatagacaaatacgaacatgtatgcacacaaaacatttaactatggtatttatggaagacaggtaacaacattaaatctagttgctttcccttagtattagatttgttgagggttttttaaaaatcaggtctgttgaaagtcttctgtcataatctataaagcagcagcactcatggaaattgtagcatgccagtaatttttaccaacatcccatacatctgagttctgcagtccagtgtgtaatccgctccatgtgtattttgcttaatggaatgctttatttaagcacttaggcagagtagacacaattaaaggtacaaagcccagaggaagtggtagagcagcaccgtgcctgccctgaggcagtggagtcagtagcgctgtccccagggccttgagtgcctggaggtgcttggcctccagtagctgcctccattctcttttaaaaaaagggggtgattctgaggcactgaagtgcctcccagatgtggaggagtgaagccaccatcgaggccacactcagcactccaggatcccagcgatgtcagacactcttgagttgtcaaaacgttaattttcagttttaaataatcagtttatctaagaaaagggaattttaacttttctaccttgagccaagccaatgaagggaaaattaattaacttagtaaatttgaagtgcagctctgttagctcgtacatgtgggttcttatcctgatcctgtgccttaaagtaggaaggtgtttccaagttcagattaaaatagaagcagctggccgggtgcggtggctcacgcctgtaatcccagcactttgggaggccgaggcgggcggatgacctgaggtcaggagttcaagaccagcctggccaacatggagaaaccccatctttactaaaaatacaaaaattagccgggcgtggtggtggagcgcacgcctgtagtcccagctactcgggaggctgaggcaggagaattgcttgaacccaggaggcggaggttgcagtgagccaagatcgcaccactgcactccagcctgggcaacagagtgagactccgtctcaaaaaataaataaaatagaagcagccttgtaactgtatttaccatgataatatattctgcacggtaagaattccttttacagacattctttatcaagaggtcggcccttctttttcaggcacataagccaaatgcaggcctgtgtgtagctgtgtgttttttctgtggttgccgcatttatt

SEQ ID NO: 16052 - DNA, 1154 bp, Homo sapiens
ccatcttggcctcccaaagtgctgggattacagacgggagccagtgcccccagcccagcctactttaactgcttttttaacaacccacaggtattggttgctctggcatctgaagaacttgccaaaggctggacccagtggtgagtgtccctgctgcagacagagaaccccagtgtgtagctaaaaacgctttccccgcccagtgggtagtgtcccccacagacagtggtggaacccgacacgtatctgataggcttttcctacttggtcctgtatccgtcaccaccttcctgtcactgtctttctcaggtatgacctcacggaagatgggacgaggcctcaggcgatgacatagccgcagcaggcaggaggcgtcctcttcagcgtagctctccacctctacccggaacacaccctctcacagacgtaccaatgttatttttataatttcatggatttagttatacataccttaatagttttataaaattgttgacatttcaggcaaatttggccaatattatcattgaattttctgtgttggatttcctctaggatttcgccagttcctacaacgtgcagtagggcggcggtagctcttgtgtctgtggactctgctcagctgtgtccgtaggagtcggatgtgtctgtgctttattatggccttgtttatatatcactgaggtatactatgccatgtaaatagactattttttataatctttacatgctggtttaaattcagaaggaaatagatcaaggaaatatatatattttcttctaaaacttattaaattcgtgtgacaaataatcattttcatcttggcagcaaaaagttctcagtgacctattttgtggtgtttctttttgaaaagaaaagctgaaatattattaaatgctagtatgtttctgcccattatgaaagatgaaataaagtattcaaaatattaacattttcataaatataaggatgtattattgagaagtaagttgaagggcttataaggaaaaatgttttataactgagtaatatattaagagaattgtcatggttcataaatcacattatgctaatctgaaatttcttacataaaaatgaagtgtcttatgtttattttaattgctgttgtaacttactcatgaaacagtataca

SEQ ID NO: 16053 - DNA, 1301 bp, Homo sapiens
ttttcattattgtgtaataagtcactacagtagcatcagggataaattaaagataatggagtttttaaaatgaaatttataggtccttcatacctgttttatcagatcttcagttttgagcttgttaaagtgcagggatttgtagagccagaaatcacctgagtgcttcatttaattgacttatatatggaatagtagtcttgttatttaaaaggcatttattgttttagttctgtctctgttgcatggattggatggtttctcacctttcttatttttagcgtaatcaacatgatacaatcagatagaaatagtatctaatcctgtggaaacatggctgctaagggctttttcctttccttttaggtgctaacagacatcaaagctgacaaagaccaagccaacgatggtctttcctctgcattgctgatcttgtacttggattcagcaaggaaccttccggtaggtaacacagtggtaacacctgtgggtgcgtatttcctagcagctgctcttgcttataaccactgctttgtgcagcactctgcatcacctgttctcttcttgttgtgttttcacttcacgtccaagtgcaggagagtggcagtggagagggagaagttagtgtttgctctgggagtgcatacatttctgtttacacatttagctggatttgtgcagtacataggaaaagaagatgaatagtggttaggagaagaggttaactctctagaaaatcactaagcattaaaacttagttgccttaggatggaaattgtctctctttggaatgggaataaaatgaagcagctctgattacaaaatgcagattcctcatggctgtcgcagggccgtgcgtgagctgctgggccttggcgatccgtggggcatcagatggcagaatggtgctgctgcacaagcgagctggcctccgggtgcctgggatgtttctcgcagaacaaaaggaagccatgtctcggaatgacctactgccagatacaagacactctgtgcctagaagcatatatttttgtttgtatcagaattgttcattcgtagagaaaaaatgtaaaatgttgttttataggtaataaccgtaaccacagaaaaggaagatcttactaattccatcttgtgaggcatagtgtgctctcccgtcatcctaccttaaaccctgctagtgaggatagtggtgtggtccttagtcatgtcatcttgtttgatgattttagagtgcccatacacttgctgactaggcactcagtgtttatttcatcgtgtccacagccgcttttgttgga

SEQ ID NO: 16054 - DNA, 1405 bp, Homo sapiens
gaaatgacttaatcattgagtaaaattgaggccccaaacagatacactgtttctagtctttgatgttatagaggcctagggcactgtgagatttatcatgattgggaagcaaggtgtgaaatttatttgtgtgaaataaaattaaactttttaatgtttaaacatcagatttataaggtaagaaaactacattgcatcaaaagactgcttcagaagttgcagtttgttattcgcatcttcttttgaacatggacatttatatttagttaagtgttttatatataagaccaacaacaaccacagccattgattgattgattgagagtattcctcccaacgtcatagcagtgttggatctgataacagcctgcacacctggagcagtaaaatactataatttgatgggccacattttagggtttttacctacaatctgatttggttgctttactatcattttattcagattatacatcttgcaggtctataatgattaagagaatagttcatttcacttacatcatgtaatgcagaattttttgttagttttgtaggaaattgtgagattgatttggagatcaaacgatatttttgtagagctggtgtgaaaagtatccaggtaagttttttgtttttttgttttaatttgacagttttctaaagttctctaagctgtattcaaaaataaaattaggaagtttttttagcttggaatttttttgacgttcagtttttagctgtaggtcatagttgagataaataagaagtcacatgctcaaaagttactaagattcgcatgcaaactccttgcgttaagcggccctgcagaatgttttctattacatattttggtttcctgtttgagtttagattcatggtaccatgcgggtgatcctggaaccgttgattggagatatgcccttagttggagctttgtctatcttcttccttaggaaaccagtaagtcaatatttatttcatttttattttcccatttggtggcaaaaatacatacccgtggaagaatatataaagtggagaaacaaaattttatcaactcaccgttgtccctttctgttgtgtgaatcctgtgggagttttttgtatttctttgtgccttaactgagagcttatctcttgataaacagctctctttcctgattataaaaatgttacaaaaatttggaaacatggacttcttcagaagggtgggtcttagctcacattttattcaccacctcactgaatatgatttatagatatttgctcatttaatcctcatgactctaaagctaaatgttaacattgttttctcttactgttcagaaactgagattttgaaagtcttatttttccaagtcacacaattaataagagcctgtatacagatccagtttagtctgat

SEQ ID NO: 16055 - DNA, 1168 bp, Homo sapiens
ataccactgcctggccaagcagtggagcccgtgcgtcgcgcccctgcgcctccccggcggccccacgggcctgcagcccttccgctgcgccgccctggacggcgccatctactgcgtgagccgcgcgggcacctggcgcttccagcctgcccgggaaggcgaggccggcggcgacgcaggccagggcggcggcttcgaggcgctgggcgcccccttggacgtccggggtgtgctcatcccgttcgctctcagcctgcctgagaagccgccccgaggggagcagggcgccccgtaggccggcggggtcggcgggcgtctccctcggcaggggtttgcggggcccaggtccctttgggcccgcggaggaggacgtggtggggagtcggggccgctggccacgctggtggtttggacacttcgaaggagccccgaggacgctctcagggccgctttcgctttgctttccttttgcttgtctttgcttctgggggtggatgccttgagacccaggaggtgtgcggatgggtcccttgacagacaggacacagagaaggctgtgggatccaaagggtcagcctcagggtacagtgggggttcctgaggcagcctgcagccggccccggggtgtcccgaaccccgcagagcaccgaggctgtgcgcaggagcctgggaccctcaagtaggtcgccgcgaactatcgggggaagcacgcagagagggtcacgccttttatttttggcttgagatttaaaattataactgataagtaaagctctttctgatttagttgaaaatttcgtaccatgtgctcgctttggttggctcaactccaaaaagagtaatttaataagcattaaaggtaaaatctttgattaccagtaaggtttcttgttcaatatgcattggaagtatttccttccccacaccattgctactcaaactcacatgcctagagcagctccgtctcactgttggaccgagggggctttcatattttcagttgaaaggatgttaactgatgtagcgatgatttaccattatttaaattttaagtcttcagtggctaaatgtgaccaaacagcacatcataagtaggaaaaacttaccagggtgcttgtctatctaaaaagcaatctttgatagtccactctgtatgcccagccgcttt

SEQ ID NO: 16056 - DNA, 1651 bp, Homo sapiens
gcgacagctgaggtactgaacactggtaaaaaattgtatgagggtaaaacaaaagaagtctacgaaaagtcctcctgcagtccaaggacaagattacagcaggaaatgtagctagaaagaatcacctggaaggaaaagctgcaatctcaaagaaaatcaccagttgtatttttcagttattataggaagcaggtattaaaactgccttcaccagaaaatgtggggagacagctttcattgcaccccagtgcgaaatgattccaattgaatgggtttgcagaagaatagcaactggttcttttctcaaaagaaatcctggtgtcaaggaaggatataagtttacccacctaaagtggagttgtttttcaaggatgctgccaataatgacccacagtggtctgaggaacagctgattgctgcaaaattttgcttcgctggacttgttacaggccagactgaattggatatcatgagtcatgctacacaggctatatttgaaatgctggagaaatcctggttgccccagaattgtacactggttgatatgaagattgaatttggtgttgatgtaaccacaaagaaattgttcttgctgatgtaattgacaatgattcctggagactctggccatcaggagatcgaagccaacagaaagacaaacagtgttatcgggatctcaaagaagtaactcctgaagggctccaaatggtaaagaaaaactttgagtgggttgcagagaaagtagagttgcttttgaaatcagaaagtcagtgcagggttgtagtgttgatgggctctacttctgatcttggtcactgtgaaaaaatcaagaaggcctgtggaaattttggcattccatgtgaactttgagtaacatctgcgcataaaggaccagatgaaactctgagggttaaagctgagtatgaaagggatggcattcctactgtatttgtggcagtggcaggcagaagtaatggtttgggaccagtgatgtctgggaacactgcatatccagttatcacctgtcctcccctcacaccagactggggagctcaggatgtgtggtcttctctttgactacccagggtcttggctgttcaaccacactttctccagaaggatcagctcaatttactgctcagatatttggggtagacaaccatttagtatggagcaaactgtgagcaagcattttgaacacatgtatttccttgaagcaggctgacaagaaaatcagagaatgtaatttataagaaacaatgccattgaaatttttaggggaaaaactacaaatttctaatttagctgaaggaaaatcaagcaatatgaaaaggtaattataaattagagaacacaaataaaatgtattagtgaatcaatgcttctctagatccatactaataaacatgaaaacctaaaaaaaataaaaaaaaataaagggaaactatcatgcttaacttaacatgacatctgcttttgaaacattttatacattttaaatttatgacacagaaactctccctgctccttcctgactccagggcaggcacatgcccagtgttttcaggtgttggaggttggcagcatatgagaaggacagactgtagatgcagagttctgacatgaactgagatcagacagcacttaaatt

SEQ ID NO: 16057 - DNA, 1107 bp, Homo sapiens
ttaatgttttccagatgaatactttgctggtggcttacactcatcttttgatgatctttgtggaaactcaggatgtggaaatcaggaaaggaagttggaaggatccattaatgacattaaaagtgatgtgtgtatttcttcacttgtattgaaagcaaataatattcattcatcaccatctttcactcacctcgataaatcaagtcctcagaaatttctgagtaatctttcaaaggaagaaataaacttgcaaagaaatattgcaggtaaagtagtcacccctgaccaaaagcaggctgcaggtatgtctcaggagacgtttgaagagaagtatcgtttgtctcctaccttatcttcaacaaaaggccaccttttgatacattcaagacccaggagttcctcagtaaagagaaaaagagtatcacatggctcccattcacctccgaaggaaaaatgcaagagaaagaggagcaccaggagatctatcatgccgaggctgcagctgtgcaggtcggaagacaggctgcagcacgtggcgggacctgccctggaggctcttagctgtggggagtcttcatatgatgactatttttcacctgataatcttaaggaaaggtattcagagaatcttcctcctgaatctcagctgccatcaagccctgctcagttgagctgcagaagtctttctaagaaggagagaacaagcatatttgaaatgtctgatttttcctgcgttggcaaaaaaaccagaacagttgacattaccaatttcacagcaaaaaccatctccagtcctcggaaaactggaaatggtgaaggccgtgcaacttcgagttgcgtgacttctgcccctgaagaagccctaaggtgttgtagacaggctgggaaagaagacgcatgcccagagggaaatggcttttcttacaccattgaggaccctgctcttccaaaaggacatgatgatgatttaactcctttggaaggaagccttgaagaaatgaaagaagcggttggtctgaaaagcacacagaacaaaggtaccacttccaaaatatcaaactcctctgaaggcgaagcccagagtgaacatgagccatgttttatagt

SEQ ID NO: 16058 - DNA, 1187 bp, Homo sapiens
ctttaactaatgtgagatatagtatagatcttgataagtgtctttctggtgttcctattaaaattcattataattaccgttcctgcaattgtgtagcatcttacagtttccaacaccctgtgctagccatcatcttatttgaaacacataataaccctacaagttcactgatgtaggtaagaaaactggtaccgtttctgaagatacacagtgattgtttcggccagttaattaaggcaagagatcactcaacaattgttctacagttattcctgcttttttttttttaactcactcattaagtgaaagaagccagtccgaaaaggctgtatattttatgattccaactgtatgacattctggaaaagggaaaactgaagatagtaaaaggatcagggtttgccaggggttaaggggaagaagggctgtgcaggtagagcacagaggattcttagggcagtgaagctgctctgtgtgatgctacaatggtggatccatggcttcatacattggtccaaacccacagaatgtacagcaccagatgtcaactgcgggctctgggtgataatgatgggtcaatgtagattcatcagttgtaaccagtgcaccactctggtgcaggatgttgatcgtaggggaggtggctgtgtgtgtgccacggaggggggatatgggaactctctgcactttactctcgatgtggctgtgaacctaaaactgctctaaaaaacatagtcttttaaaaaatcatttactacatatgaaaaggaacaagtaaagcaacaacaacaaaatgttattgtgtactttcagattgcaccagtaaacctagccagccctcactagggtcttctgatggttacatagttaaaagtacactagcacaccgggagaataacttcagaggcttgctggtctaatggtaattgcgtcggcttcacacgtcaacatttttttaaaaattagattttcttgaatctgatcatgtccaagatacctcttattttggtatagaacgcctttattcaaacaacgggagaacatgaacatatccctttgccatagtttggctaaattcctgaggctggctggggccagaaacaaaatccctgaaatggtctcaaaatttttttttttttttttacctctccccttttccttctggttggtggtcttggggcctacga

SEQ ID NO: 16059 - DNA, 1173 bp, Homo sapiens
acacagctcgcaaaactgtctttggatgttcaaatgagaaacaaaactgtgaagagaaggaactggcgtatacaagatgacttctgatatcatgtttgccatgtgttgtggttcttaagaactcataggtgactttctgatgactgaatgtctgtttcagagacgcttcgggcctttttatttttattttattttttattttttgagacggagtcctgccctgtttcccaggctggagtgcaatggcacaatctcggctcactgcaacctccacctcccaggttcaagcgattctgctgcctcagcctcctgagtagctgggattacagatgtgtgccaccatgcctggctaatttttgtagttttagtagagacagggtttcgccatgttggccaggctggtctcaaacgcctgagctcaggtgatctgtcaggcctcttctatagaattccagtctttgtgtcttagtcatgatcataattgaaaggtcacagaacctttgtcattagagcacagtactgccaaataaagaatggaaattcaatgacattgttttattactgagaacaactagagaactctgcaagtttcttggcttagactcgatctttattaatacattatctattaggtaggaaagacatttgtcagctattaaggtgacttttatctagcggagattcctctcttaaagtaatgaaaggagataggtatggggggtgttatacaggataattggtgacatctgagtgtcttacttctgcaagcctgctttatggtgagcaaagcatcaccagcaagtgatcacaatgtccactggccgctttttgcctgccgtcctcgagatgaaattggcagttggggctgattcacagaaacaccgatttgtggctgagcacggtggctcacacctgtcatcccagccctttgggaggctgaggtggacagatcacttgaggtcaggagttcgagaccagcctgaccaacgcagcaaaacccatctctactaaaaatacaaaaatcagctgggtgtggtggcacacacctgtggtcccagctcctcaggagtctgaggcagaagaatcgcttgaacccaagaggcagaggttgcagtgagccaaggttgcagtgaatcaagattgctccactgcactccagcctgggcaacagag

SEQ ID NO: 16060 - DNA, 1268 bp, Homo sapiens
agcatgcgcagtggccggagccgggttgcccgcgccccagcaggtagctgtactgcaactgtcggcccaaaccaaccaatcaagagacgtgttattgccgccgaggtggaactatggcaacgggcgaccaatcagaaggcgcgttgttgccgcggagccccctgccccggcagggggatgtggcgatgggtgagggtcatggggtgtgagcatccctgagccatcgatccgggagggccgcgggttcccttgctttgccgccgggagcggcgcacgcagccccgcactcgcctacccggccccgggcggcggcgcggcccatgcggctgggggcggaggctgggagcgggtggcgggcgcggcggcccgggcccgggcggtgattggccgcctgctggccgcgactgaggcccgggaggcgggcggggagcgcaggcggagctcgctgccgccgagctgagaagatgctgctgtccctggtgctccacacgtactccatgcgctacctgctgcccagcgtcgtgctcctgggcacggcgcccacctacgtgttggcctggggggtctggcggctgctctccgccttcctgcccgcccgcttctaccaagcgctggacgaccggctctactgcgtctaccagagcatggtgctcttcttcttcgagaattacaccggggtccaggtgagccgcctcccgctcccgggtctcggcgtccacccgagctcccgggggcgcggacctctccgctcccccacagctggcgagggtcacccggccggcccggcggacccagcacggagagcacgtgccgcctccccgccttcctctccgcatgcttcctgccgttctgccgagatcgctctctaggaagctgtggctgcgtcgtcctgaggctacgagtgggacccgccgcccctttccccgcccctcgcctgggtctgatgctgcttagcaaagtgggtgcagatgcacgttttaaataatagggcacgcgtttagcagtttctggcctttggtccaaagaggtggtcatgttggaacagatcggagacgtctacactccgaagtgcgcttttacagtgacctcttgaaacagaagtacaattcggtcttgtgttctttcccctggacaagtgaaagctgggcgaagaaatgaatacatttgttaaccgtagaagcctaactagatacatttcttgccaactttaactgggcttgaatgtgtgggtgatctgttgtctgattactttctttctgttactgttt

SEQ ID NO: 16061 - DNA, 1770 bp, Homo sapiens
atgcaatggtcttgggcaaacatacctggttgtacaactttagcatcggggctgctggaagggtaaaagctaaatggagtttctcctgctctgtccatttcctatgaactaatgacaacttgagaaggctgggaggattgtgtattttgcaagtcagatggctgcatttttgagcattaatttgcagcgtatttcactttttctgttattttcaatttattacaacttgacagctccaagctcttattactaaagtatttagtatcttgcagctagttaatatttcatcttttgcttatttctacaagtcagtgaaataaattgtatttaggaagtgtcaggatgttcaaaggaaagggtaaaaagtgttcatggggaaaaagctctgtttagcacatgattttattgtattgcgttattagctgattttactcattttatatttgcaaaataaatttctaatatttattgaaattgcttaatttgcacaccctgtacacacagaaaatggtataaaatatgagaacgaagtttaaaattgtgactctgattcattatagcagaactttaaatttcccagctttttgaagatttaagctacactattagtacttccctttgtctgtgccataagtgcttgaaaacgttaaggttttctgttttgttttgtttttttaatatcaaaagagtcggtgtgaaccttggttggaccccaagttcacaagatttttaaggtgatgagagcctgcagacattctgcctagatttactagcgtgtgccttttgcctgcttctctttgatttcacagaatattcattcagaagtcgcgtttctgtagtgtggtggattcccactgggctctggtccttcccttggatcccgtcagtggtgctgctcagcggcttgcacgcagacttgctaggaagaaatgcagagccagcctgtgctgcccactttcagagttgaactctttaagcccttgtgagtgggcttcaccagctactgcagaggcattttgcatttgtctgtgtcaagaagttcaccttctcaagccagtgaaatacagacttaatttgtcatgactgaacgaatttgtttatttcccattaggtttagtggagctacacattaatatgtatcgccttagagcaagagctgtgttccaggaaccagatcacgatttttagccatggaacaatatatcccatgggagaagacctttcagtgtgaactgttctatttttgtgttataatttaaacttcgatttcctcatagtcctttaagttgacatttctgcttactgctactggatttttgctgcagaaatatatcagtggcccacattaaacataccagttggatcatgataagcaaaatgaaagaaataatgattaagggaaaattaagtgactgtgttacactgcttctcccatgccagagaataaactctttcaagcatcatctttgaagagtcgtgtggtgtgaattggtttgtgtacattagaatgtatgcacacatccatggacactcaggatatagttggcctaataatcggggcatgggtaaaacttatgaaaatttcctcatgctgaattgtaattttctcttacctgtaaagtaaaatttagatcaattccatgtctttgttaagtacagggatttaatatattttgaatataatgggtatgttctaaatttgaactttgagaggcaatactgttggaattatgtggattctaactcattttaacaaggtagcctgacctg

SEQ ID NO: 16062 - DNA, 1106 bp, Homo sapiens
ccaagaaccctcaaaccacatggcctctggaaagattgtgttcactgaataagtgtgcccaggacttctgtgatcaggggcctttgttcatctttcctggccttgggtggctgcttgtaaaagaagggtgacaatatgtccctcaccaggcaattgtgagaattcaaaacagtgcagaaactggctgagcaggacctactgcagaggtggcactgaacatggagaaagtccacctccctttccaaggttggagcctggccactaaccagctgcttgatctgggtctcccagtcccccaagacacaagagaggatttggggctggggatgtccttcaggcagtctttctagctctgtcatgctgcaatctcctggccttctcaggcattacttcaggttttgtgctgtttataatgagcaccctgaaaccaggcactttatccagtacaacaggaaactggaaataacgtgggaggcttactggaatgctctgttaaagaaattattgcagcagtcaacacttctgatcaaaataaattaaactgacaacaatgtgattaagatgtttatgcacaaaggaagtgttgttgttgttcatggaaattccttgatatggggtttttgatgaatctgattaacctctgtttaggtcttacttgtttttgaggttatttcttaatgccctcccttcccccagctttgtaacccatcaaccactgtattgacagtcgaatttgcagtgtatggtccagttacttgaaagtagaatgcttatttctgccaaacattttgtacctgtgtgtacacacgcacacacacatgcatgaatgcacactcacacacacacacgtagatgactgaactggagctgccctcaagacaaaagcatagaatcaatcggatttaagccttgttattcatgtttaactttagaaacatttacagcttacagaagctggaacctacttaaattcccccgaaatatccagttctgaggctccaacaagagtcctattttggatcccaaattatcttcctctacacaaaagggccagaacctgaaactgcacaccagagggaggatgcagacttcaaagaacataacct

SEQ ID NO: 16063 - DNA, 1215 bp, Homo sapiens
tatgatcctcaatcccaggcctgaaggctgactgggctctctgctgaatggatcttgcttgggtggcctcagagatggcaatggggtagcagatgttcagattcataaagagccttgacaggaattagcagctgagaattgcaatggcaaggaactggaaactgctagtcttctataaaaacaggctcagaactggctcagcattgcttctgctgtattctgccagtcaaagcaagcacaaccagcccagattcaagagcatggaggactagactgcagctcccgatgagtacacatccagggcaggaaggaacgcgtgctggctgtcttgggagatactctgccatagcttagacatcccagccctcaacactcccagctaaatctggagcagagaacttctcaggagactgttctgtgttacaggccaaaatcttttatgtagaaaaactgtcactgaaacaggagggaggtacaaggtcccacttgcctcacctgatataaaaatatacagtctatatgtcatactgcacatagcttccaaaagtgcaccatttcctttgaatgctgaatcttggacatctcctctgttgcaaataggacagctccactaaatccaagccctccctcctccctcagtctaggcacacgcaatatgaatggcaatgacagagagtctatctggctctggagattccctgaatagggcctgtgtgtccctgccgaggagagctgtcatctctggtcatcagtgaatatactctgcaagaaggaacagtttactcttgttttaagagaattggagacattaagaaatatttgccccttgggcctagagcaaacattgaatacagttattggccaaaaagataatttttttgaaaaaaagaactgtgcttctaaagagagattagctattttgttattctttttttaaaaaaaatcagcttgaaatccaaaatgatttattcgtcttaaaatatgggcataaaaattaaagctgcaccacatagagttctttcctttgcatgtggaggttttttgctcttgtaacaattttaaaataattggcagtcagttttataactgcccctttaaacactttctggaataaaaaggtcataggtatacaatatttggcaagtgttattgaagctactctttcttgtgtcatattcaaattaggtcagataccctttataaggataaaatggg

SEQ ID NO: 16064 - DNA, 1213 bp, Homo sapiens
gacctgtgcctggagaacctgctgctggtgcactgcaccctccaggccggccccgggcccgcccccgccccggctcccgcccccgccgccgccgcgcctccctgctcctctgccgccccgcctgctggtggcactctcagccccgcagccggccccgcctccccggaagggccccgggagaagcagctgccccggctcatcatcagcaactttttgaaggccaagcagaagccgggcggcaccccaaacctgcagcagaagaagagccaggcccggctggcccccgagatcgtgtctgcttcccagtaccgcaagttcgatgagttccagacaggcatcctcatctacgagctgctgcaccaacccaacccgttcgaggtgcgcgcccagctgcgggagagagactaccggcaggaggacctgccgccgctgcccgcgctgtccctctactcacccggcctgcagcagctggcacatctgctactggaggccgaccccatcaagcgtatccgcatcggcgaggccaagcgcgtgctgcagtgcctgctgtgggggcctcggcgcgagctggtgcagcagccgggcacctcggaggaggcgctgtgcggcacgctgcacaactggatcgacatgaagcgggccctgatgatgatgaagtttgcggagaaggcggtggatcgcaggcggggcgtggagctggaggactggctttgctgccagtacctggcgtctgcggagcccggggccctcttacagtcgctgaagctcctgcagcttctgtgagccaagccccagcctgcaccgtcgctgccccttccctgcctaaccctttcctgtctcgccttggaagcacccatgtctccctgggaaatggtacagatgactgggatacctggatgtaaaatatataaatatatatatagaaaatacatataccatatataaatatgaaagactaaggatgctgttgcccgtccacactcgtctcctctctgcactaagtcctccctgttttcttctgtaattatacacatttccagttccatgcaacgtcctgaggacagttctgtgaactgaatgcagcctggacactggcctcaataccttgtttaggatttcttcacccttttgtcaaattgttatttaaagaaaaaaaaaaaagaagaaaattccattaaaattttttttggttgagtcatgagcaaagctcttt

SEQ ID NO: 16065 - DNA, 1165 bp, Homo sapiens
taagacagtgtcccttcccttcttttcaatgaaggtccctgcctatataaatcatctggcacgctggtgggaaatcctttgctcttccaacgtgttattagtgctgggcagagatggggcacactcaggggccaaagaggacaaaaagtccatgcaaaacttgagtcttttaatggcttaagataatcaggagtcagttctgaatcttacaaagtgctctgcttaataagtaccttacttagcagagcactttgcaaacatattacttattagcagagctctttgtagaccttccacatctggctgtcagatcttaaggttgtgaatttaggctccagttacattcactggagagcataatcccacacgggttatttataaatacagagcctctgattggacggtctcctgccaagaactagtaatacccttgttttaaaatcttcacaaggtaaaacttaaaaagccaaccaaacaaattgctctccattctacttttaattgggccaaacagcatatgctacagtagtaacatgtttttcggagagtgtaaaaaactctgtttacatttgcctcctccgtgggttgatcgaaaatgtataaaactgactgcttctcgccagcctcagacaagaagagtgagttgctggtactcgctactcttttacttcttttgtaaagtattgactcttggaaggctacagtatacaaagtctcaacatgttttttaaaagaaataaggagcaagcgactgccctgctagaaatcacaaaccgatttttgtagaatattttgtgccccaggcattaatttcactgactccagaacctgcagttcagagaatgatttcttatgatgataaaaatcgaatgggatcagacgatgtttgcatttttttaatacttgaataggacacctcaagtttgagatttcattttcttttagaacacagtcacaagattaatctggtgaatccttttgtcacagttctcgtgtgtgtgtgcgcgtctccgtgtgtgtgtgtgtgcatgtgtgtaaaactgaatggtcacatttaattgctttttggaccattgaatagttgggaagtaagaattttttaattggcatgagacggttcctcaactgttaaattaaccaactttgacctgtctttagaaaaagg

SEQ ID NO: 16066 - DNA, 1112 bp, Homo sapiens
gcaacctccgcctcctgggctcaggtgatcctcttgcctcagcctcctgagtagctcagattacaggcgcgtgccaccacacccgcctaatttttgtatttttggtagaggcggggtttcaccatgttggtcaggctggtcttgaactcctgacctcaagtgatttgcccaccttgacctcctacagacgtgagccactgcgctcagccatagattttactgtcttaacccattttaattcctctgttgagtctctgtcctcccctccaatttgatttgggattttgctgatgagatgatactaaacattgagagtactgctttttactctgacttttattgtgttgtctttgaaagacaaatagtacaactttttacaaggaaacacgtaagagatggatgtccatgaaaacaatattagtatattctattattgtttcttattaatagttacttagtatttacaaacaatttattattagctgtgttaacttttattctatgcttcatatgctctgacattgacatagtggatttctgctgatttttttcaaatccgcaatctttataaccaactgaagtatataatagagcattacattttatctttatttgtgttctgttggatcaagtatttaacatttgctctgaaaaaaatgtttttgtgatgtgtctttgttgccttgagatagatccatttatcctgcctcctagggagaagtttctgcctggattgaaacaaaaaaacacaggcgtcacaagcatgttacctattaagagagagagggtatctctgaagactaattaaaatggtaatttttaaaaagatgtgaccagttgacttttagtatatcatcccaagtattatccccaaaatgataatgcaaaacagaataatttggagaccaggagaaaaactggtatgattactggggaggggaagaagcacaggtggtcaagataataatgcatgtttggcctcagctgtagttgccaaagaaactacctgcctcacagatgagcacgcacgggtgcattgtcaaagtctgagaaggatgtattgtactttgaaggaagactttccatttctaagctaccatggagaagtatat

SEQ ID NO: 16067 - DNA, 1858 bp, Homo sapiens
cctgagcgacagagtgaaactgtctcaaaaaagagagacttccgggacagtcattatcagataggccccaaacctgtgatttttcttgggcaagattggtgtttacttaggggtgctttaaaaatatatttttacaagtatacttgtaggaagttggttttttattttctatttttgtttgtttttggagtttggttaaacgactcttttattttctgttttgccttatcttactaaagtgaagttttcctaaggcaagcaagaagaggagtggaagcacagttgcctggatttggaggcagagttgtcaggcttttcaagctaagagtcttgtgcttggattttccagattaatttgaaaagacctcccatttgtggctttgtacataaccaacaggcagatactgagtgccttggctcctagagttttgtggttgggttaggttgtttttgttgttgttttgttttggttttgttttcatttctgaagtttaagatgccttgactttttaaatgctcttaaggctattcgatgtaattcttactcctaaaactggctgttcttagcctgaaatctaatgctttgttttttgtacctctcccaggtgggtaacactctaggatgacatgatgttataattttaggggaaatcacatttttaccttatgctgttactgggcagaaccacgttttatgtaaacataccagacatcgggtaacagacagtactttaaatgttataaatttggtgatcagaactattaatagcataaatcgaactcaaatggaagcaaaactgatttcatgcaggtcctgaattttactttgccttaagaagtgccctccccacaatgcaggagaggcacagagtgcactgtcattgacatgttacccgactaaggatcactctgttcataagaaaaaggcctgaagtgactctgtttaataaagtcagtttaattttatctaataatgatcttaagacattcccatgtcaaaatttgaaatatggtaattcagtgataactatctcttctaaagcagccgtaaaccctccccactacccgtctttctcccagctcaccctggctttttttgctgggggtgctggatgcaagcccccagccagcacacctgggatgctcaccctgccgcacagttcagaaggcaagtcctcacctgctcgcaaagacccttcttctccaataaaagactctacttgcctgagtttcctcatcagggctgtcattcagtgatgtatgggggtctgaagaatactgccttctatctgtcttctgtttaccacttgctcctctgctaccctcctgccgcaaacagtcttcttccttttggcccagttctgtcccgtgaaattctcagaaggcctcgggagctgcgctgatgtattctctccttgtttgatagctcatcatcagtagataagcctacacacttcagagggtgacaggtttcttacttggagacttcactgcaccttgacttgtagatttgccttcagacagctcttggttatggttacaagtggcccccgagtcccagaatctttcccaggttgccccagaaagaccagccacctgtcacaggtgcagttgtccggcaatagggaagcaacttcatttttgttttatatttattccctcaagtgccctgaggagcatttgcaaactgggtacaataaataagctggattatacaaagatatttaataaataagctttcagtatctattggaagacatgaagcatttgagtgggtttctttatttaaaaaattattctactggagctggtgagaaataatgaagctgtacagttctccagaaattaaaacaatgtc

SEQ ID NO: 16068 - DNA, 1182 bp, Homo sapiens
cacagaactgctactaaaggtaagagaaattcagaatattgagcatcatttactttttttttttttctttaccttgtcatgactttccatactttcggcctcatgaaagtttgtttagttctttggggttttttgtttgtttgttttgagacagggtcttgccctgtcacccaggctggagtgcagtggcacattcacagctcactgcagcctcaacctcccaagttcaagtgatcctccccctcagcctccccagtagctgggattacaggggtgtgccaccacgcacagctaatttttatgttttttgtagagacgaggttttgccatgttgcccagtcttgtttttttagattttaagagaataaaatacgtttttaaacatattaccattgccttaaaatttttaaaacattgaatttaatttcagctgtttttgaaaggtgatattgaagaaattaaaacacttatttgaacaagttataactgaaatttacaaagaaataaatgtcttttgagttttatttgatccagcaaaatgattactgacctaaaatgttttttttctcaattcagcatggagcttgtgttaatgccatggatctctggcagtttactccactgcacgaggctgcttccaagaaccgtgtagaagtctgctctttgttacttagccatggcgctgatcctacattagtcaactgccatggcaaaagtgctgtggatatggctccaactccggagcttagggagagattgacttgtacgtatttatatcccgaaatcattatcgcataaattggaatatttaatttctgttgagttttatctaccttaaataataaccttccattcttacaagcagactaattcataatcctcatttctaattgtatacttttcttcatgaattccatgggaatgttatatacagacactttttgtatatattgtatttattcgagcctagttttaattcgtatgttgaagctccttttttggttttttgaaggctaatgaggatgagtcaatcagcatccatttcttggatacttgcaatgtggcaggcactagaaatatagcagtgtacaaaccattaaaaagctctgagcttctggggcttacattcttgtgctattgacagtgataggtatctagcattattgaaacctcttatgggct

SEQ ID NO: 16069 - DNA, 1109 bp, Homo sapiens
cagtgctggaactaggcatccagactagtttgaatgtttgtagctgaatttttatgggtcctcaaaattaaatcgagaattagcctcagttgttgcttcttttgaagtttcagtgacccaagctgggtgtttgtgtcttggctacttgtttaatagcactagaattccaggtgaagctttgagagttgatattcattaagagggctttttttccccttctttccttctcttttgctgtaacaaagggttgaagaaattgccatctgtgtagttttcagtagctgtcaagtgtgtcttacttaccttcccccagacgtagtttaaaatggtaaacacagctgtgatttttagttaagtaaaagagttaatatgatatagatatggaaagctttatggcttcattaaaaagataaaccactacctaactgtggttgtatgttgtttccatcatactaactagatgaatggatgcgccagttttcatcttggtccttacacttgagaagttaaactgtggttcagtatttaaactgccagtgttatacgtctcatgctctgtgtgccaggtgaaggtactgtgtaaggaagacatttgcggtgcttcttgtcctataatgattcaagtatatagtagttcttgaaagagtgtgcatatattactcatctgcttaagagagtgggttaatggatatatcagaggagccaaatacatttttttcagaacttgaaaaccaaaggtcatcatgagtgcactcaaaagttaggacaagtttattacatttgggattttcatctgtagccgtatgaagaaccctttccaatataaaagcatggcattaaattaggctgaagtcttttattttttgtatatgtactatatagaaatactagcaagttaggatcatccaatatggcctaccccgaaatggcccctctgtttccctaaccacatggaagaaagaatctgaacgtctccaccggctctacccgagttccaaaactaaagggcttctccagacctgatggttccagtttacctgctgttggcctgctggatacttgactcaggcataaattaagtgccctggtcccgaactttctccctgtat

SEQ ID NO: 16070 - DNA, 1723 bp, Homo sapiens
aatttctagcttttcaagcagcataagtagaatcaacattaggatgttttcatgaaatagcatccttatacttctttgagcttgatgttagtggctagactgatttccctttgctctcaaaatacaaagtgcattgaagtatacagagaaatgcctgaatatggcaagcaaataatgtagattaacattctattattgtatccgttttacaaaaaataaaattttgatatatgccggagaacggcattagaatgcaataagttgtctaggtttttctgtttcagtgtctctcccaatggcacgaagggttattgggcattgtccccacccccgcctttttaacatgtgcactatctggattcctgtaaatggccttgcaaacagaagtggtgtgtattttcaagcacctttcccccattgtatccgaatccctcttgtgtgatatctgtgacaaatagccttcttcttgtgttttctgttggactaattgtctcacgtaaagctatagaccttactaatttggcaggtattcaaaactgccattaagataggatttcatgtcagatacgtatttaaagagtaaagtcaaatttgtttaatgtcagatcagtgacagaagtgaaaagaaagtaattgtgaaagtgatgtttgagctattgtacacatctagcatatggaaagcaaatgcactcgaaaactactattctagaacatgaggcttcttcagcaacttgtgcactctgccattaataaattaaatttttcccctctagaaagccttaactatggcggaaactttttaaccttttatattttaataaataaaacattgtagtcccatttcttagtgtttgaaaggtgtgtcagtgagtcggccatgtctccatgtgtttcagacctgttcatcttattttatgatggtatatttcataagtaatattcccttacatgcaatggagctgattaaaattaatccatttcaatttctccatattggaacttcctcagctaccagatttctggtttggagaagtgctggaaagatttcaaagcctattcagttgtgtatgtggggatacgacagcaactgtgataccttgtagaatatgagtgatatgcaagctgtgttttttaattgttttaaaatgtaaattatggttatgctaaagtgaaaacctagaggaagctaatgattttatatactttgcacgaccaaatatggtcgtagtatgacgagttttatacattgccagagagttctgcctcctctgaaataacattcgcactgtagattgcatttcggcttttcctcctttcacattcttttttgctttacacttcacgtcttcgcacctgccctacctcccatcctttcaaagaggtttctttcacgttccagaattcagattgttctgtgatttcttttacatcagtctacccatttctgcaggcagccctgaaagcccttgtgttgattcagagtgtttgcagagaaatgcagttgaaccctggtagtggggtgtccctcacacacccgcgcacccctcccaaagttcaggatgaaaggctagaaaacccattcaaagttaggaaagaacacagatctttgaggccgatagcctagacctagaagatgaccttgagtatgtaaacattgtctccgtgacacaaaacactgaaactcttcatgtgcatataacacctgcttctgctcccattgttt

SEQ ID NO: 16071 - DNA, 1256 bp, Homo sapiens
acacaagcccctttctcacccattcttagctattctaaacatttcacttcttgctgaaacactgcatcttgtgctgatggccaaatatcagaagacaaaggtgctgccttgatcctgctgcagactccttccttggctcgcctggtcctgtctgccttgttcagctctccctggcaccatctgctccttactcctgtggctttccttgcactggctggcaggccatggctgatatatcctggagacaaaggtcgtgagtgctattaatgacaactcccgagggcagcagacggaccactgtgggagttccccctgctcttggccaacaccttgtgtcaagggctaagaatagaccacatcggaaatgagcaggcaggacctagggacacctgccccaggctggcccatcacatgcagcacagtgcgcaggtcccaggaggagatgctgcccttgtgaatccctaacacaaatcctaggaccccaactactgctaaaaatcattctcaaaccaatgaggacaaagaaataatttccctttagtatagtgccaattggtaacccagtgcacatccctctataagcacatttggccatctgtcacggcggatacagacaacccatcatctgttagatgagctcccctggtctgtttgtccatcttcaacatagctctgggatccttgggctagagtgggcccgggagatttgttttagctacagacttcctaggggctttcctttagacccagaaagatcaggaaatgtcacaggctgattcacggtccccactgtgatcgtggataactcacttcacctctcggtgccttggtttctccatctgtaaagtggagagaaagaaggccaacctctttcttctctcctgctcagggatgcttggaggattcgtcattgttgcctatagcaaagctgtcatatgagaaaaagtggtgacctcatttcttgggaaatggaaccacaggaggagagagtgttttccaggggcagtggcacctggaagccacaggatgaacagggagcacagcgggacagggaggagtctcacatacctgtagttcttagagacttcatagcactgtgaacccaggtcagtggtaccctggtcaggtgacccttggtcacctatcttgagctggccacttgtaattctaacaccaaatctcctgatgttaattcttcctaaggtatcagagaatatatggaaggatgcatttgaacactgatattcattgcgctt

SEQ ID NO: 16072 - DNA, 1233 bp, Homo sapiens
tattctaagagtttcctaatactaaggttaaaattttcatgttgacctgagccttttgcaaatttgctttggctctattgatttgtccattatgtgttaggcaaatataacttaagtggagggggaagtttatgaatataatatagctctgtgttttaaacctcagaaacagatttgagtgtttcagtattatagaaacagtgatgactattcatgctctgctagtctatgcctgcaactccaaatgtttgtggttcagtatttcccacctacatttctgtttggtgacattgctcattttaacaaatatgaccgagtctagtttttctttaaaaggatagtttatgagtaatctttaaaaccatttccataccatctgtatataaccatttcggtagagaacacactacactgaaccctgctttagagctgtgtgttgagctaaaaatataattttttaaaaattgactagcaaaatctatggccacactgagaagcctttgaaaatggcaaatacttttcatcaccaattgcccaattcatctttcttctgcttcctcagccttgtagcaaaggctacacagcagcccacagtccacagtctttttgggaaaattggcctgccaccttctttaagctcagtttatttttgacttactttctttgctgtagttatgaaccttggggcattaaaatcccatggcaaggagcataagagatgttctcgtagctctgcgttgtgtgaaatgtccatcttagttttgttaaaaaaaaaaaaaaaaaaaggaaacagcctcacttttttgtgctccctcagaattgcttgctatgtctgttaatacagctgagctttttgttttcttctctttttgtctcaagattgtatatgaaggaggcttttcttctcagctaacaggcatataaggaaaaccatctagagagttttctttagaagtgactcccattagcctggtgtggtggtgtgtgcctatagtcccagccactaggaaagctgaggcagaaggatcccttgagcctaggaggttgaggctgcagtgagctatgatcgcatcagtccactccagcctgagcaacagagcgagaccctgtgtctaagtaaagaaaaagccagaagtgactcccactgcttctgttgatcggccatagggcttccatgggtggaaacttgtgagggagtttgtattaggtctggtcatggagggatgatgtacc

SEQ ID NO: 16073 - DNA, 1962 bp, Homo sapiens
tcagatctctttgggagttctcaattcttttttttgagatggagtcttgctctgtcacccaggctggagtgcggtggcgtgatctcagctcactgcagtctccatctctcctgggtttgagcgattctcatgcttcagcctcccaagtagctgggattacagatgtgtgccatcacgcctggctaatttttgtatttttagtagagctggggtttcactgtgttggacaggctggtcttgaactcctgatctcaggtgatctgcctgcctcggcctcccaaagtgctaggactacaggcctgagttactgagcttgactggacttcttaatttttaagaatctgttataaaaagactctgagactagaacatttgagaactgctgccttgatccaagaggctcattcattgttttgttataacctacatacgggattccctttcagactatgcagtccagattttccatgatgccacaaagcatggcaaattcgagtgcaacctggaagcctgcacgagactgcccatgatgtacattgacgactgcctcagagccaccctggaggtcatggaggccccagctgagtccctttccatgaggacctacaatgtcagcgccatgagcttcacacccgaggagctggcccaggaggtcctcaagcacgtgccggaattccagatcacatacaacgtggatgccgttcgccaggccataggttcgtacccggtggcaaaggcctttactgtgagtccctggagaatgtaaaccttggaaggttgaagagagcatagatccttcccaagggtccagacaccttttggagaaggagcctagcccaagaaattgttgagcccaagctagcagatgctttgattttggggaatgatatctaaagtgggtgaaatcattccattccaaataaacagcttgttagcctttcatcatttttacagtttaaacataaagcaaggaaaaatagaagcaacagaggtagtatgaaaacagccccaggttttcaaatactgtaactttgccaatttgtggatggaagcacctctttgagtataaaacttcttatgaagttgtgtgagattttgataatgtgtgaaaattcacagtgcctgacgaaagatgggttaatagtcttcggccctaggagggtgactgtgcataatggcggttctgctttactcgaaggaatttcctgttttgtaccttgtacggtagacctttatatacaatggtcaagacctttttgcaaatccacaacctgaataacttaagctagtcttgcgtatcttttcctagcggatggttggccgatgaactttgatgacagcaatgctcggaaggactgggggtggaaacacgactttgatcttccagagttggtgactgccatgttgaacttccatggttctgaaagcagagttgcccaagccaactgaaagaatctggaagaggagctcctgtgtcctggtccactgtcaagggagaactgtcacaactccaaggttatagactccaaggagcctacattatttggaactgactcattggactaaattttggcagctcatattgaactgctagacaaagaatggagttaacatttaagcattttcagaatgttgtaggtatggtggtgggacttttcagtttttgctgtttgcctgaacttgtctaaacacattccacagaataaggcttaagtcatcattagtttccatttccttaattaggatgaagtgactatttctgggaagctgggagtatgtgacatttgtgtttaattaaattcaatttaaatattcctcttaagactcgattattctcttgactaaagaccaaagattacattttaaggactttcaaagaggtactcctcatttataagtattctttactatcccagcgaaagtaaaacatgtttggtgtattcatcccatgtctatcacatt

SEQ ID NO: 16074 - DNA, 1055 bp, Homo sapiens
aggcccactagtcagaccagtttagaccaatgcagttttctaaagagcactttcttgttgcatcttttttttttaagatattcctgggttgagctttcagaagggctactctaaaccctctgatgcaattaccgtatagatacatacaggttaactttttaagttgaagttaggccaaatcaatttctgattgtattttatggtaagggaatgagtgtgttcagaaaatgctttcaatccggtcatttaaaaaaatatttctggtgcaatactgtatagacacgtacaggttaacttttttccagcgacctcggaatgtactgcatgtaaaatcactaggaagtgaaacttccagttccacagattaatcatggatatatttgataacagctatcaaggattaaaaggcgtttatttatgttgcatgcttaataacaaaatgttatgcatttggagttttgaactgttaggtcaaagcgtggatttttttgaaggcataactggatttaaaatctatttgactattaactggagaacttttaggtaattgaattgtttaacagttacattactgtagctttttcctccacttaataaggtttatgtttgtagattttatttttttgttatttttcttttgggctgctcttgagaggcaggaagattttattttttaaaatcagaaagttagtaatgaattctttttttgaaagtttgagatatagtttacataccataaaattcactcatttatagttctgtggttttcaatgtattaaaaagttttgcaaccatcactataatctaattttaggccatttcatcaccccacaaagaaatcatattatataagcccttcccaccctcggcaaccactaatgtacttcttctgtccctgggtttgtctgttctgagcattttatgtaagtggaatgtggttgtcttttagtggcttctttaattaagcagtccattttcaaggttcatccatgttttagcatgtatcactacttcattttttattgctaagtaatattccattgtatgagtaatcc

SEQ ID NO: 16075 - DNA, 7867 bp, Homo sapiens
ttgttctccccctggcattggttttaaatatataatgattatgtttgttgtaggaaaaatagaaaaacaactacaatagaaaattcttcccatatattattttgaaatacatatttccgatccgataatccattgctctagcatggaaaatgttggatttacttgtgtttgctttttccaaataaaatggaacttttgtggctacattatagaattgttttagactgcttaattctgtgtgttgttgagaaagggaggagtggggaaggtaaaaatcttgacatactttcttcgtgggtattttttcttgagcgattccatcttagttgattagcagttagcaattgcccattcaacagaaggttttcttacctttttgtgataatgatagctaacgacatcatttcttcttttttccctctcttcttgttgtctctaggtgatggccattgccactttggctgcctgttataataaccagcaggtgttcaaaggggcagtgaagattcggaaagggcaagcagtgaccctgatgatggatgccaccaatatgccagctgtcaaagccatcatatatcagtatatggaagaggtgggtttttatttaactacttggataatttgtagctacttttatgatttagtaatgtcactgtttaaccaggtttggatattagatgatcctaacaattcactatcctgtggcctaaagagacaggaattgatatcctttataaggaaaaaagtctattcacaggagccgagcagattgctcactgctgtgtagtaccctggtgagaggagataaatggagcaaggctgtaggttggagcccctcagtagaatcatagattttgagctgcaagatgatgcaggaggccaaccaagcttcttgttgctggtgaggaatgtgaggttgaagcttgtctgtgctgatgcagtgcgtgattgagtggatctctggctcccgtccatgtgtcctgacacccagtctggtactttcattatgccacaggcctcaattgaaaaatcacagtagggaatttaggccaaggaaagccatcaagttgcaattatttcctaaattttctttggaaaatttcatttcaaataccaaaaccatcctataaaaagaaaacttaccttcttaggtcaaatctctaatatttgactaggttcaaaaagtttatttctggccaggcacagtagcttactcctgaaatcccagcactttgggagaccaaggtgggaggatcacttgaggccaggaattcaagaccagcccgggcgacatagcaagaccccatttctacaaaaaatttaaaaattgtcatggtggtgcacgcctgtggtcccagctactcaggaggctgaggcaggtggatcacatgagcctgagaggtcgaggctacagtaagctgtgtgatttcatcattgcactctagcctgggtgatagagtgagactttgtctcaaaaaaaaaaaaaaaaaaaaaaaaagtcttagagaccagaagtctttgtaatctctaataatctctaggccctagagcagtggtttgtaaatggaggtgatttgctcccctccccccagaggacattggacaatgtctggagacatttttgattgtcctaaccggcaggaatcgggtgctactggcatctggtgagtagaggcccaggatgatgctgtgatcctcaggtgtgatcctgttgagaatgaaacactgtagactttatgaaaacatacaagaccctcatcatttttcctttgcctgagctccctccccagaggttacctctgttcatggttttgtgcatccgtctagtccccctgttacgcgtttacaggaatatggtttgcaacagtgttttcatctaaatagaattatacaaaatagcgatttctgatttctcttgcatattgcacattcttcttatacttcctccctacctttatctgacacagaaatgctgtatgtccagaacttctatcagaggcacctatggaagtctaagggaagaccacatcgcttttaaaaaccctaaaattttgtagtcactagatgaaaatattcagccagtgacccaaaaaattgctaccaatgagactctccattttgccatgtagccagaacttactttgatctatgtgcctggggtagtgaccaagtaggtgggtaggagtaatctcagggaaacttgaggccccagcctcatggctagggtcataatttgaacccaggtctgtctgacatcagaatccatgatgttaaccccaattctaaggggttcaactaccctttctaaatggaatcctgctatattaagcactatttattcattttatataaactagaaacattttatgtagtaagtagttgagagtgttttggttttgcagtttgatcactagttttagaaaccagtttttaaacactttgtggccaattccattactatattaaaattcagatttatttggtttttccttaactattgggattaaatcctggttgtaattcatagtttgagggcgagggtgggcagtctacagttggctgagccctgtttttgtgaataaatgttatcagaacacagccacacccatttgcttctttgtcttctgtggctgcttttgcaatgtgacggccgagttgaggagctgcaacaggcgatgacttgtaaagctgaaaatattttttggcccttgaataagaggtttgctgacttctgacttagggtatcagttgttctgttatcccagtaaaactcaaggcattaggggagaaatgttaatattaatacttaagttgatttgatttagggaaatctttgaagatttctaagtcttaagcagtagaacctgttaatggttttagtttcagcagtaaggacattttacaagtaaagttttaaatgaaaacattttgtatgaagccacaagtcgtctggcctcttgctggtgtccagatattaacactgatcctatttctccttgctgaccaagtctgtcctttgtagtaagaaaggaagaaacgttgactctgtccgatctctggacttagtgttgtagcgagcatgcacctggaagggacttgccagaggacctcctcatgcttctccagtgcttagtgggggcttggagtgcagccccaggtcttcacgagcagttggccacactgcagggccctcaccccactctggagcagcctctgcttcaaaccagcctggatgcttgtcagctggggagaagatcaacctgctattttgggatagaaataaatgctcagccaaacggccagaaacccccattcccctctctgccaaagtgaattccttggcagggagaatcttgttcgtgtctctgcacacttcctgtgccctcctgtggttaagtcagagaatcatccggctctttgagccccaggtgcctagctgctcaaggatggtccccagccagcagctgccaggaatcacctgggagcccattaagacatccagcccccacccaaacgtatcgaatcagaatctgcctttttttcccaaatgatgtttttgctttaatggaagtttagatgttcatagacaagagttttaaatgatgatcaagctgattccatattcgcagttgtaagtagaactgctgagacgtggaagtaccacatggactcacagaggagctgctgtatgtagcacagcattgcacaagagcttatttcagtctagtaaacatttataggagcctgtgtcatttaatcatcaagcctcgcactgtggctcacacctgtaatcccaaaactttgggaggctgaggcaggcagatcacttgaggtaaggagttcgagaccagcctggccaatatggcaaaaccctgtctctactaaaaatacaacatttagccaggtgtggtggtgcacacttgtcatcccagctattccggagcctgagacatgagcatcgcttgaactcgggaggtggaggttgtagtgagctgagatggcaccactgcactccagcctgggcaacagggtgaaggccctttctcaaacccctcaagtatttggcttcaactttatgccgggcatgtagatgaaaagtcggctatgacctgtccttgacaagcagatgtaactccttgattgaggctagtaggtttttaagacctgaataattgagtttgcagaaacctactgtgtgccttcaggtaaatggagagtggggtttggtctagcaacgaagcatctagaaggtccctttggccttaccggctctgttttaggtaagtccacgtctgagtaccagtgactgcagctcttccagttgtgctgtcatgcttatatgttagaaatgatcatcaaaggactcaaaagttttgccactaattgtattaccggggactgtcacaaccaagatttctcttaatttattcaccttacttatctcctggaagggcatattgaagtgctcttggagttctctaaaagggtttttgttggttgtgtatattcacttgggtgccagcgattgattccaaataagtaaatcttttttcccaaaaggatgtaagatggcttatggttataagtacaacaggctaacaaagtacaagtagatgagaaagtaaaatgaagaaataaagtcataggagccacagaattaacccaggaatgaataagtgtgtagtttggtgctgatgttatcatcctttatttgtacattgcttgtacagttgctctgagaaggtaagtcttaaattttcaaaagtgaaatgtcaccgagcatggtggctgatgcctctaatctcagcactttgggaggctgaggcaggcggatcacttgaggtcaggagtgcgaaaccagcctgacttatgtgatgaaaccctgtctctactaaaaaaaaaaaaaaaaaaaaaaaatacaaaagttagttgggcatggtggcaggtgcctgtaatcccacctacttgggaggctgaggcaggagaatcgcatgaacctgggaagtggaggctgcagtgagccaagattgcaccactgcactctagcctgggtgacagagcgagacaccatcttaaaaaaaaaaaaaaatctacaatataccaaaaccattacttacctgagaaactattctcagggtcattgtagtgaatgcctattttatggcttttgatggcatcagggcactcaggtcatttacaagagtagtgtgtgagaccctgtgtgtcactgccactcatcttggccttcggccactgctgtagcaaccagtttccaagtagggctggaccttgccttctgctccagagacctctcgcttcctgcccttgggcttctgacgagctgcaggaactgcctggcacgtgggtccccacaacccagaggaggtgagggccacctctctgctcctcagggccacctttcataaggctccttgaaggtccctcaagatcaagccaactcaacacatccttgataggccttcctgccttctgtttcacttctccactcgtttccaaataaatggctgcatgcaagcttttgcctcaggttctgcttttaggaggaaggctaagacaagcagtaaagcaacatgggcaggcagaaggatgacttctaatagaattatctcatcactatatattttactttatggatgcttgtattgaaaagtcttggctgggtggagtggctcacgcctgtaatcccagccctttgggaggccgaggtgggtggatcacttgaggtctggagtttgagaccagcctgaccaacactggtaaaaccttgtctctattaaaaatgcaaaaattagccagggatgcacgcttgctgtgtgccagcacagggctaggctggagataaaaaggtgagtaagtaggtgcggtgtagtcagggtgaaaactacagatggtccatttccacgtaagtggaaaggtaaaggtatgtacaatagggtggctcctggctgaacctggagctgcagacaggttttctagaaggcataatcctgaagttgagacttgggggcctaggtaggagccagttgaagggacgtgggaggcgcattccagagagaaggagtggtatgagactggaacagaggtgtgcagcagcatcgcatgggcgaaacaacagtagacagttgttcttttgtttttgtttgttttttgagacagggtcttgttctgtcatccaggctggagtgcagtggcatgatctcggatcactgcaacctccacctcccaggctcaagtgatcttcccaccccagtccccaagtagctgggggaccacaggtgcatgccacgatgcccggctaatttttgtacattttgtagaaacagggttttactgtgttgtccaggctggtcttaaacgcctgagcttaagcagtctacgtgcctcagcctcctgaagtgctgggattccaaacatgagccactgtgcctggcccggcaactgttactagactgtagagagggaggtgggcaagggctggtgacactagacaggtgcagtaggtctggaccatgggtggccttgcgctacacattacagagctcaggctttttttctccaggtgagagggctggtgccactgaggcatcaagcagaggtttgagatctccttggtgacagtgtagagcagacaggtagatttgggaatttaagcttagactcacgttggagactgagatagctcatctgagaggcactcagggcctaatctcaggcagtaattttagggatgtaggggaagagatggattctgcacatacttgggaggcttgtggaggagtggggagggaggcacagggaggactccagggtggttcatacggctccctgcttctgttcctgtccccctttgtcaagctgtggtctgtactgcgtgttccatcttgtttctaagctgcttttgcccagtctttccagcatttccctttcgtcatgttagtctgtgcctgtctacgtgaactatggtgacgtttattgggcctggcactgtgaggtgctggggatgtgaagatcattgtggctcagccgctgctctcgagggcctctgggtgcagtatgcacacctgtgcctcctgtttgctcaggaagacaggctttgagatgagctggggctgacatccccaccttatcattgggatggctttgggtaagttatgttcatgttctctgagcctccctttcctcattggtaaaatgggtataaaatacctgccagtggagggttgttgtaagtagccatggaaaatgtaaagcacatagcacttatcattttttcctgtgtctttaacagatttatcatagaatccccgactcagacccatcttctagcaaaacaaggcagatcatctccaccatccggacgcagaatcttcccaactgtcagctgatttcccgaagccactactcccccatctacctgtcgtttgtcatgcttttggctgccctgagctggcagtacctgaccactctctcccaggtaacagaagactatgttcagactggagaacactgatcccaaatttgtccatagctgaagtccaccataaagtggatttactttttttctttaaggatggatgttgtgttctctttatttttttcctactactttaatccctaaaagaacgctgtgtggctgggacctttaggaaagtgaaatgcaggtgagaagaacctaaacatgaaaggaaagggtgcctcatcccagcaacctgtccttgtgggtgatgatcactgtgctgcttgtggctcatggcagagcattcagtgccacggtttaggtgaagtcgctgcatatgtgactgtcatgagatcctacttagtatgatcctggctagaatgataatta

SEQ ID NO: 16076 - DNA, 1163 bp, Homo sapiens
gagaccaagtcctggctacatcccagcctgtggttacagtgcagacaggccatgtgagccaccgctgccagcacagagcgtccttccccctgtagactagtgccgtagggagtacctgctgccccagctgactgtggccccctccgtgatccatccatctccagggagcaagacagagacgcaggaatggaaagcggagttcctaacaggatgaaagttcccccatcagttcccccagtacctccaagcaagtagctttccacatttgtcacagaaatcagaggagagacggtgttgggagccctttggagaacgccagtctcccaggccccctgcatctatcgagtttgcaatgtcacaacctctctgatcttgtgctcagcatgattctttaatagaagttttattttttcgtgcactctgctaatcatgtgggtgagccagtggaacagcgggagacctgtgctagttttacagattgcctccttatgacgcggctcaaaaggaaaccaagtggtcaggagttgtttctgacccactgatctctactaccacaaggaaaatagtttaggagaaaccagcttttactgtttttgaaaaattacagcttcaccctgtcaagttaacaaggaatgcctgtgccaataaaagttttctccaacttgaagtctactctgatgggatctcagatcctttgtcactgcctatagacttgtagctgctgtctctctttgtccctgcagagaatcacgtcctggaactgcatgttcttgcgactcttgggacttcatcttaacttctcgctgccccagccatgttttcaaccatggcatccctcccccaattagttccctgtcatcctcgtcaaccttctctgtaagtgcctggtaagcttgcccttgcttaagaactcaaaacatagctgtgctctatttttttgttgttgttgtgactgacagagtgagattccgtctcccaggctggagtgcagtggcgccttctcagctcactgcaacctgcagcctcctagattcaagcgattctcctgcttcagccttccgagtagctgggatgacaggcactcaccaatatgcctgggtaatttttgtatttttaagtacatacaggatttcaccatgttggccaggctagtttcaaactcc

SEQ ID NO: 16077 - DNA, 1566 bp, Homo sapiens
tatactgacctatttttctagagaccaatctaagtaactaactctttggatctccctttaaagtgaccctaatctggctgcattgatggccagattgtctgctgcctttgcacatctagtgctggtttcagaaatttaatgaaacttttctttttccttcgacctcctgaatcatgtggttctgcaaatgaataccttcaactaggatttagaccactaagaacttgcacagaaaaacacgcattgaatgtgtgtcgaacctctacattgtgaagttgcactatgtaccatactctaaaatgaaataagaactctttatgtctgtgagagagtgtgtgtgtgtgtgtgcgtgcgtgtgtgcttgtgggggttgggtagtgtgtgtgtattttctctggctttaaaattttaaaacaaacaaacaaaaaagccatagagagcagaacttgccgagggtcatttattgcccaagtttacaagagtagcgatacaagtttttgcaaattgaatttgcctcagatatatctgtcctaatgcttatatttgcacaagtatgtaaaatatcgtgttgaggatcattctttgttggaaacactgctcttgctgaactgtcttgaccattgactatgacacagtttcttatttatgtaaatacttgcatcacagtggccgacaggcattggatgcagaacctagagccagttttcaggaacaattgtaaacctgacatggtactgtgcatctattcataaaacactcaaaactgtgaaaatatggtttacatttaattgtacataaaggtaaagggagaactcaattcagtaccagttagtttgtacattttagggggcttttcacattaactgcccatttgtgtaatttatagtttgacatgatgtgtttgttttaaaaaaaaatgcatagtataaacccattaaggatctgggaaaagagaagaagtttaatatagaactaagcttttaaagtttgtttttgtttttaattctggtctcggtgcaaatgttagttatgccttattcatatcacagttagatcaccatgctgcaacatggtttatattcatgctgccctagaaacttttgtaattatttgttgcaaatttgtgactgtccttattaactttcttttatgtaagtaatttgtaaaagtttcttaaaatttttgcttttgcttatttaattttgaataaaagctaaattcctaatactttttcttaaattgtaggtcagtgttataaaaacaagtcagtagaagaaccaaactgcatatgttaaagaacagatgagttttgcttatggtttggtggcattagatatatgctatggtttccaaaaactttggccatttttattttttgagaaaaaaaaagcaatttattgagggtttaggcctcggaaccatccctaaagcactatttttcaaccttttaaaaatccatgtccctttagggtaaggctaaaattctttctttgatgcctcaccatttgagacttctcttggttacacagactggactgtttctgcccccagttcctcagctaggat

SEQ ID NO: 16078 - DNA, 1146 bp, Homo sapiens
gcttttttcttcttattgtaaatacactttacgtgaatacagtctaagtgaagaaaataaataaaaggaagaggtttataacttgctctatatctgtacagattataatcaataagtgcactattattaaatgtttaaagtaagggaaaagtctgggctgccttccttaatattgcatctcactcccacccttaaaaccacagattgcaaagcatagcattttagcatcaactacaatcaaaagagcgatttgctgaaggaaaaatcggactgcaaatcattccaaggccaaactgcaactgagccacccactcccaaacaggaaaccctggtgaaggttcaggaagcacggagattctctccaacaaaggtccagttaggaaacgacgctgagaggatgacgacaacgtgcaacagcagaaagatgcttgcaagcagagtcagggtcaccagtgaatgccacaaaagttctctttcccactgtttaatttgacaagagaagaatttgaaggatatgaacattttcaagaactctgctgaggtcacttagagcgccatcacaacttatttgtgtgactaattgcctagattgtaagctctttgagggcagggcttgtctcttacacatctttataatcccctgcagcggctttcagtattttgtacttgtaggcacctaataaatttattatttgctatactgaactgattggattagcttctgttactgcaaagggaagagcatctaggatcccgatcatcttaaagcctccttttcattcactgctgattttcagatgacagagactggaaatttccaacttcatgggactttttttttttttttttttttttttttttttgagatggagtctctgtctgtcgccgaggctggagtgcagtggcgcgatctcggctcactgcaaggtccacctcccgggttaacgccattctcccacctcagcctccccagcagctgggactacaggtgcacgcggccacgcccggctaacttttgtatttttagtagagatggggtttcactgtcttagccagagtggtctcgatctcctgaccttgtgatccacccgcctcggcctcccaaagcactgggattacaggcgtgagccaccgcgcccggccact

SEQ ID NO: 16079 - DNA, 1238 bp, Homo sapiens
ttaaataattcatcagcttttctttcttttctctgataggggccacatgccagaatggtacacaaaatcttttggacatttgtgtgcagctgaagttgtaaagatccgggattccttcagtaaccagaacactgaaaccaaagacaccaaatctaggtgatcactgaagcaacgcaaccgcttccaccaccatggtgtttgtttctagaacttttgccagtccttgaagaatgggttctgtgtctaatcctgaaacaaagaaaactacaagctggagtgtaggaattgactatagcaatttgatacatttttaaagctgcttcctgtttgttgagggtctgtattcatagaccttgactggaatatgtaagactgtgcaaaaaaaaaaaaaaaatttatgtgtattcttattcaaattgcttctgagaagcaaaactctttaaatacattatggaagataatgaagatacttcattctcttgtgatatcagtgtatgcgtacctgtgtcgctttatttgcagtgtgttgagggactggtgtatccactggaatagttggtactcttggatgtgttttctcaccaagatgagcaaagaaaggtttgcacagaggagtgtgaatgtgtgtttgttgctggctgaatggcaatagatgtctaaggtggattcagtgtctggcacactgagacacctccaagaaggagattgatgcatcaggttcagtttaacctggaatatctgactacccctgaatccacccagaaagggggcccaacacccttgtccatttatgggtattttttttcgaagttattaagcatattccttttccacgaacctcttctgtactttgattgtaataggttggctcttacacccattccaaatgcagtttatttttagacccgattgcaaatagtgatgtagttttaaccagtatggattagttcagggatgaactgctccctctagccttactggctctgatccacagggttttgttttgttttgttttgttttttgtttaagtcgagatataaaaactgaacacgataacacttactcttaaatcaagcatcaacactttttccctgttagaattctttgcatttttgtgtttgtaacagaaacgccttaagacactatgtttgggaatataggaaactatgtgtgtcccaaggaaatccctgtaaatttaactcacctacaaaaggctttttccccgcctttggttgtta

SEQ ID NO: 16080 - DNA, 1255 bp, Homo sapiens
actgtctggatgataggaatgttctttatctgcacaggccaatacagtaggtactgagcacaaaagatgaaggagcacctgaagtgtggccagtaccactggggaactgaatttgtcattttgtttaatttaaatttaagtagccaccgtattagcacagatctggagcccacagggtttgcctgcagaattggacaagtgtagacagacaagtgagcatgtctccgccaacaccaccatctctgtgttctttaacagggccgtgcccaagttcatgaagaggatcaaggttccagactacaaggaccggagtgtgtttggggtcccactgacggtcaacgtgcagcgcacaggacaaccgttgcctcagagcatccagcaggccatgcgatacctccggaaccattgtttggatcaggtgagagcgctgcctgcgggtccacgtactcaggggagctcggattacatgcagcttcttctagttgtgtggtgtaaacactgcgtccacgtgaatgtaccccacacttagtgttgctcttccgacaggttgggctcttcagaaaatcgggggtcaagtcccggattcaggctctgcgccagatgaatgaaggtgccatagactgtgtcaactacgaaggacagtctgcttatgacgtggcagacatgctgaagcagtattttcgagatcttcctgagccactaatgacgaacaaactctcggaaacctttctacagatctaccaatgtgagtgtcctttgatcttaagattgttggcattggggaaaaatgggaccaactgaagcttgtagcttccttgatagcattctttttttttttgagatggagtctcgctctgtcatccaggctggagtgcagtggcgtgacctcggctcactgcaacctctgcctcccaggttcaagcgattctcccacctcagcctcccaagtggctgggactacaggagggcgccaccacgtctggctaatttttgcatttgtagcagagatagggtttcaccatattggccaggatggtctcgaactcctgacctcaagtgatcctcccacctcggcctcccagagtgctaggattacaggtgtgagccaccacgcctggccttgatagcgttcttttgacaagagagtctgcatggtgacctcttggaaacccatgtcatcaccttcttccttgccgccttgtttgtggaacaggtttctgtgtaattattgaatgatgtgaaaataaatttccca

SEQ ID NO: 16081 - DNA, 1099 bp, Homo sapiens
ctcctccagcaacttggcaggcaatgacgactctttcggcagcctgccctctcccaaggaactgtccagcttcagcttcagcatgaaaggccacgaaaaaactgccaagtccaagacgcgcagtctgctgaaacggatggagagcctgaagctcaagagctcccatcacagcaagcacaaagcgccctcaaagctggggttgatcatcagcgggcccatcttgcaagaggggatggatgaggagaagctgaagcagctcaactgcgtggagatctccgccctcaatggcaaccgcatcaacgtccccatggtacgaaagaggagcgtttccaactccacgcagaccagcagcagcagcagccagtcggagaccagcagcgcggtcagcacgcccagccctgttacgaggacccggagcctcagtgcgtgcaacaagcgggtgggcatgtacttagagggcttcgatcctttcaatcagtcaacatttaacaacgtggtggagcagaactttaagaaccgcgagagctacccagaggacacggtgttctacatccctgaagatcacaagcctggcactttccccaaagctctcaccaatggcagtttctccccctcggggaataacggctctgtgaactggaggacgggaagcttccacggccctggccacatcagcctcaggagggaaaacagtagcgacagccccaaggaactgaagagacgcaattcttccagctccatgagcagccgcctgagcatctacgacaacgtgccgggctccatcctctactccagttcaggggacctggcggatctggagaacgaggacatcttccccgagctggacgacatcctctaccacgtgaaggggatgcagcggatagtcaatcagtggtcggagaagttttctgatgagggagattcggactcagccctggactcggtctctccctgcccgtcctctccaaaacagatacacctggatgtggacaacgaccgaaccacacccagcgacctggacagcacaggcaactccctgaatgaaccggaagagccctccgagatcccggaaagaagggattctggggttggggcttcc

SEQ ID NO: 16082 - DNA, 1128 bp, Homo sapiens
aaaattgccctgatgtaaaaattacaattagttgaatacaattatgacattttaatgttatatttacatgtgctaatttagaatggaataacaaacatattgtattttccttatgttctatgttcagcacataataattttctttctttttcagctttttaattaaatgaagccaagtgggatttgcataaagtgaatgtttaccatgaagataaactgttcctgactttatactattttgaattcattcatttcattgtgatcagctagcttattcttgtgtactttttttaaactgtgggttttcctagtaaatttaatttacagaaatcaatggtagcatttagtaatctacaaaggaaatatcaaagtgtttttcaagcctgttatattcagtgtgtgccacaggattgaaataaatgacaatgtaattatgaattcatgttttagagctgtttactcattagtaaaggaccgcaatgttagtaaagaaaacctatgaaatgtatgttaaagattcttagtattgtacagggataaagcaaatgcatgaaaatatgtcatgtactgaaaattaaacttacttcagtttcagttataaaggacgtgcactgttacgaatagtgttttgttattaattataactagataaaggtatataggacagggaactggatgaatggtacctacaatttggatgcctaaccaaggactagagctccttcttgagatctaaatctaaagtaaatgtgcattaaagcagtgtgcttcaaaggcatcagacgatgaaagcaacataccacaactaggagttatttctcaaacttaaatgtcctctgggaatccagacttaaaaataagagcaaacttaacacactatccattttcgagcaaacctaacccactatatccattttgctcatgtgttttatgcaaccagctttccatcaaatcctcaatctttgaatccaggtaaaaggttaattatcctaggattagtgaatgattcaatgaagctttcttgaaaacaaacataggagtgtaatgtactattatgtttgtatcctgttttagtttataaagcactttcacatacattatggtatttcttcctcacaataaccttgt

SEQ ID NO: 16083 - DNA, 1183 bp, Homo sapiens
cctttatgccacatctcgggagaggcgatttcgtttatttgcttctatagaatgtgaagggcagttattcatgactccgtatgattttattttggctgttacaacagatgagcccaaaggtaagtacacttttgaaattatcttaataattgtataatttttttatctctagcttgtgaatggatggagcagtataagttttttagaagaactgagtaatgtggtatttcacatgatattgtgctattcagtgttacagactgatatttcttacaaactcttactcacatctcttctcttttcagaaactttcaattgctccatctttctcagcttaacaccatcttacttttgatactctttataaaagactcatattctgcctcttcattcttatatcaaacctgaacagagtagttcagaggactggctttgaggttagccctgggcaagaattctacctgtatctcttctgcgtttgtcatagctcctgcagtgtaaatatattaatagtttcattgtctctcaccttttcatatgttagaataatggttctcaaaatttttggaagtatgtacattcttgcaaatctcttaatatctaacttaacagaagacagctgtattctcatgtgtgcttttttatttgatctgttataatatgttgttttccatgaaatatatgaagaaaatctacctcacagacatggacagtaaaaaaaggagtattttaattgcctttttagattattataggtactctcctttgatactgtatcacaattggctggtggtagttgcagcttcaaaagtctctatagatggtggtaaaagagtaatgagaaccgaggatttctggctggcttacctggatggatggcactagggaccaggtttgaggagaaaaatcacaatttcaattttggtcatgtctatttgagataccttggatatataaaaggatacagtgtatttttttaaaaaataattcatttcacttcactgaaagatcactcactaaaaatcagtataacaaataatcatttgttcgacccatatctactttaaactgtcacacaaatactttaacttagactagaacaattatagccattttttcctccagagacagcaatatggcaaaaatgaaccttaaaataaatcctcaataatttgacaaattg

SEQ ID NO: 16084 - DNA, 1111 bp, Homo sapiens
agtcagcactttgattttgcattgtcattataaagacattcatgatctaatgatgctgaattccatttgaggaatacatgtgcaggggaaacttttttatggcttttttttctgttttttttctttattatcatatttaccttacaaggttaaaaaaaatcaggcataaaagagaggattttcaaaattgaaactttttaattcttttttattggagctttttttttggaatttagtgctgacacgacagtgtttacaaaatacttttacctattattctaatagcaggcagcactacccagtgaaagtaagtctgagtgaattttacattccagttggagaacaacgtcaaaatgtgccctggaaatgtttacttacaagatacattgcaaatgcttaatctgtttttttctcttatgtgtagatcctgattttaataaatttggcaatactaaatgtattttcatttcctttcccaatatagggcatcacatttgatgaattcaggtcatttttccagtttttaaacaacctagaagactttgcaatagccctgaatatgtataactttgcaagtcgttctatagggcaaggtaagtaatcatctacaaaaattaaaagcaagaagtaatactacattgtttctatagattttggcaaccaattaattaaatatgacatatcacccatcaacttgtgtgaaagtccggtgtatactttcagtgacaagtcagttctggtacttgtcagaaaacagccatgagggaagaaacctcatggccactgggtgacattgagggacttgtgtgtacctatggaggaagcagctggtcgtgccctgttcttacagggtggtattttattttactaatttaatgcctgctgactcagaaactggaattttctcagcagagccacctcttagccatggatttacattaaccaactaacctgtaaaattgagtatcagttttgcataattttcaaataaatacagtggtcatagaatcccaagtgctggtgtcctcagagccagctgtctttggctataggtggactaagaagccaagcccttttcctaggatcctgtggctgtgatcaccttccctct

SEQ ID NO: 16085 - DNA, 2194 bp, Homo sapiens
cttctccaaaaaacttggaataaatccaaggaccagtttttacccaaatatatgggtagcacagtttatcacatagaaactccattaatcatctgattttccgaatctgaaaattgagactattaagatattaggatttcagagatttcaagtcacattataatgataagcattattcataaaacttgttacctttaagaaggtggaagtggcaaaccatacttcttttttttcctctgatgtgaatccagcctcagactgagtgaactgtaataattatgaattcattacagagtccaggtggcctgcagttgaagatcatcaaccatttttgcctcacttaattccagccttttgttttctgctggaaaataagtgtggacattgaagcttgagctctcaaagcagttggctggaatacttttgtcagaatacggtacatttctattacatcagaaatatattttcatctcttcttgttaaattgggaggaaatttatgatagcaattatgaagattgttttatgacattcttttgtcagtttggctttctaaaaatctctttttagattatttctcctgttgaacatagtaaaactattgaatttctcttaagaattcctaataggtcaatagatttaccctccagtgatatctatattatttctttctcgtctcatcaaaatgatgacaggtaaactatatttttccttaaacacctattacagttaaattatgcaaatcattaaataaaaatcatacaacttttggaaagttagttcaacatgaactaaaatggcatgctatttggaaatttagtttgagataaactaaagtgtgttgatgccagaatgttcagcttcagtaaatataataagctcttgtgccttgtatgcactatttaaaaaaagttttttttatttgagtccagtataattcatgtaaatgttaacaattagaataatactctgtatgcttttttgatactgattttgagaatttaaagcagattaccttttaaaactggaccaactaagtaattggtatttaatcaaagagaaaatggtaataaacttttcaaaatctttgttaaaccaaacattcaacacaaaataaactagaaggccagaggataatggaataaaagatcattgcaattacttatccttcctaaaaatatagttttatattaattgtgcttatggaagaaacaatgtcagccaagtccattttatagtttgagtgcaattctttgaacaatagaaatatctgcagtctttcacagatttgtattatgctgaagagtttcatctgacaatctgcttcaagaaatctcagaaaatatgataacattttaactttcattttagagcacgttttggtcatttttaaaaatacctaaagtgccagaccggaacctatagctactgctagaagtcttaaaaaaaccaacagcagcacaggatgtattaagaattatatgaagtcaggtttgtttttttttttttttttttttcaaagcacagtactgttagctgtttttgtggacaggattcgattaagtattccctcttgtcaaactggaagctaggggaaaaagagggatttttatcctttactcttctagagtactgttaatgcccctttcccacagtcttttatataattaaatatatgtcaatacacattagaatcagatttgaaaaagttaaaacaatttcattgttgtaattgttccctttctgttttcatatagtgaataacctttaaagggttgttttgttttgttttgaattataggagttataatctttggagatgattgcatatctcattagatatgcaatataaatttatctgagtgaacaaagtgctaaataaatagatctacattttgtacatatttatataaaatttacctttaagtatttactttaaaaaatttaatggcttaactcgaacttgaagacacatacttcaactgtccttattgtccattaaactgataattttgatttttcttgcttttatagattttactatataggaatcaagatttaagaaattttgcattaaaaatagtgtaccaatgcttcatatacgttagttatttgctattatgtagggaagaggattgttatttcaaagatatattaaagaacagttgcatctgaatataatcatgatgcattca

SEQ ID NO: 16086 - DNA, 1947 bp, Homo sapiens
gcagtcatgacatgaaatagtccttttatttttatttcgagctacacacatgcttgtatataggttttatctctggttgaatccctcgaacaatagacagtacctttcccccccctttcatggcccattttattgtctgcctttcagtactaagtatgaccgttcctatctcagatcttaataaaaagaaaaaaaaaaacgcattcaggttaaatttggccttaatttaatatacttgttagcaagcgtgtgtgacagagagtggggaaagctacatcattgaatattttgataaactttaccgacttgagtttggtttatttttcccttttcctaaattaactagcactgactgtaatttatttccctgtttcacgtctctcccttccattctgcaggagttttagctatttgagatcgtggaccatcagttttgcactttagagagtgtttctgactctaaacctgttttatcagaaaatttgttttttcttgatcttagctggaaaaatctgccaactttacacagtatttacttggttttgacccacagaatatagcacgttgtgcaaactgtcgattcagcgaaacttaaaaaagacaagaaactactgaggagcttagtaactgctgtttctgtacgtagtgtttaatcttccaagcacatctagtgtctgtcagtttctaattggcatgtgtaggctgctctgtgactgaagaattttcaaaccagctttacacccttcaggaaaaatcccttgtgattggatgtttactatctgccaggaaactggtactcaagatgttgaagctacagttattttatgatagcacacttcccttgatctgcttatttttattccatcaccatttaccctttttttttttttaaattttgtagccattcttatgatgctcttgatttgttggttacacaaatcaattttattaaaaatccaaagataagtctttaggtatattttgtaccaaattaaattagaagacaaaaattgtgctttcatagttgctacaaaggtaaataatggagagatttggtacaaaacaacaaaatatatatatattctcatatatatatatatagctgataaaattacctgaggagtgtaatgcttatttttttgtgtatatctttgcaatctattttatatatattgacaaaagagactgtgaaatacttagccatgcagaatatgtgaccagaccagagcatgtgtaggaagactttacggtaatcattaactctaccccgaaatgatggactacaagttataatgtgtgttacctacacttcaatcagtaatattagcaaatctccaaatgttagtcacattggtttgtctcccttgtacattctttattcatgatattacagtgctgtaactgggtggtcctttttaaacaaaacattatttgcaaaacagagggtattatttgtttttaaagcttttgtaaataaaggcttcaaaatgttttcttataaatgttgatgactggtgattttcttttggaaatacttatttgggggatattgttcatttttatttgggcaactcaacagaattcagtaacttccttcattaaccctagatgattattagtccattaattgaaaaatcagtctgagttttctgcatttcaagtgttggcttattcttgttctttatgagtacctcaactagctaattaaggactgacttctgtttctcctttccaggaatgcatttattccgaaggatatacttcacaaagtaaatacatttggtataactgtggctttttaaaaaatctaacacaatgtagtaagtttctaactggcttcttttgtcttcgttaaaaaggaagtgaagcttcttttcgcttgtgatttgttagctgagaaaactaatatttaaattctgttcaactatttgagaaatcaatgctgga

SEQ ID NO: 16087 - DNA, 1182 bp, Homo sapiens
aatttaagaaataagtgatattctcaagcaattaagttaaacagaattaagaacaagaaaaaaatacttaactatattactgctgtcctattttaagaaacctaagctgaataagctccttagtttcatacattgttctttacctgagttaagttgactttatttttaatttcaggtcactgtataactgtgaacacttccccacggttgtgatttttaaagaaagtagatatatcgatatatccattggaccaaaatttacttttacagattctgtcaagaatatattacagactgctctatgttccattgtggttgatgttttatttgattttaaggttaaaactggcagccttaggtgtatatgtaaaaattatttagaaccctatcagttaactaaagctgaaaaattgtaaatagttgtcatggagaaaaactcgatgtctgatatttattgacattttttcttttgtgtttctagtgtgtcacaactcacagatatgaatgaacaagaggaggtattactagaacagtttctgactttgcctcaactaaaacaaattattaccgacaaagatgacttagtaaaaagtattgaggaactagcaagtatgttttccctctcctgagcgcacatttcctgaaaaaaatctcatctttacctagaagtaaactagagatttatcttacaggaaaaaatctccttttggagcccagcttggaagccaaaagacaaactgttttagataaggtgagttagtgataattttgaagaaatttacataatttaaaaatagaataaaacaaccttttcattttctcttttagtatgaattacttacacagatgaagtccactttcgaaaagaagatgcaaaggcagcatgaacttagtgaggtaagactgtttatttttttccctttgccatagattttttttttaatcttatgtgcatgagtcctgatctcactttcattatcatcagaaaccatttatgaggtatctgaccttataagacatgatacctttaaacgtggatgaacagctctcagtgatgaggcatcatacattatttgtgctcatataagagcgtatttgtttctaaaacagaaaattatgacaggccctgacacataacttttctgggtaagttatgaaaccattgtaacacttgtagtgaaa

SEQ ID NO: 16088 - DNA, 1613 bp, Homo sapiens
acaggaaatggtgcatgtcattgagaactactttaatgcagctatgaaaagggaaaaaagtgcccagttcttgatttcttagatactgaagaggacgtagtcatttcatttatcaaatataaggaaaattattcaccattttgaagctcaccctagactatgaaaattatattcactgcagagcaattacttctgtcattacctgaagtgatcagtatctatcttccttgtcatagcatgcatctctcaaaaagcctccactcctttccctcacatctgtgatcatcatgattcttttagttcacttctagatgcatattttgtgttttctaaagcatctgacattatcctcctttccgaccctcttatacatatttctaaaaacaggcacattggtgagatgcaccctttttagttaatagatgcattcctaaggagcttttaattgcttatctttcaggcataatcatcactttaacttttccttggagcatatattttgaattgtgagaataattttgttgcttttctctgagatctatagtctgtttctcctcattatttaaaaatgctaaaccttgtatctcactttttctctaacactgatttaatagctaacgaggtagaagcaacattcattctcctggtcttacatatgaatttaagtatcagctttcttgtaataaccttttattactgttctagagactacactaccgacagtgtgggccagccaccagcctgatctcaaagtatcacattataaagttagtagataaaacatctgtgagtgaaaatccagtttcaagaaccagagaattgggttgtcatgtctgtttaatgaagggaataggttttgtaatctatcattttagaaattatgtaactggctaatatggtttaattaaccttagtaacatctcatgaccactgactgctgaaagttctgaaaagaatttttgttttgttacactgcacatttaagggagagtccctcccctatcttatgagttaaaaaagacttcactaggtgacctaaattaaacttagtggggaaaagtggccatgtttggacataaataaatggtattcacactgtatggttttaatatattagtacattctagaatgtaaaaggattaaactttacaatttagatcaatattttgaatatgtgaaaggattaatttaaactttacaatttacatcaatattttgaatatctgattttttttaatgggagaattattacatttcgctgaaatgaggacgagggcaagaaagcaacattgctgatctctctagtatgaaagatttggagggagtgttgcaatatatataaatgaaaacatttaattgtgttcatcatatttaaaaatatagaatatattagagaactgtgatttaaaagtactgttaatgtaaaaaataaagcaagtgtaattaattctttcagaatataaaatttgggcattctctgctgagcagttcccaaattaagtacaaggaatgtttattcattttctgcaatatactatatgtaatagggaataccttgctaaaataaaacttaggatatagtggtaatggctttcacatttttataacataac

SEQ ID NO: 16089 - DNA, 1170 bp, Homo sapiens
cagaatgacaggattaggccaatactttctatgggtcttccagctgtgacagtttgatgcccctctgtagcagaaatcccttcctacatctgaaaacatctcagccccagagccatttccatcttctgtacataattggcagtcagtctctcaggtcacagtgacaatacctgacattgtctcaggtcacagtgatcataccctgggcatgattatttgagcagcttcaacttttggagattatcatgcagagtttggctgttcctgctacaaactatgttttttatgtgttgaaaaattggactccttggtactgttattggaaaggcagtctgactttagtctgaagactgttcatcatttatcaggacccttaagttatttaaattttttatttagtcatttcataagatgacctggagaacataaatattcttctttgcagaaaattgctcctaccagtgctgatagcatacacatttggcttttgtttttaaatgggtaatctttggtttctcgtcaggaaccatttctcctgcccttatgcctgtggtctgacactactgttttctaaagaacatgcaaactgaccaagttctggagggcagctgtctgtttcataagggaacatggtgcttgcacgtaacttttccagctacgtgcagtgcagtaggctaggatatctttctggatgcctgtacgtggtcttgaccaatgtttgactatctgtttttaccgagtaaattataaaccattgcggaggctgagctgatgatgaagtgttgcaatcagacccaccttctaaggcttttcctccttcaaacagctatccttggcatcaaagagatatgaaggctcatactactggtcacttggtaggcagaggaatgaatgatgcgtttcattcatgattattattttctgaattattttttactactgttatggatataatcagaatagattctgaataacagaaaagtaaaattgtttgcgttctggtttcaaacagctgtctgtgagcaagagctgcaaggtatttcatcagaaactgaaatctaggaccaagttcacatcctgtgtaggtcctctatagagatgatctaattttaacttccatttgtaagtctcaaccaaactatttttgtgggatctgtatttcgtaaggag

SEQ ID NO: 16090 - DNA, 1179 bp, Homo sapiens
aataatttctattttattaatgtcaccattaatcgtatcctatgcatttgagaacggttatttattttgtattttttctttcagcaggaaaatgaagcaatatcagtgaaaaggaaagtagattatttaaatggttttgaatatcataacttagaccctatctaaacatctctacacattcctaatattttgcacagacaggttctttgtattgcttgcccattagtggtttgacttgaattttaataaacaaggcttgatttccagaaagctgtatcacgttttcataagccgaggtggactatcagtgagccaagggctctttgttctggagacacacgtagagtgtctctcatgggtacagttacctgatggtgctgtgttgctgtgacctctccccctaggcctccatctgccggagcagccagcccctgtccggcttcagtgcccggtgcctagaggacgagcagatgctccaggccattaggaaagccaatccaggaagtgacttcgtttatgtcgttgacacccggcctaaagtaagtgtcaccgttgcgatgcatgtctttgcacctgagttgtgaaactggagacaggcaaaggctagccgactgccatctcttgtgcaggttgcttcatctgcaaaggggcggttcctcttggcatagtcagtgtctgggcaccctgctggctacttcctggaggtctagtgcacctgaagcctccaactatacaagtacatttcatatttcccctgcccctagcattgtgctgggcacacaggggcacccaaatgaatgtggcttcattttggagattgtgctcctaagtataccgtattagtacttggtttctttctaaaacagccctttctgctctgacaataaaattcactctggagctccagcagttcaattgttgcgaagtactcagctattatttttcaaattcaacttgtagtaatctatacctatgacttggaaagaactataaaatataaggtaaattaaaaaatatttttttcataaaaagttctaggtgtgtaaaaaggtgtagaaaaagatctgaaaggttaaaccctgaactctaaaaattccatggagaagggagtaggatttgcggacgtagagggctttctacttgttgattgttagaaaagtattagtttacaattatgta

SEQ ID NO: 16091 - DNA, 1206 bp, Homo sapiens
aaaatattaatttaaaaaataaaaagataaaataaatcccttcttttgcagcctgcccgaccaccaacagcttagaaaacaacaatcccatgttgatacagaactcgaacattccatgtggaattaaggagcatggtggcacctcccagcggagccatctctaacttgtgttgactgcagaagtttattttactaacttctcatgaccttatttaattttagctattaagcgcattcaatatttgactaccaaaatgtttccatacctggacttgtgcaaatttatatgctgaatggtttacttcaaaataactgtcctggatatcaggaagcttggtattgaaaaataaaattataaatttaggaagttggttcttacctggaacatctcagtgcttgtcatctgaacgcaagggttgagctagctggaggttggggagcgtttcttgtctttctttgagccacaaagaaatgttagtccttgtcgtattcattagttatttgtgcttagcttatgcacattaacatttggttctagattcttcacagtcagatttccaccattgagaaacaggcaacaaccgctaccggatgccctctgctgattcgctgcaagaactttcagataatacagctcatcatacctcaggaaagagattgccacgacgtgtacatctccctgatacgccttgcaaggccaggtagggcagaggaactcggcatttaatatggaacctctcttaaaaatttgcaaatcagattcaagaatttgtatggtgcttaggaatgataggggttcagggattatgtgtcagtctcgttctcaggagaggataagcccgaatgatcatctgatacagagtttcttgtttttttagagtctcccccgagttatttattatgtgagtctctttcatgaatcttagtattaacttaatcttggtggggttataggatgctttccttttggggtgaaattgcctttaagttatgcacttcttatattgtggtaatcgagccaccttgaatggggccagtgacagaactaatcagttgttttgtgtggaaaatgttatcagacagttctagcgcagttttctccctcttgatgcttttaaggtttggtctccattgcttttttgtttcttggggttttggttttttttttttttttttttttttttgaggcactttttctccgtcgcc

SEQ ID NO: 16092 - DNA, 1196 bp, Homo sapiens
tcattgtgctgcagggaatattaggaataaaataacttgggttcccatgagaatatgattgtggtaatggttagagtgtacagtaaagatagcgtgtaatgaagtagtgtaggataagtagaaaccaagtagtgatcagagaggtcacagcaattcagaggacagtgaatgatcccagtggactggggtagttgaggaaaggtgttattaaggaggtggatcttgggtgtcaggctggaggtgagtatgttgcacttggtgagtggcagtgtccttttcttactgttcttggtgacctcagagtgcactgtggcaggcaatcatgcagctttgcttattgggcctcagaagaggcctccacatcattgggtctgcaaggcattctgctttatactcatttcccagagtgggaatgatggacactttagggccggactgtaagaggagaaagagaaaaatatggtgccaattatgcagtctgtccttggggtcttcgaagccgaggagtgaggcatgggaatgtgtaaatgagctggaacctggccttggcctgggtggacagagtgtacccctttgtcctctggcactggtacttgccaggggttggtgggagggagagcatgagacttgggtctctctgtgcctgggctttctcctccctttggttagtaagttctatttggcacaacttgcccttggaaaaatatttccccatagttcccaaagagctatataagtagatggtttcgtcctttgctgttagtgcctttgtcaaaaataggtcaaattcagaatcattttagaattttagaaatatcgttaaaggaaaatcataatcaaatgagcctctgacttcctgtattgcttcaaagcaaggtcttgttctccctatactagtatatgtttttaaaatgactttattgttttgaacccaactatctttagtaggtcattccatacatttactctttgggatacaaagcatcatgtattcactgagttacaaagaaccagcatctgtcctgaatttatttttcttttaacctcttttttcttcttttcctcttctttatgcttgttgaaaatggtatttttggttggggttattttaaggtggtgttgaaataaatcctgggactttgctcttgttcaacagtgcatgttcttttaagcctacatatccagggtcatcctac

SEQ ID NO: 16093 - DNA, 1100 bp, Homo sapiens
aaccctcaagtcacaccatcagaagcccaagacatgacttacacagcattttctgatgtggtgatgcaaagtgaggtttttgtttcagatattggaaatcagtgtgcatgttcttcaggaaaggtcaccagtgagtacacagatggatcacaacaaagactagttggagaaaaggagacacaagcactaacaccagtttctgatggcatggaagtccccaatgattctgcattacaagagttcttttgtttatcccatgatgaatccaatagcgaaccacattcacagagctcatacaggcacaaggaaatgggccaaaatctgagagagacagtgtcctattgtcttattgatgatgaatgccctttaatggtgccagcttttgataagagcgaagctcaagtgctgaacccagagcataaagtcactgagactgaagacacacaaatggtctccaaaggaaaggatttgggaacccaaaatcatacctcagaattgattctaagtagcccgccaggacaaaaggtgggctcgtcatttggactgacttgggatgcaaatgatatggtcattagcacagacaaaacgatgtgcatgtcaacaccagtcctagaacccacaaaagtaaccttttctgtttcaccgattgaagcgacggagaaatgtaagaaagtggagaagggtaatcgagggcttaaaaacataccagactcgaaggaggcacctgtgaacctgtgtaaacccagtttaggaaaatcaacaatcaaaacgaataccccaataggctgcaaagttagaaaaactgaaattataagttacccaagaccaaacttcaagaatgtcaaagcaaaagttatgtctagagcagtgttgcagcccaaagatgctgctttatcaaaggtcacgcccagacctcagcagaccagtgcctcatcaccctcatcagtgaattcaagacaacaaacagtcttgagcagaacaccgagatctgacttgaatgcagacaaaaaagcagaaattctaattaacaagacacataagcagcagtttaataaactcattactagccaggctgtgcatgttacaactcattctaaaaa

SEQ ID NO: 16094 - DNA, 1193 bp, Homo sapiens
acctaggttgatttgatttcagatctctttttgatacgtactgactttataggagatcggtaaaggtatctgtaatttatttcactatttataatagaaaatcacaatgtaaaaaaatcctcttggaaatattcagattgattttagggttggcatttgaggatttgtatttgttagtgatcttgataagaaaataatctcttttcagaaggatgggctataaaattaaggtagatgtaatgaggggaaaatgggttaatagaagtaaatatttgtctctaggagtataagtctgtcaaaaatgtcttgtcttttttaattttaaaactgaccaaaactttttaattataccaatctattttcctggtttgatacaggccatgttaatttttgcttttacttttttaaaggattggggtgcccaacagaagaaagcaaatagatcatcagaaaagaataagaaaaagtttggtgtagaaagtgataaaagagtaaccaatgatatttctccggagtcgtcaccaggagttggaaggcgaagaacaaagactccacatacgttcccacacagtagatacatgagtcagatgtctgtcccagagcaggcagaattagagaaactgaaacagcggataaacttcagtgatttagatcaggtttgtgaattatttttaaaaatgaagctattactgtgagaaatacttgaaatggattaaataatttgtcttaggaataaaaaattgagctgtttatgtaatttttaaaaaaagtttctgtgcctatggaaagaattttaatcactggggatggtcctgtcttctttagaaggaaatgaagtcccatttctaaacttgctaaagacatgcatttctggactttatactatgttatatgactaactcaagtgattttactatacaactaaattttgcattttggtaactgaataaaatggtattaagtaatggaaagttccagtttagtatatatatcattggctaagtgtgggatgtgctgggttacctcaagtttagaatgaaactattttctgtttataatcaccaaaataaagtttagatctaaaaacaagtagaaatgataataaattcttgagagatattttactcttagatctatatgtcatagagacacacacatttccaaaaatgtagaaaggtagattcaagtctgat

SEQ ID NO: 16095 - DNA, 1175 bp, Homo sapiens
gcctcccgaagtgctaggattacaagactttcaggtcattaacccagtataatgtgctccttttctgtaggggcctagattcttcagtgtgtgtgtgtgtgtgtgtgtgtgtgtgtgtgtgtgtgtccatgtgtccgtgtccctcttggccttttatgttttgtatatctttttcttttccttttgttcattcctcttcctgctgagccattgattatgtagctttttactgtgaaattacctcttaagtggcaggctatatatatatctctgtgtcatcattctgttcttactcttttttcttgatgtctactaaaactatatttagggttgtatatttaataatttgttatcaatgtgtatactttgccattgataattgaaaccgcaacatggattttaatagtcagatacaagtattgttggtcttattttccaggccagagatcctcagcaggagcctatggaagagatagaaaatttgaagaaacaacatgatttattaaaaagaatgttacaacagcaggagcaactaagagctctacagggacggcaggctgcacttctagctctgcaacataaagcagagcaagctattgcagtgatggatgattctggtatgtcacagtctgagaatattctttttgtaaggaagactcatacataattgtattgcagggtggatgctgattattacataatcagatcttgattgttgtctagtttagaaaccttcatatgaggcttatactttcctgtgcttttctctggttatgcagaaaaggttgcagggacaactggccatcatactataccatgcagatagccagatctctctccttttcatcagagagtacccttaagaggtaaaagagacaggctgtagttctgtttttgtacctcagactgataaggctcatgatgcgtttatttcctttttttctattttattcagctaggattgtcattctttgcttgcctcccaagaaagggttaaaaccttaagtgaggcagtgagtaaatttataaagtgtctttaaccttcaaggttagtagtagctagtagctgttattttaattaggtatccttttgtatatgctagctccttggaactatatttatagtgtatacattcttcgtaagactcagaaattttcttcctcctttcctcata

SEQ ID NO: 16096 - DNA, 1141 bp, Homo sapiens
tattaggtattataagtagtctagagctgatctgaagtatataggaggatgtgtgtagattatgtgcagatactacaccattttatataagggatttgggtatctgttgtttttggtgtccccaggggtccttgaaccaatccctcatggatactgagggatgacttcatatgttaatagtggcatatcaggaaaccgtatttaatttgggaatagtaagggtatatacttacctaccagcacagcctagcaaatatttctttctctttataaagaatatttatgcatttaaaaaatgagaatgcatttaattgcgttagtcttaattcttcttttttgttgtttttttttaataagcctccagctgttccagacaatagaagacaggcagaaagtctttcattaactagggaggtttcccagagcaggaaaccatcagcttcagaacgtttacctgatgagaaagtcgaactttttagcaaaatgagagtgctacaggaaaagaaacaaaaaatggacaaattgcttggagaacttcatacacttcgagatcagcatcttaacaattcatcatgtgagtaaatctggttcagcagtattgggtataagacacacaagtatatatactgtcacataataaatttagtatttggtgaatgaacacatagctcctcaaaaatatttgtagggacttaagacttgcatatgaaaagtttctaagttgcaagccaatatatatgaaagccaaataggtgataaatcagttttataattcagaaaagggaaagaataaagttggaccttgaaaaattagtaggattttaataagggaaaggtagaagagaaggcaactgtttgatacgtggacatattaatactttgtttcttaacattcaaaattttcccttaaagaaaagttaatccagttagtactttgatttaaaaacccaaaactgtgaaacatagtgtgtattaaaaaaaacaaaaaacaaaactatgaaaaacttttatatatggtttagtctagagagcccagaacttccaactgctggatttatattcatttttaaaaaatatataaataatcatctcaagcaggtataactgcgggagttatcttttttgctccacacgtgtttaa

SEQ ID NO: 16097 - DNA, 1099 bp, Homo sapiens
acatccccctgatctgtgggtatgaaaaactgatgaagacctaatcagctacagctaccctgtaaagattacagattgagtactgcacatgattcatagtggccctgtttaacttaacctagaaccaagtttatcaagttagttaccaagtttactcgttagttaaaactaactagagtacttctctagttagttttccaaggtagaatatcattattcttgtcaatttccatcttttttctttcctttctgttttaacccagtggttatattgtaaaggtgatagaacctgtggaagaaagaggtaaacaagtctttgtacattttgatgtgtttaattgtggagtaagttaataaacaattttctgaaatttaaatctgcagaaattaagttgttaatttttactttttagttttcaatatccaagccaactgtatgtgtttgtttatggtaactggtgattaaaaaaaattttttgttgttgtgccttcttcagcctctccacaaaggagtgtcgatcagagaagtacttcagctccctctgcttctgtaggcttggcaccggttgtcaatggagaatccaatagcctcacatcatctgttccttatcctactgcttctctagtatctcagaatgagagtgaaaacgaaggccacctcaatccatctgaaaaactccagtaaaacatttataatcattgtttacatgaagttaaataatagggataaattctgtttttttttttatgttgaaaattctgcaaaacgagatttatttaatattgttgtaaacattcttaagggataggtagaagaggcgtgtgtgtgttgtgtgggcataatttgagttgtctaagagatgtgatgtaacatagtttctgtgaactgatgttactttcttgtttttcaaataaaggatcaaaaataagattacagttaaaatatttctatattcagatggtttagagaccaggctgtagaatcagacagccctgaaattgtatcacacaaggctgtgttaccctgtacaaataacttagccttactaagcctgtatttcctcatctgcaaaatagggatgataatatacctgttgat

SEQ ID NO: 16098 - DNA, 1201 bp, Homo sapiens
ttttctggggatgtttttccagcatattcattctgtcttgatacttataatgtgggaacaaaaatacttcgttgtagtatttactatttgccttttatttaagctttctactattttggtcagtgtaatcatctctgccctgtgaagaaagatgaatagggaagtatggagtacaatagttcagtaaatttgccctttgttagactgaattcgagtaaatcatgagatgtatctaacttagcattttgctgtctttttctttttaggcgtaattttcattttttcagatgtttttctacttaaatagcacatatgcagaagttaatgaaaagcaggagtcgattattcaatttgaatttaaatggaatagccaacaatgtgcttggtttggtgttattttattagcagttctaaacttggatttctttctctctttttttgtgccttaaatgacttcaggctgttttctttcttctagaaatccacaagtagcttccacttggaatgaagtaaatagtcatagtaatgcacagtgtgtttctaataatagagatgggcgaacagttaattctaattgtgaaattaacaacagatctgctgccaacataagggctctaaacatgcctccttctttaggtatgactgactgtatttacatataattttgctgtgttattcttacaaagtgggttttcgttcatgtgtgctctttcctttaaaagttactggttttaattatacatgttttcagcagattgtcgatataatagagaaggggaacaggagattcatgttgcacaaggtgaagatgatgaggaggaggaggaagaagcagaagaggagggagtcagtggagcttcattatctagtcacaggagcagtctggttgatgagcatccagaagatgctgaatttgaacagaagatcaaccgacttatggctgcaaaacagaaacttagacagttacaagatcttgttgctatggtacaggtaaatattgcttggtcttttaaaaacctatttgtcaaatagtacagtcttaagtaaaatttgtgtatgataattactttggtttaattatactaatacacatttatgtatcatatgtgaggtttaaatttttagcactttacatgctgtatgtcagaggtcagcaacctttttaaattaagagtgagttggttagatagttgcggctttg

SEQ ID NO: 16099 - DNA, 1099 bp, Homo sapiens
taagtaatttataaagcatttttattctgtttttcagaaacggtgggagcccagagtatatgagatgtcttcagaggctcatctaactctgtccttacatactcaatgcatatatgaaaacaatactaaataaacatctgatctgtataaaaatgtaaattagtttgacactgcttttttgataggtgtggtcatttctccccatggtagtttaaaacatcagaaactgaattctggacagatttaagccttgacacactgtgtttttttttttttcccccttcttttttgggtcttcatttttttccccattgtgatgtttggtaacgaatttaaaatgtagttttaaataaagtttggacttatctataaagtatcttttttggaaattatattgaattctatacagcaagtcaatgttttatataactttaggctgctcagagaagagcaatggttaagagttagttagagaaatatattatttgttataaagcccatccattaggccagtcttccaactaatgccagtgttgctgctgttgggtctgatgttcttcttttagatacctgcaggtcctattcctgtgcaagaatagggcagattatcaagatatccaggatacctatgaagttattatagaatatttattaatccattgaaattggataataagtttagaacataggttctcagtatctagaacttacatcattatcatctgtttgttaggatttgaaattctggaaaatatttatctacatcgcctcagactaaaagtaaaaaaaataagctttatataattagggagatttctgcacagagaagtaacattgtggttaattttaaatgaaaaacttaactttttcaagtggggataaataatacaactaaatttctgtaatagtaagattctgtatgccttcagataaacttgcctattgagatggtaatttaaagccaaagcatagcagtttcttttgtgtgtagtgaggttgaagcagatttgcaggtgaagtattgaaagtttatgtgactttaagtcagcttttgaaaagtgattgatttgctttttatcccaaactgtccatataccca

SEQ ID NO: 16100 - DNA, 1292 bp, Homo sapiens
cagaacatctctgaattgaaaacgtccttaaagtaaaaataacttttctttcagctgaccgtatacacaaccttgatagatgttaccaaaggtcaattcgaaacttacctgcgggactgccctgacccttgtataggttggtgagcacacgtctggcctacagaatgcggcctctgagacatgaagacaccatctccatgtgaccgaacactgcagctgtctgaccttccaaagactaagactcgcggcaggttctctttgagtcaatagcttgtcttcgtccatctgttgacaaatgacagatcttttttttttccccctatcagttgatttttcttatttacagataacttctttaggggaagtaaaacagtcatctagaattcactgagttttgtttcactttgacatttggggatctggtgggcagtcgaaccatggtgaactccacctccgtggaataaatggagattcagcgtgggtgttgaatccagcacgtctgtgtgagtaacgggacagtaaacactccacattcttcagtttttcacttctacctacatatttgtatgtttttctgtataacagccttttccttctggttctaactgctgttaaaattaatatatcattatctttgctgttattgacagcgatataattttattacatatgattagagggatgagacagacattcacctgtatatttcttttaatgggcacaaaatgggcccttgcctctaaatagcactttttggggttcaagaagtaatcagtatgcaaagcaatcttttatacaataattgaagtgttccctttttcataattactctacttcccagtaaccctaaggaagttgctaacttaaaaaactgcatcccacgttctgttaatttagtaaataaacaagtcaaagacttgtggaaaataggaagtgaacccatattttaaattctcataagtagcattcatgtaataaacaggtttttagtttgttcttcagattgatagggagttttaaagaaattttagtagttactaaaattatgttactgtatttttcagaaatcaaactgcttatgaaaagtactaatagaacttgttaacctttctaaccttcacgattaactgtgaaatgtacgtcatttgtgcaagaccgtttgtccacttcattttgtataatcacagttgtgttcctgacactcaataaacagtcactggaaagagtgccagtcagcagtcatgcacgctgattgggtgtgtacatctgtgttggtttggaggaggggggtt

SEQ ID NO: 16101 - DNA, 1135 bp, Homo sapiens
cgtctctataaaaaaacaaaaacaaaacttagccaagagtgatggcatgtgtctgtagtgccagctattcaggaagctgaggtaggaggactgcttgaggccggaaggttgaggctgcagtgacccatgttagggccactgtactgccagcctgggtgacagggagaatgtctctaaaaataagataaaaataaaatgggaccttgttttggggaaagcaaagtggcttaaaagataaatgaggaaatacatgaaaagcactttaaacagttcttggcacctggtatgtgctcagtaagttgttagcatctacaaaatattgcttgtgtattactgataagtgttgtatgtttcttctctacttgaaattctagagcagtgtgttagaaatcaaagtcaaagttactatacatttttggtaggttgtctctcttctctcttactggatttgttagtttgttttctgcttctttgctgcatatatttggtaaatttgttcttgaattcttactcagaatttacaaggatttgcttggcctggaagacggatacttggctttggttaagaatcttcctcactgatatgatcatctatcaggtagagtattatacatattttaggtacctgtgtctgtacagcatggctatggtggcaaaccagctttcctatgcagaatgtgtcatgttccctcttgggctagtccactgcctcctgacacctgttctgttttcagtggctgagggggtatggtccattttcctttcaaagtaactatcggccgggtgtcgtggcttacgcctgtaatcccagcactttgggaggccgaggtgggaggattgcttgagcccaggagttcgagactagccctggcagcatagtgagaccctgtctctacaaaataaaaaacttagccaagtgtggtggcatgtgcctatagttccagctgctcaggaggctgaggcgggaggatcacttgagcccaggaagtcaagactgcactgaaccatgatagcgccactgcaccccagcctgggtgacagtgagaccttgtctcaaaaacaaaacgaaacaaaaactccaaaatgacaagcctgtaccttctgtgttacttttggtatatccaatcacacctct

SEQ ID NO: 16102 - DNA, 1179 bp, Homo sapiens
tggagtctgcctggctgtactgttctccagcatcttagaccttgaatggagatagtcgataattcacgaatgaggtggtgtcggaatgggcaggttgctgcttccatccttcataaaggagaagtggtgcttgtagtaaaatatttctaaagaaatgttatatccaaatgtgctggatcacagggcctggttattttctttagtctcgagacctaagaccagaaagaaaaatcttcatccttataaagtaccgccagaaagaactcccacctggctttaattaagttgatttgattctattgccaattctccgtttcttcctcagatgatcaaaccaagctaccgtctttgtatagttgcttgctcgttgcttcgtgaaccctggaacggtattttttaaatttctttttttaacagcgatgcttttcccctccttgctattctatctttcttagggtcaatataaaaaggcgatagccagcctgcatcacttagcagctctccagggatccatttctcagccacagatcacagggcaggggaccctggagcatcagagggcgctcatccagctggcgacgtgccactttgcgctaggggagtacagagtgagtactgcacacatacatgcctgccgcaggtgcacggggccacctggcctttctcctttccctagcgtggcttttcattcagtgcacgtttatttcaatttgatctttctgcctagatttattacttaatctgctagtgaacatcacaatgattttgttttacgtaattttctctttactacagcttccctgaaataaggcatcagtactttttacatttcttgttcattgttccatttgttggaggatttttctttttattattatttttctttttattattattacactcttgtctcttctgttgtacttggaaacacaaggccattattaagtgggaaatggagatttatatttagcttactcaaacttcagattctctctttaaatggtaataacacgcccgggtgtggtggctcacacctataatcccaggactttgggaggctgaggccagcacatcacctgaggtcaggagtttaagaccatcctggccaacatggtgaaaccccatctctattaaaatacaaaaatgagctgggtgtggtggtgggcacctgtaatccca

SEQ ID NO: 16103 - DNA, 1168 bp, Homo sapiens
taaaaaaagcaatttgcagaaggatacatacaaaatgacaccatttatatagtagactgaaagcatgcagaacaatccattgttgtttacgtgtgtaacagtcataggaatgacaaccactgccttcagaattatggcgacctctgcgatggaagagaatgggatcagagaaggatacacaataggctttaactgattttgtgattattgatattagaaatgtttaaaattaagatattaacatttcatgaagctgagtggtgagcacaccagtgttatattctctctatataactttgtgtatatttgaaatgttttctcataaaaagtatttaagcaagtttaggaaagaatattgataaatgaaatctagagaccatcaaaagccaatttcaccatcacaaagtataattgtgtttcaaatataattgaaattgtgtgactgttgcatattctcttttttgttgttgttaatgaaagcatcttaaacagttgcctttcaaagctgttatctttgataataacatacattaacctaacattgtggacttctgttaggttcggatctgaagctcctgccttgtaccagcaaggctatcatgccatactgcctccatttaatgttagcctgttttaaggtaagcttaaagttgattagcttgaaaaaaaatgtaatttcaaatattattctcatgactcgagaacttgagaaccttgctaaggattgttattttagtacttttgagggcaggcccaaacagttagaaaagcacatgggctactaattaacaaatctatattaaataatgactgcgctaggcaaagagaagtaggaagttctccccgtcctcaaaaagtgtaatagtgggacagatatgcaaataaccttgactgttgtagtgtttggtaaatattttatcaatataaatatattagctacaaagaaagggaatacaaattgcggttaggttcatggagggatgatgagtttgtcattgtaaagatgtgctagattaagcatgttaggtgttgagatcaacaccagtaacagcccaacagttgggaaagttccgggacttgaaagaacgccaaggcccttggctacaggtagagcagagccttagagcagggaggcttcattgtttctggaaggtttgttggccagaga

SEQ ID NO: 16104 - DNA, 1053 bp, Homo sapiens
cagcatttggacctaacaatgaggtaaccctgtatttaaagtccagccctgcttcttggtagttatctggcactgggcaaattacttaggttctgaagctcataagatgtgacagctgatacttgtctcatggagttgttttgcatattaaatgagatcatacttataaattacctaatacacaatcaactctctgtaaatgattttttcctcctacctcaaaaatctggctttcatttgtttcctctctctctccttcctacctgcctgccccaccccagtgttgagaaaccatacaactgagaaatttgggacatttataaataactgttaataccttacttaagaatttgtaaaataacaactgctttactctcctcaattcatttaaaactttaaaaggggaattgtactgttatttccagaatcatttctttttgtgttttctttttggtcttttggtttgagtggcctaagacttaatgttccctttcagcattgagcgaattatcactcctcgcctggctctaaccacagctgaatttctggcgtaccaatgtgagaaacatgtattggttattctaacagacatgagttcttatgctgaagcacttcgagaggtaagttgttcatgtttttccctcagttaaacaaaattggttaattttcagggttaacttgtcactttgcaagttttcattctttatggttttttaattccactgttcatatattaatagaatgccttaataaatcagaaaggaaactacttcgtttttgtcaacttggtagaagtgattagaggttaagatttaaatggttagcctgtttatcatactgtcactatctccatggattaagaaatgattgtaaaagggagtaaataattcaagctgtttattcagttactctctcgggaagttctgtttctgtccagactattaatttttaaacctttttgtaattccatttttaatgatgttaatattttataaagaccctactctcacagtactctcttcagcacttttttcttcagaaaacccagtgttt

SEQ ID NO: 16105 - DNA, 1833 bp, Homo sapiens
aaatcgcactgtctttgagactttggacattggctggcagctactccgaatcttccccaaagaaatgctgaagagaatccctcagagcaccctcagcgaattttaccctcgagactctgcaaagcattagctgctgcttctgcattgctccgcgctcttgtgaaatactggttctgttttctttattccttttgcactctcggttcccacctttgtgttggagtttaccatgttaccctgtaattaaaaacaaagaataggtaacatattgtgccagtgttgcaacgttttaaactgctaacagaccttaaaatatccccctacctgggtcctcagtgctatgtttaaagtgctgcagggatggagtggcgttttcttattgctgtatgtattgtacatagtggagtagttagttacctgataacagtcttgttatttgggtctcttagaccttacctctcaactccctcaagagtaccagtctctgaagttataatgctttggtctctacattaggggcaagatccagtctgagagaagtctcctttgagaagggccaagaggctctttcctgagtgtttgctttcggtttgttggtatgcctgtattgctgggctgtgctgctgctcgaagcagatggttttgactgtctttttgctctttcctatataatgaatagatgagtgaaaggagttttctttttctctttagtacttacgtattgggattcctgtgtcttacagctctccctctccaaataatacacagaatcctgcaactttttgcacagctggtatctgtctggtagcagtgagaccccttgtcttggtgatccttactgggtttccaagcagaggagtcacatgattacaattgccagtagagttgttgtttggggtacaagatgagaagaaagaaaaacctacagcctttctacattctgacatgctaacagtggtttaagtttctaaagtgtttaccagatgctgaaggcaaggggagggagcagaagcacttatgtttacggatattttaaactctgttagagagcagcctttgaaaatccccaatttggttctgctttttgacctctctctaccttttcagggtaatctttgtggcacaaacgatagcatttccaagctttagagttttctgaattcctgcgccttcctgacgtgagccctgagcgatcttctatgcagttctgccatgcgtcctgttggtctctctgtgttctttgttacttgggtgcaatagcaacttccctaccccgtgcattccatctttcatgttgtgtaaagttcttcacttttttctctgagggctgggggttgggggagtcagcatgattatattttaatgtagaaaatgtgacatctggatataaaatgaaaataaatgttaaattaaatggaccttaactaaagtgactctctatcttctaacgaggaaagcaacaagcaaatatgtaatcacacatctcttcaattcacagctctgagcatcataaccaggattgggaaccagcccttgtgttgcagggacatggcttccacactgcccttgtcattctttttggtactgtcccttacagcatgctgtagtttgatccagggctgagcattcctacaggtgctccccagcgttcctcatttcaggcctagtcaggacctctagagcccatctgctgtgagcaaaagagggtgctaaatagtgaaatacagcttgaagcaagccaaaacctgtttcacataaaatctcacatggatgtcctgtatatatagaaacctggtgaaagcacagggcatgctgtcatggagcctcccattt

SEQ ID NO: 16106 - DNA, 1196 bp, Homo sapiens
gtatctctactgcacagacccatgctccatctgaacaccaatctcttaggcattgctatttacatcttcctacatatcagttatgcctctccatgtcaattgtgagctgcttgaggggagagacttccatattcttccctgtccccatacaacagttaacacaggcacatgccctgtgctctctaagtaattgctaaataaatacattttaaaggaatgtttgtgatccttgataacaccgagcagttttcattttgcaggctgacacctgttggaaccataacatcaattttgcgggctgtgacatcaaaatgcccctagtacgcatgagtattatttgctgaaactttcgtttttgtcttaaatgcctgtcacaggctgggttgtggtttaaaaataagtttcttacttttgatcatggtttgaaaaaagaaaaaaaacagtgacaggatgcgtatgacaaggctcctagcttggatgctgagccccttgtgggcagaatcaaagacattgggcaccaagacctcccagctggagaggaagcaactggtttcagaaaagctctcctggggttggggcggattagaagacaggcagtcaagagaagaaatgctcaggggcctgagcacagtcgctcaaactgcttattgtctgggcaacaaataggcactgcaggcgcacctaaaaacctcaagtgtctttccttcagaaagacacaaagcacttaagaccctgcaattgctcaagattttcctctagggatccttgttttctctagagctttagattgtaatagaaacaccgttgccttcattcttttctcacttattaagctgaaaaagtaatctggaatctttagcctttggagatttggcgataatttcttgatgcaaaatttgtatagacagcttgaccatgattgaaagaccacatgaaaaaatccttgaaattgaaattgaaatccttgaaactcaaaattctaggactggaaattcttatcacctatagatgctttgaggttgaattcaaagtgtcattgacccaggcactgttgggagtaggaagccttttttcttagggaatttgagcctcaacctctgtctgcactttgcagcattggctgtgatggggcttgtcttggctgtgatggggcttgtcttctggttccatgttctggacaaatgcttccacctttc

SEQ ID NO: 16107 - DNA, 1499 bp, Homo sapiens
gtcctataccctccgggctggggagagtgccctggagctgtggggtgggcccgagccagggacccagctgtacgactggccctacaggtttctgcggcgctttgggcgggacaaggtgagtgggaagctgcatcagggcaggttgagagaaaggataagctacgaacaaagaggggtgagaagcagcgaggggatgggagagaccaggagagggagatggagtgaagcaaagaatagagtgacaagatggcagaagtggagtagaaggaaggagaatgagaagaggtggagagaccgtagaggggtaaacagcgtctgaactagtgcctagctccatccttgaaatggtggcagtgagcaggaagggcctggagaggggagaggagagagccaagtctctgcctgtaggggaaagcacagagggcagaggaggctccagcagttcccatgaagggaagctggaggtcccagggcttgggttagggatggggtttaagaaagcatccctagctgggcgcggtggctcgtgcctgtaatcccagcactttgggaggccgaggcaggtggatcatgaggtcaagagatcgagaccatcctggccaacatggtgaaaccctgtctctacaaaaaatacagaaattagctgggcgtggtggcatgcgcctgtagtcccagctaccagggaggctgaggcaggagaatcgcttgaacctgggaggcggaggttgcagtgagctgagattgtgccactgcactccagcctggagacacagtgagactctgtctccaaaaaaaaaaaaaaaaatgcacccctgccctgtggcctggccaataacctgctttctccctggtccaggtaaccttttcctttgaggcaggccgtcgctgcgtctctggagagggcaactttgagttcgaaacccggcaaggcaatgagatcttcttggccctggaagaggccatctctgcccagaagaatgctgcacccgctacaccccaaccgcagccagccacaatccccgcgtcgctgccccggcctgatagcccctactctcggccgcatgactcactgccgccgccttcacccaccacaccggtgcctgctccacggcctcggggccaggagggggagtatgccgtgcccttcgatgcggtggcccgttccttggggaagaacttcaggggcatcttggcagtccctcctcagctcctggccgaccctctgtacgacagcattgaggagaccctgccccctcgacctgaccacatatacgatgagcccgagggagtggctgccctgtccctctatgacagcccgcaggagccccggggtgaggcatggaggaggcaggcgacagctgacagggaccctgctggcctccagcatgtccagccagccgggcaggatttctctgcttctggctggcagccaggaactgagtatgacaatgttgtactaaagaaaggcccaaagtgacagaggcagcagagggatggtc

SEQ ID NO: 16108 - DNA, 1100 bp, Homo sapiens
gctatgttgccacgtgggccttgtacttcttggctcaagtgatcctcctgcctcagcctcccgaagtagctgggactacaggcatgtgccaccacacctggctcctgtctgctttttaatgccccacagcacagctgggaccaggccaagaggtttatgactgctaaatcaagggccaggggaaacagggagataagtacagatagtaacctgggcttcctctttttaccgggcctggctggtgtttgtaacatggcactgtgcccagcttgggtgtttttaactctaaggaaatactacactaaaaataatggccttgtctgatacaggaacattggttacctaacgaatttccctcttagcattgcccttaccaaagcagagaagtagccattctctgtaagaaaagtaagacttcatggtttcaccacagtgttcttaagattaaggaagttcagagtgaggaatgtcttcaagaaactatcactggaggtgacactgggtctgtctcctgctgcaggaaggctgacatggctggtttacattattggagcagtgatcggtggccgggtttcttttgccagcactgatgagcaagacgccatggatggtgagcttgtctgtcggtaagtgctccccacagaagctctccactctgccttgctggcacttctccactccccgatagggtcctctccacttacagaacgtaatctgaacatgctaactgcccatgagacacagctttcaaggcttttgtaagtgccatgataactctgcctatgatctttactttaaaataaaaaaccagcaataattcagaaaggaaataatggatacggaattaggaaaactaaagcagagattctctgttaggtctttttacgaatagtatctcagagttagtaaaatatggactgcttttgccatcccaaaataagtctaaaaggaaactgcagttctttaaagttcaccagagatggaattacagagttcctacagcctttcaaatctcttggccatacatttcaagttatttttcatctgtgcaattctcattttatcaaaactttttttttttttttttttggagatggagt

SEQ ID NO: 16109 - DNA, 1561 bp, Homo sapiens
cagcattccgtcgagaagtcaacgactcaatgaagaattccacttatggcgtgaatagcaatgacatgatgagctgacacctccttggactctacctgtacagagcagcgtccctttggtttggcccagaggggcgaacaattgcaagggagagggcctggctgatcctggctcttttctccaggggtgtggggaaaatggcaaaggtcaactagctgcttccccagggaataggggtgtgagtacactcactagggggcagggcgctgctggttcctgggggactgggtgggaagggtggtgggaggagataagagatacaaactgagactccagcctctcctcctggggccacccaagtggggagaacccctagtgtcctgccacaacctgccttgtataaacatgtacattttttcataacattttgaacaaggtttatattgactcaagtttaaaaacaaaaagtgtgactgaaaaatttttacagagtctagtgcaccaatgctgatgtgaggggttgtgtatgcgagtgaagaaaatgtgtattctggtggcctgaagctttactggacaaggatgtgtgagagtgcagagatatatttagtgacacagtagagaggcaaaaaaaaagctaaaattccaaatgtatattttttcgtattgccctgtcctcacccagaaatgatcaattcctgttactgtattaacccttgttattaggaactctaagccatgccagaacaccgtccctccccttggaccgtgtagattctgccctgggtccctagccccttgcagtgataaataactccagctaaaagtgtttggtgttcttatctccaccctctttcctactttgcttaccctcatcctcagacagatgcctcttgcttttaaaagttggatttaacgacgtgttgtagggttcttggtctgtgtgaaggcagagaccagagagaaggaagtgagcccactgctctcctgggagcaatgtgggtgagtccaccagaggccctgctgtgtgtggccaataaattttagtcttccccagccctcgaggcagtgtgtgtggatgtatgcgtgtggatatttatatatgtaccctgcactcatgaatgtatgaactggaggaagttactacagtggaagggttcttaataacaaggtctacctagcatgaagtatttaacattctcccatcccttaaaaaatatacatttttataaaatgaaaaccataataaatgttttgaatattaaaaaaaataataacctacagaggaaaattaatggagacagctatttgccttgtactttttccacaattgttgctgctagttgtacacatctctagttcagctcttgcccacgggacactcatcaattaggttttatttttatttctttcctctacccccagaaacaagcctgttaattttttttccttctcctctggcgactgtgtgatgaatcctttcttgcgtgatcaggttgcggatagacttgtaagggtgtttgctgcatacagtgtaagcattgtgaccgccaataaacttcaa

SEQ ID NO: 16110 - DNA, 1204 bp, Homo sapiens
cccgcagcccagcgggaagagcaaagactgcgtgttcacggagatcgtgctggagaacaactatacggccttccagaacgcccggcacgagggctggttcatggccttcacgcggcaggggcggccccgccaggcttcccgcagccgccagaaccagcgcgaggcccacttcatcaagcgcctctaccaaggccagctgcccttccccaaccacgccgagaagcagaagcagttcgagtttgtgggctccgcccccacccgccggaccaagcgcacacggcggccccagcccctcacgtagtctgggaggcagggggcagcagcccctgggccgcctccccacccctttcccttcttaatccaaggactgggctggggtggcgggaggggagccagatccccgagggaggaccctgagggccgcgaagcatccgagcccccagctgggaaggggcaggccggtgccccaggggcggctggcacagtgcccccttcccggacgggtggcaggccctggagaggaactgagtgtcaccctgatctcaggccaccagcctctgccggcctcccagccgggctcctgaagcccgctgaaaggtcagcgactgaaggccttgcagacaaccgtctggaggtggctgtcctcaaaatctgcttctcggatctccctcagtctgcccccagcccccaaactcctcctggctagactgtaggaagggacttttgtttgtttgtttgtttcaggaaaaaagaaagggagagagaggaaaatagagggttgtccactcctcacattccacgacccaggcctgcaccccacccccaactcccagccccggaataaaaccattttcctgcaaatgggttatctgaagcggggcgggggatccgaccaccgaacacccctggaaacgagcctgcccgtccccggccgggcgtggccacggcaggtgcaggcgcggcccgcagcgctggggcccccaggaggccgcgggctcggccccgcgggaggcgggcgcgtccaggccgggcggcccctccctggcgcgggctcgggtttcctgggctcgcgcggcgcggcccgtgctacctgttggggaagaaaacccgagcccccggaggggccggggccggggccgggacgtgcatccagccgggccccgggccccaggccccaggcccgaggcgcaggcgagggccctgc

SEQ ID NO: 16111 - DNA, 1264 bp, Homo sapiens
agctatggactttcttccccctcacaaggctgggggcctcctgctctcgtccctggccctccctgcacagggcaaagccagtctgggctctggcacacagagttcatgtttgcgccctctccctgcccctcaccccagagggtgaggaggaatgaggggcattggtggttaggccggttggctgtcttgaacagctggagggaagatgcaggggtgggaagcggccaggcagaaagagctccaggctcttgtgtcgcccacccagccctcccatactcactcctgacagctttcctgcactgcagcctcctgctcctctgactctagtgggaacaggccccagctcagcctccggcagggaggtcacccctccacttcagcttgccctgacctccgctcgcaaaccccgagcttccaagccttttgctccagccctgcggcttccccagaagcctgggcttagggtggagatgccgcctacacacgatcctggccctccacctgcctccaggccacgaaatgggaattccagcactaagccaggcaccgggcagaagctgggccttccgcctcccttggatggggtcaagaggccaggcctggcacattttggagtgtcctggctaccagctctcacctacacccacgcacccccccacacactatgctctctcaagaatgtaatttattggggcccccccagctgctttcctcacctgcccctgccctaccttacacccccagcttgacttctttccagtccacgtgtgtatataatgatatctatatttttgcccaggtctgggtattgctcctgcccagaccctgacatccctttccactgtgtgtgtgaccatgctgggggagggggactctgcttggaattaaaaggttgcattgggtccctacatctgtcttttccttatgagccaccagacctgggtgaacgagacaagccatatcaggcagagggaagccctgggagcaagggttccaatgcaggggccgcctagggctggagggctggagacacagccccgcagtactctttcccccaagcctgggccacagaagcaggggctgtctagacaggggcctgtctgcctctccttcagggactctgtgatgggggcaggaacccttgtgtttggggccagagggaactcacacctcagggaggaggctggtagagaactggctgggaggaaagactgccccagccctccaccaaatcccaacgtgctcgccttggtagccaagctca

SEQ ID NO: 16112 - DNA, 2315 bp, Homo sapiens
ttctgagtaacagctgaaaatggccttgttgcctgtgtagagcaagttacggtggtactgccactctgcaggtggagcgggtgactctgggggaccattaagacctccagaccgggtgcggtggttcacacctgtaatccaagcactttgggaggccgaggcgggtggatcatgaggtcaggagatcaagaccatcctggccaacatggtgaaaccccgtctctactaaaatacaaaaaaattagccgggtgtggcggtgcacgcctgtagtcccagctactcaggaggctaaggcaggagaatcgcttgaacccgggaggtggaggttgcagtgagccgagatcacgccactgcactccagcctgttgacaaagcaagactctgtctcaaaaaaaaaaaaaaaaagccaacatgagctgcagaaaccagcagaagcagccattatacttctaagctgtgccaactaagtggttcccatttctggagccagagatgataattaagtcattgcaagttgcctgaagagaattactcaggcaactgggaaaggcagtggaaggtctgtgaagcaaagttttcaagtagatattgctattactggcaggtgtgcaaggcgtgtagtaaaatcagtttgtggcataggtcggcccttgctgactaaatcctctctggggattgaattgatgacgactgtgacttgagttggattcgaaaatggcttcccttggcctcttgaaagagtgcagatgaagccttttccgtggatttcagtaactttccagcataccatgacgatttcttccccaaatatacacatgctcttttgctctttgtgcctgatcttcagtaatttttagttttttaacaggcagaaaaaatctagcagctaggaaagttcaagttggggtgggagtttttagtgaacttttctcccaggtgtgtggcctttatttctatttatatatgtttgtaaatggaattaccccctttctcttgcaaaataaccgcttcctggctgttggctcactttgctggaatttttctgaatccaggttaagatttccagaagtcagctttggaaaacgtgacactcctaccaaagtccagatggttagaaagttatcacataccatgggtttcagtgtttttggaaacccgtttttttctggttttttttcccccctctccattttagaatcttctcccagtcccttcgggcctagttctgtctcatcttgctttattgggttttaaaaaccggtcttatttaagcttttctaatttgtatttatgtacttatttattttttggtatgatggcagggaggggacaaagcagaaataccccttttatatgacaatgtgtgagaaaagaaactttagcttaaaactccgtaaaatgtgctcacttcagcagcacatatactaaaattaaaatgatatagagaagattagcatatagaaaaaaagaaaaaagatttccttaaaacaagaaaaccaagaatgtttttggtttgttgcggtgcccagccgaggttgaggagggatgggtattgttggtgcactgctggtttcatttggagtgtgggacattagggtgagacaaggacctggaatttaaaaaccacagaatcaaacactgtgaaccactggtctctggctaagcagatcagttttctgattttccttggaagcgttttgaatttttctgttgaagttggatttcctaatactttttttctcttagataatcagaacaaatggttgaatacattataatacaaaaatttcttcactttttattcttggttttcttgcctcgtttttcggttttaatgccaaatgattgggtcatggggtgggaaataaaaacaactttgtataaatttgtagttgtgtttgaaataatgttgtttatttattattatattgatgtaactctttttcttcagagagctgcagcacttcctagaaacactcattactctgcttgtaagttgcaactccagtgttagtagccaggtaatttcatcatcagctgggtaagaagacttattgaaaaaaacagtagccacctcacttctcagacagatgaggcactttgtgtgtgtgtgtgtgtgtgtgtgtgtgtgtgtgtgtgtgtgtctgtgtgtggtttttagctctctttctcccatcagacaatttcttttaccctaagtgagagccagagtgtgtccacttgcaagggcagcctccccaccgctccactattttaacgcttgcccttttttacatatacctcacggggtgtctgtcaccattgaaataccttc

SEQ ID NO: 16113 - DNA, 1254 bp, Homo sapiens
tttttatcttgcctgttggcttcaatacatttgagaatacgctgaagagggaaaatttcagtgatggagattctagattaaatatcaggactgatttcctggtgggattatggtccagttttaccaaagaaccaattccttgaatgttggaatctaactttttatattgtcattattattgttgtttttaaacggttctttgtcttttctgttttatttttctcaagctgctttcaggagctagcagaaaataactcaaagttgaagactctggaagattttgctttaacctaactcgcattgatgtattaaatttataattttagcattcccaatagatcctatcattccttaaacataataccctttgtcttggagtagaatactaagttagagttagtggatttctagtttaggagaggagctcaaaactataatctttaacaaattgaaaaatgaaatagggtgttttccctttttgtgcacacctatattaccttaagaaatttccttccatagacagctgcctcaaagggaaatcctctttaaaccgtagttggcgcagaggtcagtcctagtcggagcttaggaggggcggagacgctcacatcgtctgacttgagtcgccactgattgtggcaacagctttgcctcatgagtcaaaaattggcaatttcttttgatttttagttgttgaatttgctgtttcaagcatttgtacatattagaagtctaaggagtagcaagtcagtgggaggactttttcacccctggcattagcagcttcgacctcattttccagatgcaccagctcctattaataagttagcaaggaaagtgtatgtcacgtgcaggaacagtgaggcagggacaggggttctgctccttctcacttcaccaccggcacacagcttgcccctgtctttgcccccaaaggtattttgtgtctagtgtcaaattggagctattcttcactggtccttaaccttgggttttaaaaagaaggcttctctgtttgggtagcgtaagagctgagtatagtaagtcctcttccaaagagatggcaatatgctgggcatctactttaaaacaaagttgtctgatttttgcaagagaggttaggattttattgttcttatttccctttacagttctgcagttccatcacagtatttttttaaataactcaggtgtatgagaagaaattagaaaagaaaattaacttatgtggactgtaaatgttttatttgtaag

SEQ ID NO: 16114 - DNA, 1212 bp, Homo sapiens
aaaggtaaggtgggggtggaccaggaggcagcacagctcctttccctgagctccaaaagtccccagaagggcgcttgcccgtgtcgggagtgaccagagggccagcaggcaccggcttcgtctttccatcgcttgccaggcagtgtgcccctggttgcaggttctctgggaattgagcagtcagcagcgtgcagtgggagcttcccagcaggaggcagtccgcagtccgcagtcctcagatcaccttgccaggcccgattctgggtacatcatctgtttcaaacaggctgacagctgggtggagaaggaggagccggcacctagcaactgacggcctcgcacggaactgccatcctgtgagggcagcggtggcgcccggcaaagttggagcccttgcggtaccagaaagcagcgagagcgagacctgggagccagggcaggggtggctgaccccatgctcagcctctaggggacggcaggccatcaggctgggggctgtgctatgtgggatggatgtgtgaggaaccccggttccacttaacaactaaatacaacatcttttgcacccctagaatgtcattttgccctcaaccttggtatttctcctggggcccttttagtcttgtgctgactttctcctgtcctcttccagtttagaataagacaggggagaaaaaggcttttcgagtgtgggacaaggtctgatgtcagtgaacggaactgaagagcaagacatggagcctggctggggctaagcagccccctcctccggatggcacaggctctgctaggttccggacacaggcttctgggggaagggtctcccttggccatcacgggaatggagtccatgctagaaagagctcagtgttgggctgggtttgccagtagaacactgcgttccagtcaccccggtcttgccagaagaaaccagcacctctttcccgtggctcctgtgttcagaatgtggtattggctctggcccagccttctcccctgttacccataattcttgcctctttccataatccgtggtttcagtttgactttgtatataaagttggggttttttttttttttttttggcttgttttttaaataaaccaaagtcaaaaacaaactgagagtgtgtcctccacagctcttcctactctcctaggcttgcccgcgtgccctcccacccagcgcctctgctggaccacggtgcagttc

SEQ ID NO: 16115 - DNA, 1139 bp, Homo sapiens
gagtcccacggaggaggggcagagccaggaggcagtggggctgtgggctcagagctcaggagtcgccttacctgagagagatgttctagctgagagggcctggccctggggtgggctccaggaaaacgctggttaggcctgggattgagctaacctgaaacaaaggtagcaggcaggacctaatgaccagaggttaaatcctcatcaagagagaccaggcggctggaggacaagcggctctaaccctgggggcggccatgttgtccaggcccaggcccctccaggactgtggctgcctcccctccacggcctccagggcggctggctggaaagccacgcgtatgctgccctctacaggctgctcggcctccctgcagctcagcgcagcccagggctccaagtgaggcccagaagcccatgggcagggctggggggacgaagggggaacccggagcacctccacttctagggaagatggacagcgtgggggcacacctgggcctcccggaagctgtggacgaaagggagagcgggtcctccagggcaaggggaacgggaaataggtctcctaggtgcctgaagcgctgagcaacctgggtaccctggtggggatgcagggaaggccggggcagagaaagtgaaggtcgacccagggctgtaggaagccataggagagtgaccacgggattccctgagaaacagggccggccccccaacttcagggacccaccgcccattccccgagagctgtcggaaccagatgcaacccggcagcccagagaactctcctgggaggctgtgggtgagccaggccaacattggtgtccctgtccccagagggaggagcaggcaggagagagaggggaaggaggtatgaatcccagtccccaggaacctagctctttaaactctggggagtcggattcaggaaacacccccaggaggccaagcctgaaaacagaggggagggaggaaggaaggagtcccagcaggagcacagccctggtttcctgtcactcagagctgattcacaggaggaggggaggttggggggcgggagacaaaaaccacacctctttttatataaggtttcatatttaatttggtcatggattcataaatacataagtattttgtac

SEQ ID NO: 16116 - DNA, 2200 bp, Homo sapiens
tttccagattttgacagtgaagaactggagaaggaattggacatcctccttcaggataccaccaaagaacctttggatctgcctgacaacccccgcaataggcattttaccaacagcgtgcctaaccctaggatctcagatgctgaacttgaagctgaacttgagaaactgtccttatcagagggaggtatggagctgttttccaaggcctttggagggcatatggccttctggctgacagagttgatgggcccaagcccaattactccatttgccagagtaccagagccctgtagggagttgagggttgtttatattaagactcagtctcttaatcactggaatgccttcatcttcaagattttcctgttatagtgttcagtcatttctttgccttgcaggtttggtcccaagcagtaaatctccaaaaaggcaattggaaccgactctaaagccattgtaggaccctcaagtgaaggaccctcatgtaaaagagagaccaggcttgctgggtgtgtacatagttatttaaacaagaaactctcagaatgtgtttggaagaggagaaaggagaaccactgattttatctggatgctactacttactacaggacagatagaatttctggaagcgatgctccaaaggcttgctcccagctgtatcatggacctgccttctcatctttatagtgccacgatttatacagtcctgtgtctgacctgtcatttcatagcctgcagttcttgccattggcacacttagatttgtcttcacccaccagcttcgttccagcccatgaaggggaaagatttgcagctttgccaaatctgaatcagttcccactcccccctgcggttttttagaggggtttatcctgtcgctaatgtcagttaaatagcttattcctgtcccacttgatttcactggtaagaatgagaatgaaatacttaaaggttttatttgaggggacttagctgccattttatggaaaaacatgtagtataaaaggtttttctccagggtcatttgacagaattctccaggtgttcagagaaagaggtcgccccaagtggcccagagtcgtgacagtccggaggggctggtgtggccggtgggcgctgcctcttcatctgatggagccaggaggtccgccggtgggggaaaggcttcttccgaggcttctgcactcgcctgggaagaggcccagtcactacaggaccctgagatgtccagaccccttatgcaaagaggcaaaattgttgccttggccccatcatggagtaacttaaaaatacatatctatcttccagaacaagccacacaacaacacacctcccctccttgagcctggcacacagcaccgggctctctgaatttggaaagtgtttcattttgtggcctactgctcggggcaggggggctgagccaggatgtgcaatagaagcaggggttgtcccctctgccagatctgtggggagctgcccaggccacccgtgcacctgtcctgcttcctgcagtccccactccctgcctcctttgagggactgggggacttggggtagggggacagacgggaaagggtctgaatgctctggcaatggcgagaagaagcgatcgccacactgccactctgctgcccagccaccaggatttctgcctggagccctttgccctgtccctgctgcctgaggtggcgtagagcagaggagaagaatttgctccaggccaggagcacaaatcgttgttcaatgaatttctctccaactcgaccttggtaaacggaaatgttgggggtgaagagaaacaatcactatttttttcttttttatctggtaaataattaaaagaaaaaccgaacacttgtcccgtctcctctttaggttttatcaagcgtcttgttccttggtgcgtccccacgcttccagcttctgcacactttggttctttctcttaaggccacaggagaatatggagagcctgaccgtgtgagctttaagctgcggcagctgctgctccatccaagtggccgctctcactgagctcccctggggaggactcattctttgaatggcctccctggttttagcagtgtgccattgctactgttttccattgcctgggctctgtaagtggcctaatttcttctgcccatgtgattgtatcatattttagtctggcactggtatttctcagcccctc

SEQ ID NO: 16117 - DNA, 1150 bp, Homo sapiens
atttgtatatttctggtgtaatgggcaatgagctcagtcgtatttgcagcaggcccagcttacgacatgcctttctccatactgcattcccgtttggtctcatcatccttacactcgatttcatgatcgatttatatatttatgttattgaagttattctcgtaagcagtctctaattctgtatctatgttggagcaaagcagggtaaaattaaaaatctacataatactgtcaagagaaggggaaaacccagaagtgtcgtaaccttcagggcctgattctcattcagatgattttatgataaggggtttgtagctgttgtgtagcatatgcaagatgccagtatacagatacctacagttagggaaatccaggtagctcaagccaaatatcttattttaggatcactttaggtgaaggaagcctcattggagcagattgctttaaaatctttttccttctaatttcaggattggcatctcctgtctttttcctgcttcttggcattttagcatatctccagtagggtgtcctcgaattctgaataccaatttacgccaaattatggtcattagtgtcctggctgctgctgtttcacttttatatttttctgttgtcataatccgaaataagtatgggcgactaaccagagacaagaaatttcaaaggtaagagataaaaacatttgctttctagaccagaagccttaccttctgtcttacctgttttaggctgctggaacagaattccatagactgggtggcttataaacaacagcaatttgtttctaactgttctagaggttgggaaatccacgatcaaggtgccataggttttgtgtgtggtgagggcctgattcctggttctgagatgaggaggtcttcttgctgtttcctcacatgatggaaagggggtgagggggctccctgaagtttctgccctcatgaactaatcatccccctgaggccccacctcctaatagcatcgcattggtgattaggtctccaacatacgaattttggggggccccagacattcagaccataacaccatcatttcatggcttcacgacgtttggctttagattggaatttaaggaactgtaggaactagattctgtgccatgttcatcatggcatgaacagttaaa

SEQ ID NO: 16118 - DNA, 1418 bp, Homo sapiens
acaccacgcagctgaccatgaacatccccttccagtccatccacttcatcacctatgagttcctgcaggagcaggtcaacccccaccggacctacaacccgcagtcccacatcatctcaggcgggctggccggggccctcgccgcggccgccacgacccccctggacgtctgtaagacccttctgaacactcaggagaacgtggccctctcgctggccaacatcagcggccggctgtcgggtatggccaatgccttccggacggtgtaccagctcaacggcctggccggctacttcaaaggcatccaggcgcgtgtcatctaccagatgccctccaccgccatttcttggtctgtctatgagttcttcaagtactttctcaccaagcgccagctggaaaatcgagctccatactaaaggaagggatcatagaatcttttcttaaagtcattctctgcctgcatccagccccttgccctctcctcacacgtagatcattttttttttgcagggtgctgcctatgggccctctgctccccaatgccttagagagaggaggggacggcacggccgctcaccggaaggctgtgtgcggggacatccgaggtggtggtggacaggaaggacttgggaaggggagcgagaaattgctttttctcttcctccctgggcagaatgtagcttttctgcttcactgtggcagcctcctccctggatccttagatcccagaggagggaagaaaatttgcagtgactgaaaacagtaaaaaaaaaaaaaaaaaaaaaaaaaaaaaaaaaaaaaaaaaaaaatttatgtatataaaagttgcattacacagtacaaaatagatggataatgtttatcctttatttttctatgtagaagtttttgaatttgtgtgtgtgcttgtgcgtgtctacacctagtattacggctgggactctccagctgtttttgttgttgttatgtttttaagagggttgaattcttccatcaggtgaacgaaaaaggcaacaaagtaataaatcagtgaatgtggccggcagctgtgtttagcccctccagatggaagtttcacttgaatgtaaaataataaagtttatattttgaatttctcttttcatgggggaaaaaaggtacgttaaaaaaatcaaaataatgatatgtcacttgcagctacctttttttttcttttaaattcaatcagccaccttcatgtgcctttttcctttgtctttccccaaaattccaggaccagagatctggccctggcctattttctcttgctgtgtacacacacgcacacatgctgggtggcaggatctcgcccgctggagggtggtggagcccagtagaattggggtgactgggcataaacctgctgagactgcttccttccctggttgtgagtgatgtga

SEQ ID NO: 16119 - DNA, 1198 bp, Homo sapiens
taacctttgcacgtactcagtcattggtgtctttggagtgacatctgcagccagttagtgccacctgagtacagcactcgtacttttacatgatgtgtgtgtgagtagctcttctgtccaaaccatgatttgaggttcaactacctgtagatcaaagctttattttagaacgataaactgattttttccaaatgggtgaaatcttctccccatgactatgttttcttaactttgcattgaatctatttactgggttacattctatgtgtagtttgctttcttcatttttttttcttttaaaatgctcatgtcttattccaagcaccttcctccaaagtccccataaagctgcatctccaacacattgttatgccaataaggttttatttaactttatttaaggatgattgtgtctttgaatgacaaatgtactgctgcttcctacctgcaagacgaacaatgtatgtttcaagggtgagcaagtgttatttcttaaatttctcaaatgcctgtagtaactattgtttctgcctctcaattgttgccagctctttgaagaaggggagaattgtgtgtttttgtgtggggatgtttctgatatgctgctacagttgcaaaacactggagctagagaaaataaagtactgatcttcgaagtgttgtgggctctgtggtgggaatcctgaaatgagaagggagtggatggcaagaggggacgtccttcacggggcctatgcttgttcctcttgagcactaaggaccaaggtctgcagctttgataggaacagcccctgcaaccccatttccccagggcaagcagattgatggtggtgtttgcattgtcttgctgggcaggagcgggagccctcccactggcttggctcaccatgctggcgagggtggcacttttctttctcattgtgagagcctggctgtgtgtggcaggctacaagtggttctttggaacgtgctgtgctcatgcctgttttctctgtcttacacctcagcttaagcaagagaacgtgacctcttttggaggtgggaggagggaaggtttggacccctttgagaagccagggatgactctgatgcttcccacaagtttgaaagtctgagcacccaccttcagtatgaccactgaagcccttggcctgccatggtcagggtcagaattgaggtcaggcctgagacctggcca

SEQ ID NO: 16120 - DNA, 1183 bp, Homo sapiens
ccagcttcatcgagcgcgtgcacgagctggagcagcagaacaaggtcctggaagccgagctgctggtgctgcgccagaagcactccgagccatcccgcttccgggcgctgtacgagcaggagatccgcgacctgcgcctggcggcggaagatgccaccaacgagaagcaggcgctccagggcgagcgcgaagggctggaggagaccctgcgcaacctgcaggcgcgctatgaagaggaggtgctgagccgcgaggacgccgagggccggctgatggaagcgcgcaaaggcgccgacgaggcggcgctcgctcgcgccgagctcgagaagcgcatcgacagcttgatggacgaaatctcttttctgaagaaagtgcacgaagaggagatcgccgaactgcaggcgcagatccagtacgcgcagatctccgtggagatggacgtgaccaagcccgacctttccgccgcgctcaaggacatccgcgcgcagtacgagaagctggccgccaagaacatgcagaacgctgaggaatggttcaagagccgcttcaccgtgctgaccgagagcgccgccaagaacaccgacgccgtgcgcgccgccaaggacgaggtgtccgagagccgtcgtctgctcaaggccaagaccctggaaatcgaagcatgccggggcatgaatgaagcgctggagaagcagctgcaggagctggaggacaagcagaacgccgacatcagcgctatgcaggtgcggcacggccagaaacacaggggggcgggggactcgagcaagggggggagttggtgcgcccagaaagtggagaccaggggtggtgcggctgcacgcagctcttagggatagggcttggctccttggccactgtgtgggaggggtggggcacttgaagggcgtgagtgcgggcgccactgtagtctgggagtgtgctccgtgctgctgcaccggcgttccgcattaaagctgcccagcccttgttgggtgggggaggggaagacgtgggaattgggcgttgcctccggcctgcagtgagatcagctctctactgacctgcattaaccacaagttactttgcagcaactatcggatcatctagttaataaatagtagagtgaacaactctcaattaattctgaaggattactgtgaccagcatgctttatgactagttttac

SEQ ID NO: 16121 - DNA, 1143 bp, Homo sapiens
caaagatcaaccaaccagtccccttatttagtaaataaggaaattgaggctacacacagaaaattgtgctacagattattactaataacccagcttgctaaattaggctatacctaggtaatctctagaagacaactctgacagactctttaatatttacccctggttggaacaatatttgaaatgtcccagatatttctatgctacttagatatttgtggcaaagcagaaagctttttgactgtgaaggcagaggtcagcactgggggaaacttgctggtggtctctcccacaaccttgcccagagtcctttccactaaggaggtgaagagaacagagaaagagatttccatttctgctgccagagctggtatttgcctgcctgattctctgtgtttcctgtttcaccgccaccctttcaggagagaactacaccagttcatcatgagggtcagggaagcaaaagctctcagatgtgtccagggcgttacttaagaaatgagtatgcagattctggaaggggtgtggaaaaggtgatcctttacccccacccaggaaaacctgcattgtgctagcatggaagaatcatgggctttggaattaaacccatttggtggaattaaacccatttggtttcaaatcccagttatgacatctgttaactttgcaaactcacaaaaattatttgaaattatctgagttttcattttctcaccttccagaatggggataatgcctcctgcatcggttgttgtgaggtttcaatgagatgaaatatgggaaagaagaggtactcacctgatggtccctgctttcctctgctaggcctgagtaggaactggaactctctaagagcattactcatactttttttttcttccaaggtagtttggaatgtgagtgcaagttagttctgcacatacagcccttctccaaatggtggtttcctttgaggtcttttacatgattatttatgactagagacaaacttaataagaactcaagaggattttaaatggagagaactcaagctgtagagaaaggaggaggcaacagacaggatatgtaggggcttacctagagcctggcacgacttctgagaagtcacccagcagaccggctagaggggatttgtgtgccaca

SEQ ID NO: 16122 - DNA, 1811 bp, Homo sapiens
aacaacgataattctgcactcctaagaagttttacttgaggatgctgtcaactttgctgatagttttggtagccataaaaagaataagcagaaaacccagttaattagtaccgtatttctggtttattctagtgattgagttgatgtcaacagcccctgtcccttagtttaaatctgcttttgaagtagcttcctatggtttaattgccgaatcattttacttgaaaacaatttcttgttctgcttgtttgactgagtgtactgtctattttcacagtgttgtcatgactggatcttacaataatttcttcagaatgtttgacagaaacacaaagcgagacataaccctagaagcatcgcgggaaaacaataagcctcgcacagttctgaagcctcgcaaagtctgtgcaagtggcaagcgaaagaaagatgaaataagtgttgacagcctagacttcaataagaaaatccttcacacagcctggcaccccaaggaaaatatcattgccgtagctactacaaacaatctgtatatatttcaagacaaagtgaattagggttggcattcctagcagaagaacccacttcctgcttagttgagatagttgaatctagcattcgttcctataaaagagagaggtccattgtggcgcccctttccagtgtttgacagtgtgccattcgacaacacattgttatagctacatggagaaagctctgtggattcatcactgtggtgttctccatgtctgctagccatttaggtaagggtagggcacttttaatttaaatgacttcttgcaccatcttgcctaatggactagattggactgtatcaacattgatttactccactttttatgccttccattgtgatgacgtcaaacacagtgaaagccttcagtcatgctatgggatttaattgtgtatcctcattactgtatcatttgtggggtacaccccttccccctttttttaaattaaatacagctcattcttactgtggcttgtagcattcctcctcttctggcctcctggactgctccccttcatctcttacccttgccccctccacccggtcttggtggtggtatattaaaaaaagaaagaatgaaagcacacaaaatgagtcagtttggggtcagtggtataaagggggtatatgttgcaaacaaatgttttagtaacagttggctgtaatcactcctcgccgtgtctggcactgaaaataaggaaaaaaaacctactactgaataaaagtgacaaagaatggagaatctggttttctttttctttttaacctacctcttgtagccaatattttgtgtcatacctttgggcacagtgaaacaaaatgggttttcattgtttattggtatttttgttaattatttttaacaagtgttcttttacatgcaggaggagaggtattggttctctatgaacatattttgaatataggttttattaaggatttcacaatctataaatgctactagtttttttttttttttttaccatcatgagggtattggatacattgtgtctctatttaactcattatgtgttaatgaaattgttgtaaatgggaaccaaatttgtagaacttaatttctactttttagagtgcttaatttcatttttgccttactaaatagtcaaagacttataaaacatttttaacaagttagaacttttttgttattcagtcatataaaatagcagaaaactaacatcaagtgacactgcactaaatactttttttgtattttactgctatcaaatcagaatgaaatatactttaccataga

SEQ ID NO: 16123 - DNA, 2573 bp, Homo sapiens
gtttccctaagtttgagttgatagttattaaaaagaaaacaaaacaaaaaaaaaaggcaaggcacaacaaaaaaatatcctgggcaataaaaaaaatattttaaaccagctttggagccacttttttgtctaagcctcctaatagcgtcttttaatttataggaggcaaactgtataaatgataggtatgaaatagaataagaagtaaaatacatcagcagattttcatactagtatgttgtaatgctgtcttttctatggtgtagaatctttctttctgataaggaacgtctcaggcttagaaatatatgaaattgctttttgagatttttgcgtgtgtgtttgatattttttacgataattagctgcatgtgaatttttcatgaccttctttacattttttattttttatttctttatttttttttctctaagaagaggctttggaatgagttccaatttgtgatgttaatacaggcttcttgttttaggaagcatcacctatactctgaagcctttaaactctgaagagaattgtttcagagttattccaagcacttgtgcaacttggaaaaacagacttgggttgtgggaacagttgacagcgttctgaaaagatgccatttgtttccttctgatctctcactgaataatgtttactgtacagtcttcccaaggtgattcctgcgactgcaggcactggtcattttctcatgtagctgtcttttcagttatggtaaactcttaaagttcagaacactcaacagattccttcagtgatatacttgttcgttcatttctaaaatgtgaagctttaggaccaaattgttagaaagcatcaggatgaccagttatctcgagtagattttcttggatttcagaacatctagcatgactctgaaggataccacatgttttatatataaataattactgtttatgatatagacattgatattgactatttagagaaccgttgttaattttaaaactagcaatctataaagtgcaccaggtcaacttgaataaaaacactatgacagacaggtttgccagtttgcagaaactaactcttttctcacatcaacatttgtaaaattgatgtgttatagtggaaaataacatatagattaaacaaaatttttatcttttttcaagaatatagctggctatctttaagaaagatgatatatcctagttttgaaagtaattttcttttttctttctagcatttgatgtctaaataattttggacatctttttcctagaccatgtttctgtcttactcttaaacctggtaacacttgatttgccttctataacctatttatttcaagtgttcatatttgaatttctttgggaagaaagtaaatctgatggctcactgatttttgaaaagcctgaataaaattggaaagactggaaagttaggagaactgactagctaaactgctacagtatgcaatttctattacaattggtattacaggggggaaaagtaaaattacactttacctgaaagtgacttcttacagctagtgcattgtgctctttccaagttcagcagcagttctatcagtggtgccactgaaactgggtatatttatgatttctttcagcgttaaaaagaaacatagtgttgccctttttcttaaagcatcagtgaaattatggaaaattacttaaaacgtgaatacatcatcacagtagaatttattatgagagcatgtagtatgtatctgtagccctaacacatgggatgaacgttttactgctacacccagatttgtgttgaacgaaaacattgtggtttggaaaggagaattcaacaattaatagttgaaattgtgaggttaatgtttaaaaagctttacacctgtttacaatttggggacaaaaaggcaggcttcatttttcatatgtttgatgaaaactggctcaagatgtttgtaaatagaatcaagagcaaaactgcacaaacttgcacattggaaagtgcaacaagttcccgtgattgcagtaaaaatatttactattctaaaaaaatgagaattgaagacttagccagtcagataagttttttcatgaacccgttgtggaaattattggaattaactgagccaaagtgattatgcattcttcatctattttagttagcactttgtatcgttatatacagtttacaatacatgtataacttgtagctataaacattttgtgccattaaagctctcacaaaacttttcctgtcagtatatcatttttctgtcgcacctgttgcctgggagtttcaggcgatgaggcctcctcgcctacacacagccttccagtcatctggcttccccagcagtggagttcctaacagtgctcagggtgtgaacggtgttctgtggggacagtcaccgcagtgtgagcattcgtgagtgcctcgggactgtggcattcagagcatttgcctccaggtagtggcaggagggcgctcacgggaggagtgctcaggaagtacaggagagaagaagagtgtgccctgatggaaatgacagtgggacaccagtgaaagtggatccagaagg

SEQ ID NO: 16124 - DNA, 1793 bp, Homo sapiens
gctgtgtcaggccctgaagacacagatgactcaacctaagctttactttccagaggtccacagcctgagaggtgtccccaaagaaagggggacatgaggggactgcatgcttgagagcagggttgtttagggcaggtttggatttagtgagcaggctggtttgcttagagaaggcttttagtggcaacaaaggatgaagaggagagaaaaggaactcacatttattgagggcctactgtgtgcaaagtgtttcatgtatatctcattgaatgtatacagccaccctgttgtggtataattttgctctttataaagagaaagaccgaagctcagatgagttaagtggtctcctcaacaccaaaatgccaagaagtgatggagcctagacagaagcccagaactttctgactcacactagtccatcctctaccatcacgatgactttcaaattgtgctctgcagttctgcagattttctagcagtgccatctccaaaatgtgttttaaactctttatttttttaattattattagtattattttgagactgagtcttgctctatcacccaggctggagtgcagtggtgcaatctcagctcactgcaacctccgcctcccaggttcaagcgatttcgtgcctcagcctcccgagtagctgggattacaggcacccaccaccacgcccagctaatttttgtatttttagtagaaatggggtttcaccatgttggccaggctggtctcgaactcctgacctcaagtgatccactcacctcggcctcccaaagtgctgggattacaggtgtgagccaccatgcctgggctaaactctttaagtctctagtaaatgcagctagattcaaatgggctgataaccaaattttaacacatcagcattcaccaccaggtttacttttattttcagattggctcattttgtgcagaccttagagcaaagtttcctttatggtatctgtgtacgtatccaaacttcttttaattgttcacagattttaaaagcggtagcaccacatggttgtgtagatcagacctgtgtatttagatcagacctgtgtatcacgtaagtgtgtgagtgcagtgcagatgagcaccatttagttatatgtgctaggcaaatctccaacacagttgatgtgtagtcttgtggtagatttgtgcatactgtaagcaaattgcttagcttctctagacatcagtttccacatctgaaaaataagaagatgagagtacacggttgttatgaacaaatgacttaatgctttttaagcacgttgcatgacatctggaacacagaaagccctcaatacattgaagctcttaggattttcacgatgttcctgtctgctcaatgcatgctttctttattgttctgacagttgtgtggtaacaagctaatatgcttccagttgacttccagtctaccctggtgttagaaaccgtttcatctcttattgtaaatttgagtgcttgttgttttttatatttgtgatgactcttccagcagttgttgacaattgttagaggtttgacttttaaataattacttattttttctgattgtggttcagtttaactgaagaatatcctgagattgtaagaaaagcattttttaaaaggtatcacttgtgatcatttatctttctaaattctatttttaatactgttccaccaaagtgatgcagtggttaccatgacaccctaatttcatgtgtttttgtatttatgaaaatagtttcattgtcatttattggcggtatacaaagtaaaatgtta

SEQ ID NO: 16125 - DNA, 1105 bp, Homo sapiens
tgtttttttttttaagagcctgtgatagttactgtggagcagccagttcatggggtcccccttggggccccacaccccgtctctcaccaagagttactgattttgctcatccacttccctacacatctatgggtatcacacccaagactacccaccaagctcatacagggaaccacacccaacacttagacatgcgaacaagcagcccccagcgagggtctccttcgccttcaacctcctagtgtctgttagcatcttccttttcatggggggagggaagataaagtgaattgcccagagctgcctttttcttttctttttaaaaattttaagaagttttctttgtggggctggggaggggccggggtcagggagagtcttttttttttttttttttaaatactaaattggaacatttaattccatattaatacaaggggtttgaactggacatcctaatgatgcaattacgtcatcacccagctgattccgggtggttggcaaactcatcgtgtctgtcctgagaggctccacaatgcccacccgcatcgccattctgtagtcttcagggtcagctgttgataaaggggcaggcttgcgttattggcctagattttgctgcagattaaatcctttgaggattctcttctcttttaccatttttctgcgtgctctcactctctctttctctctctagctttttaattcatgaatattttcgtgtctgtctctctctctctctgtgtttcctccagcccttgtctcggagacggtgttttcctcccttgccccattatcttttcacctcccaggtctaccatttcatggtggtcgttgggtccgcctaaaggatttgagcgtttgccattgcaagcatagtgctgtgtcatcctggtccatgtaggactggtgctaaccacctgccatcatgaggatgtgtgctagagtgtgggaccctggccaagtgcaggaatgggccatgccgtctcacccacagtatcacacgtggaaccgcagacagggcccagaagctttagaggtatgaggctgcagaaccggagagattttcctctgtgcagtgctctctggctaaagtcacggtcaa

SEQ ID NO: 16126 - DNA, 1583 bp, Homo sapiens
gccttctgcccatccccttcagttcacaaaagctgacattttaaacaaatcatgactcacacgtattaattggttataaatatgttgtgtacactggttagataaaacttaaggccacaaggagggcccaggtaggcgatgtcagtgtgtgaaggggctggattgggcgtggtgaggatgttggcaaaccagtgcatgcacctggttggaagatgctcagcctcacaaaagctccaagccctttgggagccaaagtgtctgagagtgtgaccctctcctgtaaagtatttatcccacccattaatataatttctgtataataaacttgacctgaaattatttcattctttatattaaacttttaaaaatgttttttattttcaccttagatatgggaagagttttttttttttttttttttttaacaggataacttgagcaggctaggcctcttaaaaaaaaatttgagctaaaactcatttttcttttggcattttcttttcaatgttcttataagcaaagttcatccatgttgtagcatgtgttcaactttattttttcatcgggtaatattccattgtatggaatggtagtactacattttatttatcatgcatcgattggtggacatttggatcgtttctacttcttgactattatacataatgctgctaggaacttttgtgtatgagtttttgtgtggacatatgttttcatttctctttggtatatgcctgggagcagatttgctggatcatatgaaactctatttaacccttgagggactcccaaactgttttccaatgtggtgacacaattttatatcccatcaacagggcatgagggttctgatgactccacatccctcagtgctttttattatctatcttttaacttagccatcctagtaggggtaatgtggcatctcattgtgattttggtttgcatttccctgatggcgaatgatattgagcatcttttcatgagcttattggccatttgcatatcttcttaggacagctatctttagatcacttgctcattttttaattgggttatttgtctttttattattgagttgtaagagtccttttatagcctggcacaagtccctttaactggtatatgattataaaatttttctccgtgagctgtttcatttccttgatgatgtcctttgaaatactaaagcttttaattttgatgatgtccaatttttatttattttttcttttgttgtacatgtatcctagaaatctcacttttgatactgcccttaggtccatgtaagttcggggttttggctcagggatggggcagttattctgttggcaggaagcgctagtccacgagttcattaattcttccctgaagcccctctcctgcccttgccttccactcaccccgtcactctccttctcattactgtgtccaggctcaaagcagcagctctctgggaaggcccccgttctccagtttctcccacttttgcatccattccacatgcaccatcgttcatgttcccatcacctggagagaccccatttccaacccgctgcagtgcatttctccagggcagctct

SEQ ID NO: 16127 - DNA, 1202 bp, Homo sapiens
gtcacagcacagtggggccacgaggctgacattctctggccttgcacacagtgccccctgagaagttcaacatttatttcttcacgtgtccagaaaattcctcaattcatccttgcctctgcccttcaggagcagcctggaaggaatccaagcaggagtttcatctgcatgggggcactctgcaggccctggaacattgggcctgagtggagatgggagacagaggcaggccagaaggttctctctgcacagctgcctcccttgctctccctgaggctggcctgccccattccccaagggggctcctctggagtggtggggaggattaggctgcagaagggccaaccccttgcaacagggcagctctcgcctcccgcacacggctctcctgatcacagctgcatgccgaccttgtcccaccgggacccacaatggcccgagccctctttgcatgggcagccagctggactaggagtgggaagggcctggacactcacagaggccccctctgtcatcactccttggcacccaccaacttcctgcacacactggcagagaggggcgctgggaaatcaccccacagggtggaggtctcctgttggctacactctaaagctgctttgccttcatgttcaaacagattcaggcaccaccccctccaccgcccgcaaggttagggcatagagttgtctccttcccaacacggacccagagagcagcccttccctgctcaaagcctttccgcaccctcctgactgtcctggatgtgcaactggtttgcactgcacaccccacggccatgtaactctcctgtccacatatgataataccattctgcatagtattactgactcagtaaagagctatttccaggagtgaggtgtctttgagtcctttctgcctgacttgggggcatgatgccttcagggctgcactccaggtgggcctctgaaggagaaccagtgacgagggtcccccaaaaattcaatctcactggagttgggtctaacctcattttagaaacactgagttcggccagggaccaagagcgtctgagggaattactcagagagagcaggaacagagggggaaatgctaagcccaatgcatcttgcagcctggccctggagctctttggctaaaacaagattggaaaacagggcaggcctggacatgtgagtgatacctcctgcttctggctt

SEQ ID NO: 16128 - DNA, 1299 bp, Homo sapiens
gacctggtcttttataaagcccactcttagaccaggattatctaatgccacatcagaagcaaacaggcaaatttaaacttgggcaagtaatttctgtgcccaatttgtaaagggaattcctgaatttttttttttttttaatagaggcatgggtctcactgtgttgcccaggctggtctgaaacttttgggctcaagcgatcctcccaaaacgctgggattacagtcatgagccaccgtgcccagcctaattcctgacttctctatacagagtcttcacttgataggcactcgtctgtagtaactcagtttgaatatctttagaaaatgtttagaatttatttgtaacaagatggtaaggaataagattatcccatatgcatttctgtagagcagaatttgatagcttagtgttcaatctttttgaaaataaatgtttacctgtcatcagatttaattaaaattatacttagtaattgcactattacttagttaatttttgttgtatggaaatattggtagtactactttgggaacctgttactgacaattgatgtcattaacaaaatgcctagttggattagatgttttcattttctaattttttgcttgtttaaaatgcaccttacttgttctgagatacctggcaaaagtctttacaaaatgtatggtaatagaaccaaggttagtaaatatacataggctggtggatgagagaccatggaactgtgtaaatacacttaaatgttcacacatttttctagtgtaattcttggatactttaaaaagcaaaacattgttcaaattgttttgattctgaaaaatcattcaactgctaactggcaataagactctaggcaagtcgttttccagattgtaattatatgtagaaactattcatctgcattcattttatttgcctgtaagttaacatgtttccaaaatttaaaagcctgggtccccaaaagaatgtggaagtattaaaatgtatgtaattatgcaaacattttaatgctattttctgcacttatttcttttaaatattttatttaaaatttttaattaacattttgtttgcttaatgcttttgttatgaatcaattaaaattctttattttatacaactaaatctgattttaattattttattatgaaaatagtatatgttaaataaaattcagataatacagaaatagagattgccaaaagaagaggcttcccggccgggcgcggtggctcacgcctgtaatcccagcactttgggaggccgaggcgggtggatcatgaggtcaggagatcg

SEQ ID NO: 16129 - DNA, 1115 bp, Homo sapiens
tccattcacctagactgcaagtaagaagacaaaatgactgagaccgtgtgcccacctgaacttattgtctttacttggcctgagctaaaagcttgggtgcaggacctgtgtaactagaaagttgcctacttcagaacctccagggcgtgagtgcaaggtcaaacatgactggcttccaggccgaccatcaatgtaggaggagagctgatgtggagggtgacatgggggctgcccatgttaaacctgagtccagtgctctggcattgggcagtcacggttaaagccaagtcatgtgtgtctcagctgtttggaggtgatgattttgcatcttccaagcctcttcaggtgtgaatctgtggtcaggaaaacacaagtcctaatggaacccttaggggggaaggaaatgaagattccctataacctctgggggtggggagtaggaataaggggccttgggcctccataaatctgcaatctgcaccctcctcctagagacagggagatcgtgttctgctttttacatgaggagcagaactgggccatacacatgttcaagaactaggggagctacctggtagcaagtgagtgcagacccacctcaccttgggggaatctcaaactcataggcctcagatacacgatcacctgtcatatcaggtgagcactggcctgcttggggagagacctgggcccctccaggtgtaggaacagcaacactcctggctgacaactaagccaatatggccctaggtcattcttgcttccaatatgcttgccactccttaaatgtcctaatgatgagaaactctctttctgaccaattgctatgtttacataacacgcatgtactcatgcatcccttgccagagcccatatatgtatgcatatataaacatagcactttttactacatagctcagcacattgcaaggtttgcatttaagttaaaaaaaaaaaaaaaaaaaaactaaaggtgaaagatgccacattgaacaaactaaattcccaacccggttctggcaaagaatccagttatcccttccatgaagacgcacataactctcttacttggtctttccattagggacaacataagtcttgttttacatcaaata

SEQ ID NO: 16130 - DNA, 1207 bp, Homo sapiens
ctctaatatatacattttatgtcactctcagtttgaaagctccaatgtgtctttgccttaaagaattttgacttatctttgatttatagagtttgtatggcaactctcctggcttccagagcctaacagacttacttgtatagcttttaaagctaatcgattggcttttgatacttttgctggaggaatatcttattaaaatcaaatggatgaagtagctaattgtatttaacatttgaagggataagtgaaaagaggaggaaaagactcaagttgattcaaaagcaaaatgagaagaaaagataattggcatattctccacatctttcctctgatcaaccacataggagacaaaacaaattagagacttgtctttgaacaggaagcagatgtgccgagcatatttttacttcagattttgttaactattttatctttagatactgatttttgtctagaggagagtgttggagcaactaaaatggaactcataacttcagctcttgatggaagtttccttgatgcctggcactttatgctgtattaatgccaggaaataaattttatttcctcctgtctttaggcaagctgttattcctctaatgcacagtcacttttaacttagatttttgagaaacaaggaaaaaagatttaatctttgagaccagttgttggctaaggcaggcgtttgagcatcccagttacttgtcattcagcagctgtgtgggaaaatgtaagctacattgttgaacagattttgtaaaggaaaaaatttatttcttgatttatttggtacaaatgtctctttactcaaaaaatctttacaaatggttattgggcattcagtcatttgcttagcactctgtaattttataaagtgatttccatcaggtgcctttcacagaaaccctgaaggtcaggggaaatcataatttccttgatgagaaagctgaggcatagagaagctccttgttaggaggctttgcctctgatttcctggtcagcttcataggttttttgcttttttatttttgttctttttaacttttttaatatccttgccttactgctgtggagaatgatttctattttgcaacagcttatgtttttctcctgtgtacagggatattccaatgcctttagttagctcaggagtagagcatggtaacctgagagagctggcacttgcaagaatgaaagacctcgg

SEQ ID NO: 16131 - DNA, 1177 bp, Homo sapiens
cagatatttactaaacatctcctctgtgctggcccaggatatacaaagagcccaagaacctgcaacttaacagtctctgtgggaaattcttaagtcataggaaggtttaaaactccagtgctcaggaacttcttagagctgctaaagggataaaccaggagtggtgttgagaccaagggccgactcctgggctctgccttcatagattctggatcagtagattgggatgggacctatctgtttgttatccagcactaggtacatggttctcatgcacaattcagatttgggccacactttgaaagacatggttccaaggattgcatatggtgtttgtggacttaacctaagacattttattctctcactcaaattattagggagaaaatgtttcagaagattgttcaggggagagtttgtgaatattattggcatattctaccaaaaaaaaagtgaacaattttatgttccagaaaaatagcaaaggacaccaaacaagattgtgtgcctgctttgcctccaaggctccagctgtttgtgttctccatctcctctcgcctccaagaaggccactgaccttcaagaaggccaaggtgactgacctggcctggttatcccaacaatctcgttatccatccatcttctttaaccctcacccctcataagccttgttagcctctattaaagtaagctgggattgagtccaaaggctggaattcagtcatagccaaaatatatctagttcctataggcaacatcttgagcagaaaataagcacacaccaatctctgcctttaaaaaaagcatgccaaaaaaaaaaaaaaaacagaaacagcatgcagatgttcattaagaacatggaacagtaatacattcccatgctagctactatatagaactattgtagtgaaaggacagcagctacattaagtagattaataattacagagattgatcatcttcgtctgctgtacagtttttgtttactggaattcatggactctacatcagcaaagcattgtcttgagctagttcctggggtgtggaagtagctttagttttctacaactgaataatgagctcttatttttctcttggaattctgtacatatatagcagtccttcataaaaatactattactagaaaagcttatgtgacatcatcaaatttcccaca

SEQ ID NO: 16132 - DNA, 1219 bp, Homo sapiens
tacatttcagagtgtgcatgttgagatcttgaagtccagccttgccagtgtagacacaacagcacatttgtagactttttgtccccattcttgttcctcttagtttatggatatagggaatcatggtcttatgcttttgcttaggaggaatagggttatatcatgtgattcctaataacattcctgaaaggtctggaagctttgagatgaatgactacctttatttaaaattagacacttcacaggcttttttctgaggaagcaagccctctccaaaagtggcccaacctatgctactcactaccagctgtctatcagaaagtctgttttaatagtttgttgcaatgttgactccttatcaatgtaacttgaatatgaatagtactgttcttttctctaaatatttgacattgccttaattcattcaatttgataaagcttttctattttagatctgttagaggcagagatttggcaggttattctttgggtgaacaggtattactgaataatgctggaaaatattggtgctgccttccttagcagcaaccaagatactagttttgtggagccttttagtttagagatttctaattccaacagaacacatgcaaggaatttcttattctttagttggcctggcttaagctgttgtctctgaccaacaactcacatttctaagacagtgcctgttagacatagaattgtagtttgtggccatgggatcatttccttatgcaccccatcctctagtccctaagcagaccactgtccacttgtccaccattcatgaataaattgctggggttcagtaaagcagtccacatgccccagatctctacctgcgtgatctgttgcctcactgcaaatcctaataattagtgtttgttctggttatttattataacataccaccccaaagtttagtgacttaaaacaacaaccctcttatttccttaatgattctgtgggtcagaaattcagcagggcatagaggggatggttcctgtctgttctgtgatgtcaagggcctcagctggggtggcttaaatggcagccagttggctgggatggtgtgtctgaagtttcagttctgactggggctgtccatatgagcagcttggttcttgtccacctgtctgctccatgtggcttgggctttttaatagcacaatagctggggttctaagagggaggagcaaaggcctggtcttagaag

SEQ ID NO: 16133 - DNA, 1622 bp, Homo sapiens
gtgtgtgtgtcacataccctgagcttgagttaaaaatcagggaaagagtcttcttctctccacttagcagtttctatattttaatgcagcctgaattcaaagtaataatgttccaaacttattaagctgagattttatgtgggagagaatttggtctctgggtgggagagagtgtaaggctgagggaagcacatgccgacttttgagaattgctaaagtgaatgctccttttttaacttcgatttttctgcaggggtcggcaccaggaattattatagaaagatcggctacagattacaaggcccgtacatggtgaagatgctgaaataatggccacaccagtccactcttctgcagtatcctccctggcagaacacggagaatcaggatttcttaaatactcaacagagaggctgagcagagcaaatggggggcttcaccctcatcccgcagctgcagagactggaaactgccttcaaggccacggctggtcatctgctgaccacaccccagatccgccctctcctgcgtgcaccccaaaaaatcacttgcgtttttgaggcttaaatcatctatccagtttctacattttgcatgaggcctgcaggtggcctattttgactcagacggtgaaaaaagcaaattaactcatttggacaccataactcatgcaataaaactgattgtcattcgaggagcaaacttaagagtagtttatttatataccctggggacagaaagtcaggttgaaacaggaaaaccaccagactctaatctcagccctttaacgacatacgcattggagcgcaagttaggaaaatgagcttttgttttcatggaaatcattctgattacagtgctgatgtttagaaataaatagcagtgtgactgggaaagaggaattgcagttgtgggggtgtgagcctggcagcagccagccagcagcctctcccaggcgggagtctaccatccgagacggcgatgacaaagagcttcattccacattctttgttatctctacttcccaccctcttggcaactacagagcagtgtgggcagccccaagtgtggtccccagagagcgtttggctttcctgtctgtctatcctgagcgggtggagtctcaggttgtgtgcccctaaatcaagatttgcttccacagaagccattacttgcaattttttttttttttctgagaaagtctcgctgtgtcacccaggctggagtgcagtggcgcaatctcactgcatcctccgcctcccgggttcaagcgattctcccgcctcagcctcctgagtagctgggattacaggcacccgccgctgctaatttttgtatttttagtagagatgggggtttcaccatattggtcaggctggtctcgaactcctgacctcaggtgatcaacccaccttggcctccctaaatgccgggattacaggcatgagccaccgctcccagcctttgattttttaaggtggattttggttgttataaatggagaaaggtaagagttcaagttcaacccgtgtgtgaaagcaaaacaatggaaaacaggattggcttcttcaaaggctcctcttgtagaactgcctctttgaaatttcgaggtaatctacttt

SEQ ID NO: 16134 - DNA, 1142 bp, Homo sapiens
cccttccacccgtgctgccatcccgtgcctgtcgtgttggttcttcacacgtgctctgttctcggggttgttccattcatgccttcttggagggtgagggtggcttgggaaccgacccagtgatcatgcctactttcttctttgtatctccctccttcccagcccacccgggcagcagactctgatggaaggaaggtgccgtaggtgggcttttagaaactaacgggactggttttcaaagcagttatcttgggaaactgtttattccagcgatgtgacttttttcagaatatttcttggaatcatattcagagtctggggctgtgtgttgagcagccttaaggatgctagacactcatttagtgcccagggagtccagcgaatgacgtctgtggccaagcgaggtctcaggtgcaaagcaaaaggaccatttaaagtaaaatagcttggattcaatcatgtgacttttaaattggctcagaaagcaattttgtaatttcagagagtgttttgagccatggccacgttgtcattgtgagtctatagcttgactccttggagaacaatattcatttggttgtggagactgatttgctgggagaaatctgtcctgttactttctggtcatcccaggttctgacttttaccaggggcaaaaaaaaaaaaagcaagagggagataaatcccatctgtgagtttgtcttattggcgcctttttcctcagctgtcttccaagtattatttttactgttaaaaaattttttaaaaatgtgaaatgtaatgtttttacagcaacaatatgaaatatattttataaggaataaaatggtaccttgtctgatttaatgtgtgcctgtcctttgccccttcccttgcaacaaataagattatcactgtccttgtccttggtgttacacaaatggtagcatatcacactgtagcaaagtatgacgttgattcacttatactaacagtaggtaacgcttcccaatgactaggccaagtgtatacatgggttccctattataaataaccctatgagagagtgctgttattgttcccattttgcagatgagaagagtgaggcacagaggttcaataacttgctcaaggttataaactgggaaataacagcactccag

SEQ ID NO: 16135 - DNA, 1099 bp, Homo sapiens
tcaccagccctcagcagaaaccgaaagagaaagaacggaaacacggagtttgggctctgttggctaaggtgtaacacttaaagcaattttctcccattgtgcgaacattttattttttaaaaaaaagaaacaaaaatatttttccccctaaaataggagagagccaaaactgaccaaggctattcagcagtgaaccagtgaccaaagaattaattaccctccgtttcccacatccccactctctaggggattagcttgtgcgtgtcaaaagaaggaacagctcgttctgcttcctgctgagtcggtgaattctttgctttctaaactcttccagaaaggactgtgagcaagatgaatttacttttcttaaaaaaaaaaaaaaaaaaaaaaaaaaagagtttctggctgatgggtgactcagagtgcaggactgcctggccgtggggcagaggggtttgcccttctcggagggtacctcctgttccctgtctgagcatcctgcatggaagtcaaaggaaatccctttcttggtgacgacttaaatctgggttccctcagacattgggttgcaccccaacaaatattaaatggcttcttcttaaagcccagagaaagaggttttttaaaagactgtcgccaaatagctgagccaaaaggctgatcagaattcactttttggaatgtggcagttaaacactaccttgatcattctctcctctttcctcgaggaactcctggagggtttgagcgtctggaaactctctgctctgacccgaggaagcaccctcctgacgccgccttcctccggttattgaaaggacgcctcagaaatgctttgttttcttttacgatgtattcagaagcctttactgattaaagttttcttttatttgggtggccgggagagacccagggaggttctggaggttcctttctgtctcctggccccaccagggatttccccatttctgtttgctgcctgaaagcaggatgaggaaggccaaggagagtccttgcacccgtgagcgtcaggatgaggaaatgacaggaggaagacgtgggtttgggttagtggctgctggcgttttggcccttggtg

SEQ ID NO: 16136 - DNA, 1194 bp, Homo sapiens
ccactggaaaggtaaatgattgcttttttatattgcatcaaacttggaacatcaaggcatccaaaacactaagaattctatcatcacaaaaataattcgtctttctaggttatgaagagataattatttgtctggtaagcatttttataaacccactcattttatatttagaaaaatcctaaatgtgtggtgactgctttgtagtgaactttcatatactataaactagttgtgagataacattctggtagctcagttaataaaacaatttcagaattaaagaaattttctatgcaaggtttacttctcagatgaacagtaggactttgtagttttatttccactaagtgaaaaaagaactgtgtttttaaactgtaggagaatttaataaatcagcaagggtattttagctaatagaataaaagtgcaacagaagaatttgattagtctatgaaaggttctcttaaaattctatcgaaataatcttcatgcagagatattcagggtttggattagcagtggaataaagagatgggcattgtttcccctataattgtgctgtttttataacttttgtaaatattactttttctggctgtgtttttataacttatccatatgcatgatggaaaaattttaatttgtagccatcttttcccatgtaatagtattgattcatagagaacttaatgttcaaaatttgctttgtggaggcatgtaataagataaacatcatacattataaggtaaccacaattacaaaatggcaaaacattttctctgtattcattgttgtatttttctacagtgagatgtgatcttgccaaagccaccagaccttggcttccaggccctcctgtagtgagttgattgtctgcacttgccttgcccaatagccagtaggctacagcttttgccccacacccttattttcagattctggatcattcttgtttacaactgaaatatatataacctcagtccaaagtggtgattgatttgagtatttgaaaattgttgtagctaaatgaagcatgattagtcttagtatgaatatcatttaatctttaaaaaatcaagtaaaaatgtttatctgataatgtttaaataatttacaatataaactgtaaaacttattaggcatgaaatcaatcagaagagaaagaaaaatgctggaacatgcttgatgtatta

SEQ ID NO: 16137 - DNA, 1055 bp, Homo sapiens
catcacactatgagaattgtttgtacacatttataatttttttaaagtatgtaaagtaaggattttttctccattcttcactcacaaaggatagcatttttatggaacctagatttacaaaggaacttgtgattcttttcaatgcttttgtgtcgttttacagctgattaagaaaaaatgtttacatttaattcagctgtatttcctagtagctgtataatcttacacattattcttatataattttgacctattttatatgaaaataattgtattggcatctcttcataatttaattctcttctctccttcttttgttccgattagatgaatttgggaaaggagtaggaagactaggtatcgcatgccttccgtctgattgtaatcagtctcctgggttttttactaatttaatcttaatcctgtgcttctttagtcatcaaattgatataggattacaattttctctcaggatccaagtcttctaagaatgaaaatgttgaagtctacccagaaccagccatccttgtagacatttctatttggttgatttataaagatttaatatataaagatttaatatgagttaaacatgtttcttattctgtgatctctaattagaaagtaaaattctgttgccataaatataaaagaaagttttcacttatattttagtcaaacaccaaaccactgcattacttacttcctataagacacagtagttcaatctgttgaaaggcattgaaggataatttccttcagattactttttaaatcatcatctgcctcaggaaattctttcttgaatttttttgttggtgtgaaagcgttgcttatactttatgctcattttattggtcactgtcaccagtttttcccgataaagattaaaaatgttttttaccttgaaataattcagattttgaagattcactgtttcattattttgctaattaccattaactagtaaagttagtttttaaagtttttttaaggttgatattttatcatattcctggagtaggatggattactttattattattgtagcttta

SEQ ID NO: 16138 - DNA, 2202 bp, Homo sapiens
catggacatctttgtcccatgaatttagttggtcatcgtgttacagggctataatgccgctctagatccagttaaataagaagtggggaggggttgtaaactgcagctttttggggcacttatccatttattaccccaagtaaaagacctataccaaacagcaaacaacatctctgcattgtcattataatgttctttgagacacagccagtgttccagccattgttccatctaagatttaagcattttctagaaatgtatggtggcaggggtgttgaacataacttcttcaagactgacatggttctctttcttttgcaggcctgattgttggcaaaggcatcataagaagctggcatttatttctgttctaacctattactgtataactgtgaatagacactatgcatatttgttggtcagcaaaaccaagaaacaagagctatggcatttgaaaaagtctgtctgattccagggtgtttttcctgggtttcatcatcaggtacctcctccctttcatctcagcaagaatgtggcaccttttatcgtttgataaagattaaggacatgttctttggtcaacagccagaacttaaaatctgctggaatagggtcagagaccatttcagctgcagctgaggaaaatgaaatgttcattttatttggtgccttgtctggggagcacactaactcttctggaaacgtgtcagtgaaacagagatcgttttgtggaatagcaacccatggttatggcgagtgacccgacgtgatctggggggcaggctgcagaggactcatgacaggctataccatgctgcggaatgggggcgcggggaacggaggtcagacctgcatgctgcgctggtccaaccgcatccgcctcacgtggctcagcttcacgctctttgtcatcctggtcttcttcccgctcatcgcccactattacctcaccactctggatgaggctgatgaggcaggcaagcggatttttggtccccgggtggggaacgagctgtgcgaggtgaagcacgtgctggatctgtgccgcatccgggagtcggtgagtgaagagctcctgcagctggaggccaagcgccaagagctgaacagcgagatcgccaagctgaatctgaagatcgaagcctgtaagaagagcattgagaacgccaagcaggacctgctccagctcaagaatgtcatcagccagaccgagcattcctacaaggagctcatggcccagaaccagcccaagctgtccctgcccatccgactgctcccagagaaggacgatgccggcctccctcccccgaaggccactcggggctgccggctacacaactgctttgattattctcgttgccctctcacctctggcttcccggtctacgtctatgacagtgaccagtttgtctttggcagctacctggatcccttggtcaagcaggcttttcaggcgacagcacgagctaacgtttatgttacagaaaatgcagacatcgcctgcctttacgtgatactagtgggagagatgcaggagccggtggtgctgcggcctgctgagctggagaagcagttgtattccctgccacactggcggacggatggacacaaccatgtcatcatcaatctgtcacgtaagtcagatacacagaaccttctctataacgtcagtactggccgtgccatggtggcccagtccaccttctacactgtccagtacagacctggctttgacttggtcgtatcaccgctggtccatgccatgtctgagcccaacttcatggaaatcccaccacaggtgccggtgaagcggaaatatctcttcaccttccagggcgagaagattgagtctctgaggtctagccttcaggaggcccgctccttcgaagaggaaatggagggcgaccctcccgccgactacgatgaccggatcattgccaccctgaaggcggtgcaggacagcaagctggatcaggtcctggtggaattcacctgcaaaaaccagcccaaacccagcctgccgactgagtgggcactgtgtggagagcgggaggaccgcttggaattgctgaagctctccaccttcgccctcatcattacccccggggaccctcgcttggttatttcctctgggtgtgcaacacggctcttcgaagccctggaagtcggtgccgtcccggtggtgctgggggagcaggtcca

SEQ ID NO: 16139 - DNA, 1099 bp, Homo sapiens
cgaggttcatttcctgctcagaagcctctccgatagtgacctcctggctatgaggcggcaaggccgctttctctgggagacttacttctccactgctgacagtatttttaataccgtgctggctatgattaggactcgcatccagatcccagccgctcccatccgggaagaggcggcagctgagatcccccaccgttcaggcaaggcggctggaactgaccccaacatggctgacaacggggacctggacctggggccagtggagacggagccgccctacgcctcacccagatacctccgcaatttcactctgactgtcactgacttttaccgcagctggaactgtgctccagggcctttccatcttttcccccacactccctttgaccctgtgttgccctcagaggccaaattcttgggctcagggactggctttcggcctattggtggtggagctgggggttctggcaaggaatttcaggcagcgcttggaggcaatgttccccgagagcagttcacggtggtgatgttgacttatgagcgggaggaagtgcttatgaactctttagagaggctgaatggcctcccttacctgaacaaggtcgtggtggtgtggaattctcccaagctgccatcagaggaccttctgtggcctgacattggcgtccccatcatggtaatagagaaacgaacagttcgttttggtgcatgaaatagtatttcactcttaatcccttttccaacttccttcactttagcaatcgtaacttctagcagaggagaatacatgcatactcatgaaaaacctgtatagattcctttcttcctgaagggtttgcttgctgctttttcaagccttggcagttctgtggctgttactcacttcctaaatcgaggatccccaaaactgaaactgattttatattcaatatacaaaaccttgtcggttatcccgtagacttccatgtcataacaagatgatgatgataatgataagctaccatttaggaagcacttagcctctaggcactataataagcattttgtgacatattatcgctgtttcttcagcttattcgtatgggagctgaagcttagg

SEQ ID NO: 16140 - DNA, 1718 bp, Homo sapiens
ctggcttatccttaaagatcatctcccatcctccccagcgccatctgtgtgcagcaaccagaaagggatgaacttggccctcttgcgggcctggacaaggtctcttccttaccctttctgttgccagtcagcaacctgtaactcacattctcttcccagtgaatccctgggagcgcctgaccctggtgggctgttcagcttcctgctgctggggccagcgatttttgaggatttatctttaggccaggcttgcctccgtacttatccctgctctcccatttctctcttgtttgagagagaatgaggaagcaaagagtgagaaagaataggggctgaagacgccactcccagatggctctttctatcctgctcttctgttgaaacacacgtgctgtgggcctcaggcgtttctgaagtgctctttcttggattggacaggagatcagcagcgtgcacatctgctgtggtctgaagtggtttgcaggtcagcctcctctccctagtgtagagcaagccagtgtccttcgaggaacccacccggctggccgggaagttttacagcaaggcgcctgccttgggataattccttggtgaaattcaccttccccccgcctctgtctggagccccatcctgtgttatctgtggtttttggacccctaatgtcagcttggctgtaggactccccgaggtttggtatgtgctagaacaatgggaggctgtgatttgctgtgtaagctcacatccagccttggaatctaacgggcattcacaacccgagttaccactttccactccctgcttaggattctgttccctgggctgaaactgaaataagctaattttttgggtcacggtggcagtaggggaacctaggagggtgtgagtggcatttgtcagggatttagcccatgacgtgtttcttgaaccctactttctggaagtggagttgactctggaagttttctagcaactgaacaaaagctcaggtttgtcctggtcatgcacatgccttaagccagttccgtcttccctagaccttggcatcctgtgcttctatttcttggaatacgttctcctctgacctgcctgtaccacgtgggtcctcttcaagtactgttttgaagctgggctcttttgtgtagctcccacccacctgtagggctagctcggcttaagggaactctccccattggcaaaccggacccggccgccgccaggactgtgtttccaaaggttccccgcccccaaccccagcatcagcctgtagctcccctgctgaggcagtgtggttatgttcccagcagtgggggtcagacgcccttcctcagaactttctagttgccctctacctgactcctgacttgtattccttttagcagtagccttcttccctcggggagccaaagagtgtggtgtgtggcgctatattgtggctgctatttcatctggtttcttttaatgtgaggaactcacatactgacttcagtgggactcggtgagccggggccgtctgtgtggtgggaccccctttagcgggactcagtgagctggggccgtctgtgtggtggagccagggcctctccctttagtggagccaggttgtcgggccccgaatgtcactggtggatctaagaagggctgagtggtctgacaccaaaacatgccgcagggagggctgtggtgccggtgcttccaacaaggacagccctccttgacc

SEQ ID NO: 16141 - DNA, 1165 bp, Homo sapiens
agcgcattgtgagcgaaatgacttgcatgtgtatgtgggagtatttcattagaagggagtggtgaataaaatacagtgacattgtaagtgtttggaatggcaaatatgcttctgcaggccgggaaggatgagagcctgtgaggagacttcatcatagccctgtcctgaaatgtagcattatggggaagaagattacatagcccatttaagaccaggcaaagctttgaaatttcccatgatttgtctttaatcatttttaacctcatcctaagggagtggggagtcttctcccattaaacataattgctcatttgtttttagctggcaggtacattgtaattaagaactgtgttcagtctcctttcagctccacctgtcgctagttaaatggtactcatctaaggagagaaaccagagagtacagtggaaggcaaggggaggaaattgtctatcaaggttctgatatgagacttataaaattcaaaaggaccagtactatgtagtcaatgccctattttcagataaagattgagagtaaaatcattcagactctgatgtgtaaatatagatacatgtatatatggatatgtacaatatatgttgagtgactaatggaaacataatagaaaaaaattacaacagtatctttccctttctggaaagagcaaaggaaactcaatcacattctgtcttttactggtttcagtgtaaagtcataggtagctttaaccttaatggtgcaaaaaattcactgtggacttcagtttaaagtcagtgagaggagaaagcattagtggccttcaggaggcatcgtagcagaccctattggtagcccacccatatctctcagactttgctgtttcactgtcctctgtcataattccagctgccggtatctgtatggctttgcctgagagttttttcctgaggctgcacaaaatgcagcagttggtatataaacatttcagccccattgctcctcagtgggataactcagagctgtctgtgttagaccatttctgagtttccccatggggataagttccagttgccccaagttgtatgtggctcagtgccattatctgtcaccttcctttgcactgatcacttctccgttctgttttctcagcacctcccatataaactaccttctctcaaactcttt

SEQ ID NO: 16142 - DNA, 1146 bp, Homo sapiens
ggcatcccgattaaatgacacactgtcactgtgggtaagaggaaagagccttcaatgtagcagcacagggtgcgcctgaaagaggcacaactgctgtggattttctgcctcgctccatctctcctatgtataatgaagccttgtttaaaggggcatgtggggctggatgttaagcacggcttctttttgtccgttacctgaaaacaatttctaagataaaaggaaggtgccatttccttacctcttcacccatcctcctccaccaaatgtattcaacttaaaactgtgagagagagagactgaatgaccttcctcagttttccctttctcattcaggagatactgaatatccgccagtttgtagttggtttccttccacttaaggcacacgctgactgcatcatttccttatctgttaatcctgcttatgtgagtgtgaggaaagtctttgagagggcatgaaagtgccaccttatatatgtctgtgactttaaagagctatatgcagggcctggtcccacttttgtccatggatttcagggggaaaaaatatatgtacttttttcagcttccaagcattgaagtgaagtggagccgtctcttctgttttactgtattacttgaaccaacaaattcaagagtagcatttgttattctcaggaatgagcctcccaccgccccccccccaccgactcatattcttttttggtttatctttttatttcaattaggagattacgttctcttcctttccttttattttgcttagaggaaatgtaacatagtcccatttttgtggaattttgacgcttattctcaattgaatcagaaagtacaaggagacagagaaaaaatccgctctgacaagccacatccatgattgattgtaaggggattattataattgatagcttctttatcatgggattgctagtatcatttgtacttgctggtctttttaaaggaacagactgactcaaactgttaagacagctgcagtttctaaagaaatacaaagattgccgtggatgcactcaaaggtttcattgttttaacacctttaagggagaaaaaaagcttcagagaataaaggcaagttcgcatccatgaagggcagtaccagaccctatatggcaatgtggtaaa

SEQ ID NO: 16143 - DNA, 1119 bp, Homo sapiens
ataatggcaattgttctgaatgactgagtgtcctcctgacatgtaattagctgttttagcaggatgtagattggcatggtcataattaaaagaatttctgtcttttatgtgattggaaatggcagcgctcccatcccctgttccctcttagcactaatgctcccaagaacatttggaacagcagctccataaactaaaataatgacatggtgctcgtgttctcccctaagtgaaacagcagaatttggagttgtttcagcttcaaaatggaagcctttgattattgttccccatttgacttctaagttctttgaaacttcactcaacatccagttccaacttgctccacctctggcagaaaccacagtcaggaccccagaagaagcccctctgaccggcccccactgcattccagcccatggtctggccagctccgggcccttgcttgcctaactcgaggatgttgctgcttgctgggctctctgggatcttcagatttcccttggttgcttgatatttccattgccgtcactatcagaaagcatttcccaaacagaagtttacagaaaattgaatcgaggtttcctcattgaatcctaagactcaaagcagacaacatgacaggacacatataactaacacaggctttaaacaggtggaggcgtgaatggagtactattcacgacattctaaagctactggagcacgggacacgtgtctgtacgctcctctcacaccccttactcggcagctgccccactcccgccgttgccgttgccctgagtcttccccactgttctgctgtgccagtgtgagcatctccccggcactcaagtccatgttctctccctcccgctcttcctcctgtctcttccatgctccctgttgcacgggacatcatgtgggcttgatgccgtacacagtccctgaccatggccccctactcttctccagaagtgtcacactagacaggagctgctgagtcaccaactcacctttccctagaatgtgggtttgttttttctcccccatcacttgcagaggtcttttttcaattatatgatcaagaatgagtctacaagaataccagcaccagacatagtgccaaatggccttttg

SEQ ID NO: 16144 - DNA, 1717 bp, Homo sapiens
gggtattcatatttgacacatgggcaaacttgccagtggaatggaattgtgacctgacagagaagggaaggcaggctgacgaaggtgatcgaatgggagaacagtgctgtggtgatcatgagaatgaggcttttctgtagcatgtaaaccaaaccggacccttggcagttcgtcgtccctcagttctccagatgctattttttgcaggttctaccaagtgcttgttgattaccctagttgtaattatctagggaagagatgaatgtaagtgagagtgcagagcactggggagggtgacagtgaaatgcaattagaggcagcaagagagtcctagtctgttctcacataaccggacttgaacgctccagtgcgagcagagtgctgggggtggattccactgccgaaccacggcagctttgctttactcttcagcatgggggtggtaactagctgcacagcaagttatgaaatggaaagcaagcttaacagctgtaatctcatcggataccctggagcaaatgccttgggattgcctgaagtgaagtgtttagcatccaccaaatagttgagtttctaagatgggccatgcgggatccctgccacacgggtgtgggggcagcgcgctcctccctgcctcggctgctgtgtgtgttagtcttcatgtttccccttggcgtctcctctggtccctgtccatcttgtgcaccatgtgtccctgagggcgagtcacacctgtgtcttgagtctgctgtaaggtgttcagtctacctcaaggggtcatcatggtaagctctatcccacggcatcctccgtccatcaccacacacactggaatgtatcccccccgccctgccccttcgataacctcctgaccttgtctttcctataatcaccacaaactcctagtgcaaattggatgctgctttaaatgtgaaaacaattgttcaaaagctataaaacctgaatgaaagctgaagctgaatttataagccttgttgcatatgagccaaaagtgcaaaaagctctatataatgaactaacctgccactcgtataaatataaatatatataaatatattaaaatcagactgttctacaaaattgtgtatttgtatttttgtgtacgtacaattttctgctaagcagaaggaggatgtagtataggatgctgtgagaagagatttggtttaatcctatttctttgttacttatttttgttaacatcagatgcctgtctttgtcttatatgtgtatgacactgtttggaaagctgcagtatctctcttcctgaggtccagaggccattaaagaataaacatggggcttagaggtgtcttggccaccaaacacaggtaagccaacagagttcggctcccgtacgtggtgtggtgggacctggggcctggagccacttgtactcctggggtgggactgagggagggaaagggctcccccacttcaggctggtcactgtatgttgacttccctctgggaagcaaaattccacttgtaaaaatcagcttccaagacaaaagatgatccgatgtcacttctgggtcaccaggaagggacacaggatctctctgaactttggaacagaccctcatattctggggccagaagtttgcccagaaagcagcaggtggctctgcctggctgtagagcccagctcattggctgtccctgggcttcgtctccctcttccgagtagttgctg

SEQ ID NO: 16145 - DNA, 1228 bp, Homo sapiens
gcagatggcacccaaggccgggaagggcagtaactgcacacgcggcgctgtcagagatgggggtgggggatgcttctgggggccctgcctccccattgtgtgcccagaacatccctggccccaccccgccacttccctcgggcccttatgaaggactgaggctccagggtgagaaggctcacttctgccccgggcactgcgtccagcagcagaggggacagggggcaggtgtgtgactgggttcctgggtacccaggcctgaccagagggagcgggagggcagaggtgaggagggggaagatgtttctgggcctaccaaggttcaacaagagaacggagctgggaatgtgactgctggagcctgagaggtggaggagttctgatcccccgttacttcctagcattttctcctcttgccttaaaagttccctgtatgtgaaacgggaagtcctgagagtgtgtgttggtggctgtgcgcacgcacacaagacgggagtcaccctgtgcttcctgcccaagatactgacccattgaacccccaaagcatctttctctccacaaagtccgtggtgccttcctggtgggctgcagacactaatggtgttggggggtcttggaacagcttctctatgtgtggattcgtgtaaatgcgaagagttcacatataaagaagtgactttgattctgtgattatattgatttggtacacagtaaatgggagtttaaaaaatccaaagactctaatgacttgtaaagactctaatgatttgtatcatgtaatgaactaaaccacctgtaattttgtaccgtatgtgtctttccatcaaatgaccaacagcttctcaataaaaccagaccatttctcacctgcatcatgtctgaggccagtcttgttgcttctccttcccctcaccccaacatagggttttggggctcctggcaggccatcctgtcatggtgtggccttgttctcagcaaaggtggtgcggggcttttccagactgagactgggaggaggaggatcagggaacagcagcaggccgtgctcgcctccccagcccatggacttcagaggctgaactcttcatgatttggacttaagagcccaggaggccccccggttctgagtcatctttccttgtttggacttcagccccttactgaagccaggaaccatggaaactttctggggcccttcgaccccaggtaagtggtgctactgggagac

SEQ ID NO: 16146 - DNA, 1112 bp, Homo sapiens
agcgcctggtgatcttgctgtgtgcctgtgcctggggccttatgttgctctttctatcatttccattctggtggccccactaatgtcttaacctaaaccataattgtaaccagtgcctttcctccccactggagggcaagcccccccacccacccaggatgtcctggctcactccgcaagccccccagcctcccaccctggtcccagtttcccgcaaagtgcctctgggggaccccccagcctcccaccctggtcccaggttccacaagtgcctctggagggccctgggctctggcagatggtcctggtgccccagacgggggccgagggcctgagcccccccatccctcctctgccagggtttcttagcggtttctctgtggatgttttggcatctttagacacctggaaagtctcttatgtttgccgtttattcccttcacagaaggcttggaatgtatttatttatatttattttttcaaaatccgaaatcatttgcgagccgcaatcgtcgtctgcctgtgtgggggggcccagggcctgccttgcacgttgcagcctctctggccattgcagagctgctggcctcctgcccaggtggagggtcctggggacggcagaggataaagccccctcctcacatccctctattgcggatccacagtggccttactcttaacttggatgagagcaaaaacctgggagaatgatgtgcttctgtagtcggtgacaaaggaagaggcattgctactttatttggtgcacttttggtttctaggaaggtctttgggtcattttaacttctcggcaactcccagactctcagagtgtggggctggggcctggcggctgggctggtgcagggagtgtgctggttagtctccagaccctcacagcagccacgcccccaggcccaccgtgcatggtgtgggcgggacagccggaagcttccggggtggcctccacctcctggctggggcacttatgctcccagagcctttggtgccaggtttgtgggatgggggttagcgtctatgtgtggaaggccaccaatctagggacaggagtcctgggtcaagattcacacagccacccttggagctggtttcta

SEQ ID NO: 16147 - DNA, 1119 bp, Homo sapiens
caagcgttttggatgagggatactcagctgggttaattcactggcaagaaattagtggtttctttaatttagccttttttccttagccagaatagaattcattgttttgtagaggagcctgtacagataagagagtaatctgttgctttttcaaagcagagaaaactacttggaactgaaaccagatgataaaaaagtaaaagattaaaaaatatatatttataagacatacacaaagataaaagcaaaatctataaggcagaaatattaggactgttgaaattattatctgtgctcagtcctccttctaccagagagatacaagttgtctgtgattagcagcctgtcttactagctaatagacattcatttatccttcaaattactatgtggcttcaaaggtattattttatattcttactgtgaatttacataatgtttattattttacccttcaaaaaaagtcttctaaactaaattttttttttttttttaacttttctttcacgtcaatgatgacatctgttttgggagctcaggggccagccgaaggtaagagatttggtttgttatgtgatgcttgtaaagatcttatatgcatgttgttgaactcttagaagttttcttctcaaaaaggaaaatattttctatcattttgtacaagtaatgcaagctgtcagcctactcacaaatctgaagccatttattggcatgggaagggccggaggtttatggaaaagctgtatttgcactttgaccacttctggctggtctcctagcagctacaacacagattccttttgtgccatagattggctcaagactggtagttccaaactgtggtcaaagccgactcatcctctctgctcccaagacagctagggatgcattcccagccaacagaaacctgcgcggcctcaagccgcctccatagattggctctagactggtagttccaaactgcggtcaaaaccgactcatcctccccactcccgagacagctgggggtgcattcctggccaacagaagcctgcacagccacagccgcctcaagggaacatgctttcacctctgtctcttagggaatgtggagccctgcttgaagtgggcacaaagtct

SEQ ID NO: 16148 - DNA, 1326 bp, Homo sapiens
tcggcccccagcagcctgccctacctgcacagccccatcaccacctctcccagctgttagagccgccctgggggccccagaaccagagctggctcccagcaagggtaggacgggccgcatgcgggcagaaagttgggactgagcagctgggagcaggcgaccgagctccttccccatcatttctccttggccaacgacgaggccagccagaatggcaataaggactccgaatacataataaaagcaaacagaacactccaacttagagcaataacggctgccgcagcagccagggaagaccttggtttggtttatgtgtcagtttcacttttccgatagaaatttcttacctcatttttttaagcagtaaggcttgaagtgatgaaacccacagatcctagcaaatgtgcccaaccagctttactaaagggggaggaagggagggcaaagggatgagaagacaagtttcccagaagtgcctggttctgtgtacttgtccctttgttgtcgttgttgtagttaaaggaatttcattttttaaaagaaatcttcgaaggtgtggttttcatttctcagtcaccaacagatgaataattatgcttaataataaagtatttattaagactttcttcagagtatgaaagtacaaaaagtctagttacagtggatttagaatatatttatgttgatgtcaaacagctgagcaccgtagcatgcagatgtcaaggcagttaggaagtaaatggtgtcttgtagatatgtgcaaggtagcatgatgagcaacttgagtttgttgccactgagaagcaggcgggttgggtgggaggaggaagaaagggaagaattaggtttgaattgctttttaaaaaaaaaagaaaagaaaaagacagcatctcactatgttgccaaggctcatcttgagaagcaggcgggttgggtgggaggaggaagaaagggaagaattaggtttgaattgcttttttaaaaaaaaagaaaagaaaaaaaaagacagcatctcactatgttgccaaggctcatctcaagctcttgggctcaagagatcctcccacctcggcctcctgagtagctgggactgcaggtgtgtgtcatcatgaccaatgtgaattgcttttgaagctggttcatgggcatgtaggccaccgaagcaattttagaccacagtaagtcaagcttttttccctccgatgatcactgggtggttgcagcattttttgcataaacctgcctaagacttgtctatcgtctgtgatcaatatgccatattacactaaggtgctcctggaaaattgggtgcagttcaaattt

SEQ ID NO: 16149 - DNA, 1602 bp, Homo sapiens
ccatggtggccccactatagaatgcattctcttttttggggtcctaactgtcattcccagcaaccatgtgtgagtgtagtaggcttgatgattgggaaggttgctgtgggaggcgatgcactgtcctgcttagcccagttccacctagtggcacactctttcctttcctcctatctcattcatttgctgacaataaacatgtatgacttgtaattttataagcaattctaatgcatttttaaaaactaatgtaaattttacccctctcattctaggatatggtggtaccaggagacgataaagtagaaagttggagtcaaacactggatgcagaaattttggatttttcatcactttctctttagaaaaaaagtactacctgttaacaattgggaaaaggggatattcaaaagttctgtggtgttatgtccagtgtagctttttgtattctattatttgaggctaaaagttgatgtgtgacaaaatacttatgtgttgtatgtcagtgtaacatgcagatgtatattgcagtttttgaaagtgatcattactgtggaatgctaaaaatacattaatttctaaaacctgtgatgccctaagaagcattaagaatgaaggtgttgtactaatagaaactaagtacagaaaatttcagttttaggtggttgtagctgatgagttattacctcatagagactataatattctatttggtattatattatttgatgtttgctgttcttcaaacatttaaatcaagctttggactaattatgctaatttgtgagttctgatcacttttgagctctgaagctttgaatcattcagtggtggagatggccttctggtaactgaatattaccttctgtaggaaaaggtagaaaataagcatctagaaggttgttgtgaatgactctgtgctggcaaaaatgcttgaaacctctatatttctttcgttcataagaggtaaaggtcaaatttttcaacaaaagtcttttaataacaaaagcatgcagttctctgtgaaatctcaaatattgttgtaatagtctgtttcaatcttaaaaagaatcaataaaaacaaacaaggggtttagtctcattctttctattagcctaggcgcaaataaatgttactttttgtttttttaaaccctttttcccaaaggggaaagttcatgcagaagttctgtctccctaaacagtaattttatgtggtagtcgtaccttagtcttttggtaaatgttttcaaaaagtaatttacaaatggtgtggaagcctctgccaaaaaatagcgtttgaaaaaaataattaaatctccaagcctcccaacccatcagagattgcatggttacacttagttaagcttcataacctcaaagccccagttttatatcttatgtgtttaatgatttttgccatttaaaactgcagttacttttcaccaaccaataagaaccaatttaaaacaaacccttattaagactattgcataataaaactatcctcttttcatcagtaaaacagtagaaattttaactgatagaagaaacacagctttactttatgtatatcccactaaatccttaccccatttctcc

SEQ ID NO: 16150 - DNA, 1602 bp, Homo sapiens; identical to SEQ ID NO: 16149

SEQ ID NO: 16151 - DNA, 1188 bp, Homo sapiens
ggacttttttcaggagtgggttataaaaacattcaagttggtctgacagtattttgttaaggatatttgtttgtatgtttattcagtatacttacataaaaattatttcgccatcagccaaaactcagtaatcatgacagctgtctgttgttttatgaagtttatttctcaagaaaatgggaataaatttgggatttgttcagcttttttactaaagatgcctaaagccacaggttttattgcctaacttaagccatgacttttagatatgagatgacgggaagcaggacgaaatatcggcgtgtggctggagccttcccactggaggctgaaagtggcttgtggtattataatgttcagatttcaagaggaaggtgcaggtacacatgagttagagagctggtgagacagttgggaactctttgtgcttgtgatctactggacttttttttgcaggaagtgcattctctggtccttccctattttctgttctggatgtcagtgcagtgcactgctactgttttatccacttggccacagactttttctaacagctgcgtattatttctatatactaactgcattggcagcattgtgtctttgaccttgtatactagcttgacatagtgctgtctctgatttctaggctagttacttgagatatgaattttccatagaatatgcactgatacaatattaccattcttctatggaaagaaaacttttgatgatgaaacaataaagattttaaatatctattttagtttgtgggtgtttttgaaatgaaaatatatggcacactttcattctgaagtgcattaacattctaataaggtgatgtaaagcaagatgacattggtgtaatgttagagttgcagaagtttccattccaaaataaaatggaaaccatagttacagatattacaatgcagccctgtaattttgagctgtagtaaaaggattggtaatctgggaagtagaatttttacaaaatcttttacaaaaatagtcataaaaggttttgttgacatttaagactactactgatctaaaggcaaggtcctacttcttaaattttcagaacatttttatgacttcttattatgtatttattaccactcattattatagcatgttactttttgcaaacattttaaacaaaaaatatttctgtttggtacactgtga

SEQ ID NO: 16152 - DNA, 1198 bp, Homo sapiens
gcaggagaatcccttgaacccaggaggcagaggttgcagtgagccaagattctgccactgctctgcagcctggaagacagagcgagactctgtctcaaaaaaaaaaaaaaaaaaaaaaacaaatcaaaaaatatatatacagatttttttcccaaacagtagattcatactaatttctattttatagcctgctttttaaactttatgtctataagcatttttctacaatgtaattttaaataaccacctaatacagtcacagttgatttaatcaatcttctgctaactttcagattttaaaaattttttatagaaacagggtctcactgctcctcctgccatctttctgcgccgccacaatggtgcgcatgaatgtcctggctgatgctctcaagagcatcaacaatgccgaaaagagaggcaaacgccagccaggtgcttattaggccgtgctccaaagtcatcgtctggtttctcactgtgatgatgaagcatggttacattggcgaatttgaaatcattgatgatcacagagctgggaaaattgttgtgaacctcacagacaggctaaacaagtgtggagtgatcagccccagatttgatgtgcaactcaaagatctggaaaaatggcagaaaatctgtttccatcccttcagtttggtttcattgtactgacaacctcagctggcatcatggaccatgaagaagcaagatgaaaacacacaggagggaaaatcctgggattctttttctagggatgtaatgcagcatatatttacaaacaaaatgcctcacagacaattaaaaaaaaaaaaaagaaacagggtctcactattttgtccaggctggtctgaaactcttggcctcaagtgatcctcctgcctccacctcccaaagcactgggattacaggcctgagccaccacacctggccttaagatcattttgatttttcattaccataattagtaaagcgatgatcatcttctgtctctgactaattccctaggattacaatacaaggagttagtaggtcaaacagtatgcatattttgaaggtgtaaaggggaaaaaaaaacatttttttcctctactcacacatctctcaatacttctgatcaccaaatgtatggttttttttctcccccatactgaccaattctccagcactagctgggtgtcctataattcaattcatg

SEQ ID NO: 16153 - DNA, 1921 bp, Homo sapiens
ctcatgcctgtaatcccagcactctgggaggccgagacaggcagattgcttaagcccaggagtttcagatcagcctgggcaacatagtgagaccccatgtctataaaaaaataaataaataagattgatttattttattttaagatttattttgtgtggggtcctgcaggccatgagattaatcttagctgtacagacctatctatttcctgcgagatcatgtatgacagactggaataagagagagagaataaatacagagtgtttttatgttctttaaaaaattatcttgcaggttctgcatcactctttcttctctcatgctcttgacccagagggtcacgtccctctctctggacatttgtgaggggaaagtgaaggcagcatctggaggcttcaggagcaggagctctttgtctgagcatgtgtgtaaggcactgccctatttcagctacttgctctttttccctgctctcctgggaggctctctgtgctccttccagcgatttcaggctcgtgttcaagggtccagtgctttgcatcccagacactctttctgggctctgagctggaggggtctgcagattcttggactagaatgcctaaacgtggcagtgagcagggtggtggatgcaggagcgggactgactgattgccagcaattcgagtgcatctatgtcgtgtggaccacagctgggcttttcaagctcacctactactcccactggatcctggacgactccctcctccacgcagcgggctttgggcctgagcttggtcagagccctggagaggagggatatgtccccgatgcagacatctggaccctggaaagaacccacaggatatctgtgttctcaagaaagtggaaccaaagcacagctcgatggctccgacggcttgtattccagcacagcagggcttggccgttgttgcagacatttgccttctctgcctggtggcatggactccatccaggacaggtgtttggtttcgtttgctgggccgtgatggtggaagctgactacctgattcactcctttgccaatgagtttatcagatcctggccgatgaggctgttctatagaaccctcacctgggcccacacccagttgatcattgcctacatcatgctggctgtggaggtcaggagtctctcctctctctggttgctctgtaattcgtacaacagtgtctttcccatggtgtactgtattctgcttttgctattggcgaagagaaagcacaaatgtaactgacatctttccctggctttcaccttaaacacccaggaaacattttagaaagtgccagatgacgcatcgataatgcatacatttgaacttttccataataaaattttttctaaagttttggatggatatacccagtgacttgcagtaggaatttgtgtatctactttagcaagctattctgctggtactgaggatacaaaaaggaaaaagatgtggtttcttcccttaaggtttacagtctagatgtggaagcaaagattaagtaaagtgatacataaaaacacaaggtgctatgaaccagatggcaaacgctctatatatagacaccccaaaattgaatgttcagttgacccacctgatcctggaatgggaactttagcaacacaaaaccaaaacaaaacctaactcattatcatattggtttgttatgtggactacagacttatatccattattaggtttgaacttttttttctaaatttggaaatttgggccaggtgcagtggctcataactgtaatcccagcactttgcaatgctgaggtggaaggattgcttgaggcccagggtttgagaccaggttgggcaacatagcaagactttgtctcaaaatatatatatgtgtatatatatatatatacacacacacatatatatatatatata

SEQ ID NO: 16154 - DNA, 1300 bp, Homo sapiens
gagccccagtaatgattgccctctatgttgggagaagaagggagaaagtagtacaagtagtgaagaaaaaaatgtaggtggtgttggtggttgagagtacatggcacagaaaataaaggagccaggattacctgtgcctttggcttctccttcccctgctgctttttcttcctttttccatgtcagtgcttgggaaccctcacaactggcaggtaacggggtcgggataaaatgtaaacctgtgggtgtcttctgctgagtcattaggatctttgtagcaggctgcggataaatatgtggatgacatggggcaactaagagccccttttgcttgccacctcccacccctgctctggatggtgtctcctcttgctagactgccgggtacagatcacgtggcaattaaggcaaatgttaataaataccatgaaacagtggtttgcatagtcttctgaatagccatggctttggttagtcagcaacaaagcctttcacccttaccctggataatcaagagttgacaacagccagaaagtactgggaatagtggcttttggccatgacatctgctcattcttcattcatgtaatgggtcaaatcagaagtaattctggagatacggtatggtaagagaagggcctaaagagtctcaagagattagaaagcatatgccattgtaaggaaggatggggagagacagtgccaagattaaatggactcagccatttgacttaatgggatgcactgcccatggtggcaccctcccctgggagttcttccttgatcttgagactttcccaaactggaatccacttagctctgccacatcggtcccagatttggtgggactctcctctggtatcagttttcaacgccacttcttgtttggagtcattcccagtgcagtcatggactctatgaacaaatacggttatttaaatgtatttgtccagtatgagaatcagaatgaactagtagaggctttacagatcagctggtctgacccattttacagatgaggaaacaggcctgagaagatggagggagttacccacaatctgaaggggctctaccatgactagacccaggtcacctgcctcccaggcctggctctttccactccgaggtgctggctcaccacagacttattctttaatggaattttggaaaggcctcactccagtgactctttggatctttcttctctaagtagatgggaagcctgtaagaagagacttggaggcaaagcaaagggaatcagcacttaaccctcacccaaagggcccaagagaatctttag

SEQ ID NO: 16155 - DNA, 2423 bp, Homo sapiens
ctgagctgattgattgccttctgcatacaccttttctacaacttctcaaacgtgtgtgacatgctggtaagatggcaggaaaaggagtgactgaataatacaatatagctgagatgtgtttcaagaaaacctctgggccagggtaggggtttgtgagcgggagccaaggacttgccccatgtttctaatcaaggtgagaccactgacacatgtggtcagcaaatatgttctatacacacatccgcacactgtcatctaacccatccgttctcccatccacagcatctccaggacaaagccatcgcaactagggaggggttgacacctgctctcctaacatgttttctttctgtttcaggcttgaaaaacccttgcccagttttgatcccttcaagactttgtcacagcctctatcacacatctgtttttctcgaagaaaaaaatataattaataaaaatgttttactcttttacactgtataattgtaagaaatagcgtattatttgtgaatgcatggtctgaaatttctgtacagtttggagatattttcaaacgaaacgtaagagaagtcaacaataaaaccaagaaaagtgagtatttttataccaaacattttaagtatgctgggatggacgatcttacactggtttggatcacagtttttgttcttgacttttgaatgcttgtaattaaaaatatctatttttttcctctgaagtaagttgcatgtttgaggcatgtttccaaatattatcaaaatatcctgaattgtattgtgaatatatagaaatctgtgcctggccggagtccagggtaaattagtagcatggtgttagatgttagaaacagaactgttatttgcagtgttaggtctaggatcccagttctagtaggacagccctgcaagacaatcaaccagaagcctccaggagcttctacctatggcttattcacaactgggcaagaaaacatcattggtaagaactgctgagtgtgcccttagaaagccctagtagctccagctgtgactatatcaactgtgtgccaagtgtgactttgtacagttttatgtttccactctcctgtatgtgtagccactcgatgcctaacctaccttccacaagccagccccgcatccctgctcccgcagtgtaagtgcagagcctgcctcactggtaagggaaaaccttggcttgggaggccagccctggcccttgaaggggttggctgtgcccagcccacctggctgcagtgggcagctcatgtctgtatctccaaagtgatgtttgtttgcaaaacaccggctgaactgagctggtgttgccaactcttggcagcactgggccaaaccgaccacataccatgagctcccaaatggcgtgtgctcactgtgagacgtcctgccacaccccacaggagacggaggcagtgggcatttggaaccaattctattcagacttcgtcaaagccaaagtcagtctggtgttgtcagttgacacatctccagagttcatgacagctcaacctctccccttgtacagaagccatttttgtaaaaccacactgacctaaattcagctgccaaacacagtctttcctattgatccgctcggcttatgttgaaaatttcaatgtcatgattacctggttggtttgggtttttgttttgttattttccattagaaatataaagatgtcaagaagcttttaaaggtcaacacaaaaaaccaaggccaggagtgaggggctctttcttaccgtaaataaggggaaaaggcagttagctcaaggacttgtgacggatccactttggtgttcaaggacctgcttatgccctcagtgccaatcggctcttggtgagatgactgtactcctaaggaaaatagccacttctgcagtctattatgcttttataactgtttaaaggtacttttctattgtcatttttaaaaaataaagtgcttattccagctgtcacaccattgcttgacaaattcttttttagcaagaccaactacatgtatcccacactgcagacaagacgccagcagatttcattcccattgtcaggcttcggcagagctaagcaagcattggccattgagcttaggcacaaagagattaaaggaggaagcagataccggggaaagccagagagtaagtctgcaaacgcacaaccacagtggctggtgacccacaatgacaccagaggcagagggacctcaagggaggcccctcatctacctcagcctacaaagcttgactcaggattatctgaattatattaaaatgtcacttgggttttctgctgacttaaatatatcttacgccaggcatggtggctcacacctgtaatcccaacactgggaaactgaggcaggaggcttgcttgatcccaggagtttgagaccagcctggacaa

SEQ ID NO: 16156 - DNA, 1113 bp, Homo sapiens
ggatacgtttttaaacctgatgacagagacagagctgaagggcttcatcgtcccttttgtttgacttagtgcctagaaccattttggcaggtttttgtgcctgctccttcattcccgatggcatctgcatctcaggggaacaaaggcccggggtctggtcagggcgtgtgctgtgccccatgtgtgctgctgggtggcagagcaggagaagggtccgaacctggcatcctcagccactggcatctgggcatgctcagaacatcctggccacaccacccctcagagcagctgttgtttctaattgtttttaccttttcctttaggcccctattcagagaaggaaaaagcctgcttcacagaaaaagcgacgctttaagactcataacgaacacttggctggagtgctgaaggattactctgacattacttccagcaaatagggaacagttttgccctggaacagagttacagatacacaatcaagagtgttcttgctgatgctcggggtctgaagactgtcttcctatctgcttcttgcggctgaggagaggagcagttcagtttacaaaacaagtgcaaattaccaaactcaaagcttatttgagtagaatgggctcatgggcaatgtgatgttccctgttaaccttctgttactccctgggagaaaggcgctgagcgtggcatgcaggtgtctttgctgtgtttttctccacttctaaatggttcctggttcctttcttcctcgtttgttactttagagcaagtttgcccatagtcttgaatgcaatatttgtttattccaaaagaacatatttataataaaatcactgtagaaggatttttaagatgttagtgaattctgtttcttttcattctcggaaatggcaggaagcagctccagtctctgatttccatgggtcacgtgctggggatgtgatgaagcctgcagtctgcactgtgttgctgagcacatggatttcaccactggaacacaggtgtgctgcttgttagcaagcagagcaataaagatgtgctggatgtcattgttaatgttttcttttaaaaagaagcgtcagtgtcagccgggcaagctggctcacgcctgtaatccca

SEQ ID NO: 16157 - DNA, 1171 bp, Homo sapiens
ttttttttttttttttgaacaagggtcttggtctgtcacccaggctagagtgcagtggcattatcacagctcactgcagccttgaccttccaggctgaagtgatcctcccacttccgcctcccgagtagctgggactgtaagcacacatcaccatgcctgcctgattttttgtatttttgtagacaggaggtattaccatgttgtccaggctggtctccaactcctgggctcaggcagtctgcccacctcggcttcccaaagtgcttcagccactatgcctggcctctttttttcctataatggctagtacagtgcttggcgtgtaataagcgctaatgaaatatttcttgagtacttgaataagtgaataaatgcaagtgctagagaactaataataaaaggtaattttgtttgggaagtaacttgttgagatctgtggatttggagtgcaggtttgagtgacttgaatttgtattaaagacacttattttttctttgtagcattatggatccaagcctgttgagagaaagggagctgttcaaaaaacgagctctttctactcctgtagtagaaaaacgttcagcatcttctgagtcatcatcatcatcgtcaaagaagaagaaaacaaaggtagaacatggaggatcgtcaggctctaaacaaaattctggttagtaaaattgtttaggactgtttggtttttattcagattattcaggaggaaaccgtttagttatggctagttcatttttcagttcagcactcatgttgataggcactttgttgaatataaaggatgggacaagagaatttaagctcttaggatgttaatagtcttgtgctgtagttaaaatttaggttattacctctttaaaaaaactttatttaggtttaatttacataccatacagttcattcattttaagtttacagttcaaagatgtttggtaaatttacagaattttgcagctgttattacagtccaattttagaacatttccatcacccccagcagatctgatgtgcccatttgcagtgacttttcccatccctgccccggaaaaccaataatctgctttctggctctgtatatttgccttttctggatatttcctataaatgaaattgtacagtaagtggtcttttgtgtgttgtttttttcacttggc

SEQ ID NO: 16158 - DNA, 1111 bp, Homo sapiens
ctacttagttatttcttcatgccagttatcattcattcagttgataaacattatttgtcattcttctcaagactaagaactgctatatagagaggaataatatgaagagctggccatcaccagaggctctttataagttcaattaagatcacaatatcagtcagacaccgtggctcacccctgtaatcccagcactttgggaggctgaggtgggtggatcacttgagcccaggagttcaagaccagcctggccaacatggtgaaaccctctctctgctaaaaatacaaaattagccaggcgtggtggtgcgcgcctgtaatcccagctactcgggaggctgaggcaggagaatcacttgaacccgggaggtggaggttgcagcgagccgagatcatgccattgcactccagcctgggcaacaagagtgaaactccgtctcaaaaaaaaaaaaaaaagaagaaagaaaagaaaatgtttctcttcttttcccaggtggttgggatccatatgcagggacttgggtgtgatgaaatgctgcagggttttgctgttgcagtgaagatgggagcaacgaaggcagactttgacaacacagtcgccattcaccctacctcttcagaagagctggtcacacttcgttgagaaccaggagacacgtgtggcgggcagtgggacccatagatcttctgaaatgaaacaaataatcacattgacttactgtttgagttttatgtatttctttattttaatcaggatcttctgatagtggaaatttttagtacataatagaacttatttatggagttagaaatttgtagtgttatccaggattgattttcatttgatcacatctcacagtaattaatattttcaagttttttttttattaacagctctgtgctagttttttttttctgttttagcctcatcccaaatataaagctttgtgaagtacaattaacttaatgtacttgaatgaatagaacttgctactttttttttttttttttttgagacagagttttgctctcattgcccaggctggagtgcggtggtgctatttcagctcaccacaacctctgcctcctgggttcaagtgattctcctgcc

SEQ ID NO: 16159 - DNA, 1155 bp, Homo sapiens
agtactttgggaggccgaagcgagtggatcatgaggtcaggagattgagaccatcctggctaacacggtgaaaccccagccctactaaaaaatacaaaaattgaccaggtgtggtggcgggcgcctgtattcccagctatttggaaggctgaggcaggagaatggcgtgaaccctggaggcggagcttgcagtgagctgagatcacaccactgcactccagcctgggcaaaaatgcaagactctgtctcaaaaaaaaaaatttttttgtagagatgaggtcttgctatgttgcccacgctgatcttgaactcctggactcaagcaacccttctgccttgtcctcccaaaatatgggaattataggcataaaccactgcatctggccttttttttttttaatggagctgactgaaatacttttgcaaaagaggtaggaaaattattcaggaaccagcattttgtaatacttagaaatcttggtgtgtactatagcttatggtgatcttatggggaaggaattacctatagttgacccagaaattctatattgcaaaggaaactttctatctaatatcctggaaactgaaagtaaaaatctcactgcttcctcctctgaactagtgtctgtcctatcgccacgcgagccatactcctttttgtctagcattgcagatgaagtcattaagacctgagggaatggtgttctggaggcctgtggattttgtctttgaccttgattcagcttgattaagcctggcacctgcaggaacaggcctggagggtgcagggaaagaagaagataactcaattcagaatcaagcacgttccaatatgttaaagcattccactttgtaatcatgcttacatggttccattattcttgtaagttgaccacatttgcatgcccctgcatgtatcatggctggcgaaagcgtgccagcagcccctaagtgaaggcctgggtacagaggattccagtaagagcaaatccaaaagtaagagtctgagttctcaccgtctccagcgtagaacttcagtgtcatgtacttttgtggtattcttcccattttacgaaagcacaagcattgcgtttccctcccttggccagagtattcctctcttgctcttgcctctgttcatttcaccattatcct

SEQ ID NO: 16160 - DNA, 1645 bp, Homo sapiens
tcgtgccagtgcactccagcctgggcgacagagcaagactctgcctcaaaaaaaaaaaaaaaaaaagtgatattattattattattaaataatattaaacaattattgtttaattatttaaacttgatattatttaatctttaattatttaagcttttaaataataataacatttagaaattgttatgccaggcaccaaaccagacattctgtcttcttaaattttcaccatagccctatgaagcagttagttggaatgggagcatctgcagtgatttgcccatggccattccagccgtaagtgatgtagtcatggtgggaaagcaggactgctgtttctactacagtgtcttgttctttattcatttgttttctttgcaaagtcagatcctttatttgcttccttttttgccatttacagccttcaatttgacccagcgcctcgtcgtggtgagcctcatgttacacggcgcaccccagactacttcctataaatttctcctgggaaacctgcctttgtatgtggaagtatacctggctttttaaaatatatgtatttaaaaacaaaaagcaacagtaatctatgtgtttctgtaacaaattgggatctgtcttggcattaaaccacatcatggaccaaatgtgccatactaatgatgagcatttagcacaatttgagactgaaatttagtacactatgttctaggtcagtctaacagtttgcctgctgtatttatagtaaccattttcctttggactgttcaagcaaaaaaggtaactaactgcttcatctccttttgcgcttatttggaaattttagttatagtgtttaactggcatggattaatagagttggagttttatttttaagaaaaattcacaagctaacttccactaatccattatcctttattttattgaaatgtataattaacttaactgaagaaaaggttcttcttgggagtatgttgtcataacatttaaagagatttcccttcatttaaactaaattactgttttatgttgatctgcatatttctgtatatttgtcatgacagtgcttgcatcctatttggtgtactcagcaaataaacttttcattttaaacaaaaacattcatttattgtgttgtgcattaaatgaaaactttattttttctagaccaggtcttgctctgtcatctgggctggagtgcagtggcacagtcatagctcacttcaaccttgaactcctgagcccaagccattctcctccctcagcctcctgagtagctgggactacactcaacataccaccacacccagctaatttgtaaaatattttgtagagacgggatcttgttatgttgcccaggctggtcttgaactcctggcctcaagtggccctgccaaattcttgagattatagatgtgtgccatcacacctggcctgctatcttgaaacgacataaaatctttcaaagcagggcaatgggacatggctatagtcccagctactcaggaggctgaggtggaggatggcttgaacccaagagcttgagggcagcctgggcaacatagcaagatgtcatctctaaaaaataaaaaataggctgggcatggtggctcatgcctgtaatcccattgctttgggaggctgagaaaag

SEQ ID NO: 16161 - DNA, 1112 bp, Homo sapiens
ggagggagaaaaaaaagaaagaaagaaatttaatggtaggtaccaaggatggggataccattgaccagagaaaaggaagggagggagggaggggaaaaaaaaaaaaagaaatttaatggtgggtccccaaggatggggataccattgaccagagaaggggtaaagaagaaaaaatgatggacaaaatatgtttaaatgttggcactatttggactgacacttttaaccattatttactctttgttaactgtttggagttagtaaaacaaatacattctcttttgttaattcatacatagatattctgcctccatggtggcctctctccatccatagacacactggatcatataagagccctggatcgtttacaggaagttccacatgaggtaaacttaatttaaaaaagaagaagaaaggaaaagaaaatataaccacattttgaggatgataaagtatgactgataataatttgtaacatgtacttatttttcttggccagggcccaatgtgtgatctgttatggtcagatccagatgatcgtggtggatggggtatttcaccacgtggtgctggctacacatttggacaagacatttctgaaacctttaaccatgccaatggtctcacactggtttctcgtgcccaccagcttgtaatggaggtatgtactttcctgacagaatgatctttatttcagattagtatatacttctgtaataaggcattatgacttaactaagaaacattcctcaccatttattacctaggtgaaaagaggaaaaacttgctggttttagcaagtagggaaagcactagtagaccagagcagaattataactcatttttgaaattgagacttagaaaaaagttacaaaaatagtaccccataattccctgtatgcttcattcagattcctgactgtaaatattttactatatttgctttatcattttgtgtctctcttcctcttcacccctcacactttcttctgaaccatttgaatatctgttgcagacagatactcctttactaccaactttctatgtgtattttgtaaaattaaggacacactgtcacataaccaccgtatagttatcacagttgggaa

SEQ ID NO: 16162 - DNA, 1174 bp, Homo sapiens
agctatctagtataaaatgctatgcattatttttcccttatcaatttatcctttaaatatgattatctacatactgtcatagtgctcaaaatatatttcattgatgcagatttagagaaatacaatgatactattttaaacaataattctgtcttcctcattccaaatctgccttgatgtcctagggtgaaaataactattctgtttcatttcatgtgccattgtgttcaagtggtaatgactacctgagtcctaggttggagatgattgtgaagctccattcaggcccatggtaaaagactgcgatgatttctgtatgttgatggggcagttagatgaggaaagcaaggagtagctatatacatgtcacatgttagcccttcctgccccaggcttttgtattcatcatcactaattttatttcactctcattgcatattcagtatattcacaaattctttttctcctcatatgtttggattgacaaaaatccatcagtgttctcagctatgatgactatctcaccaatgtcttagccaaccaaatgagatttactaacacctctgtgtcagtaaatccacagttgtaataattttcactgtagagacattgcaatgaagacaattaatagataaattcagttaatcatgagtaccaaaaatttgtcctgaaagttttccataactggtcattaattatgaaatattttctaattcaattaaatataaaaagaatgtgtaattttaaattataataatttacatatacgttaaaatcattttccaagttcttttttctattatacctcattttaccctgatgaaactcctgatttagattagttcaatatcactgtccccacttaacagatgaagaaaaccaaagcccagcaggtgaaatggtttgctgtaatcacttagctgcctaataaaaataccagggttttaacaagcccactgctcattgaagccttttatattaataataacatagaaatttaaagaggtaaacttgaaatcaaaatttggcaaaattaagcatatatgtttatagctcatttaaagagtttttttgaaatgcattctaggtattttgttgctttcatcacatctttaggctcaattctgcactcagtaaactcttggttttggccctggcagaaggcctagcaact

SEQ ID NO: 16163 - DNA, 1803 bp, Homo sapiens
aaaaaaaaaaaaaaaaaaaattaaaattcagctggatgtggtggcggttgcctgtagtcccagctactcaggaagctgaggtgggaggattgttgactacagcagtttgaggctgcagtgagccatgactatgccactgcactcctgcttgggcaacagagcaagaccccgtctcaaaaaaaaaaaaaaaaaaaaattaaagaaagggacaatttctgaacacagacatagacaaatcaatgccctagtctgttctagattgaggggacaaggaagggagtttggagaaatctagtgttttccctcttcctttatcttttctctccccgtaataggatatggataaactggatgccagcagtgatgaagatcaggatggtaaatcctccagtgaggaggaggaagaaaaggcccttagtgcgaaacacaaaggcaaaatgcccttgagaggaccactgcagagaaaacgagcctatgtggaaatagaatacgagcaggagacagagcccgtggccaaagccaaaaccacgtgatttccctttcagcatttatacccaggactgaacatgcagaactgttttttttttttttttatcttaaacacatacacacctccagtttttgctcttttgtgttgtactgaacacaatatttgtgtttttattatttatgccacgtcagtggggcaagaaatctggagtgagtgaagaaagctaagttgtgaacaagagtgtttttatagcatatgtgttgaagtaacagcttgtgcccgagaaacttaacagatgagttcttgaatctgggatgagatgacggatgtaaatatttctaaattttaaatgctacattacttggtgtccttttttctcccaaactttatttagaaatggaaggagttcaattttttcttgttctactttccctattcttatggaggtaaaaggaaaggaaggaaggaaaaagcagctttcacttacaaagtttcgtgtaaaaatatctttttttcttaaataactccattcatacaaattgggatgggaagaaaatcctttcctcttgggaaagtaatacaagtcttaagttccattgtagggtgcgccttcagaaacctgctgcacttttctgatatagttcaccacttttctgtcttcacagctttggggaattttggccaggagaccctgaaacatgaaaccaaacaggctttgatatttttttttttttaattactttccccttttgcttgattcttcttccttggtatcatattcaaaggaggaaagaatggatgacacttagggacaggtcactaagcagaataggtattagttggttttttattatttttaaatttatatagctctcatgtattgaaggtgctactttaaaaactgtgttaatgtacttgcaaatctcctgctggctcatgaaacagcagaattccagccaaggcaaattcagttggatctagggcttgaaaactgcccaagattaaagagctaagatgaaatagtttgaataaactggtaaaataacaattcatactatctctacatatttttaggatatgaatttttttttcctgctgggtagattgtccagtgacttatggcatgaatttcttttcatgctaccttcaatcttcaactaaagatttctaaaaggggtaagaaatgaggcagtagtttattaaatacatagaagtacacagctattatatgctgtggctttgagaagttaacttttgtggaatatgaaaccaaaggaagaatttccatgtagataaattaagaatagggaaaa

SEQ ID NO: 16164 - DNA, 1077 bp, Homo sapiens
cttgatctcctgacctcgtgatccgcccgcctcggcctcccaaagtgctgggatttacaggtgtgagccacagtgccaggctttttttttttttttaaattgagatggagtctcgcactgtcacccaggctggagtgcagtgacgtgacctcagctcactgcaacctccgccacccgggttcaaatgattcttgtgcctcagcctcctgagtagtagggactacagatgcacaacatcatgcccggctaatttttttgtatttttagtagagatggggttttggcatgtcagccaggctggtctcgaactcctgacctcaggtgatctgcctccctcagcctcccaaagtgctgggattacaggcgtgagccaccatgcccagcccaaagtaatatacaattgactcagatgaataaaaaacactgtcttatctgtggagactcaggaatgtggaggcctgcttggtgctgagatatttttaacttggcaacgcttttagttatcatcctcactttccaaggcaggaaaatgtctctcaattactactactcacacaatgcaaccttctactcaaattcagagaatccagacccagttatgaagaaatcatactattacctgaatgaggtggtgctctggtgtgtacaggtggttggaaatggcatggtataggacctgggctctgttatactggagcaaatcagcagctggctgcaaccagacaaatcgtcaaattaaaagaatagtttcccaagattggcacatgttgactatctttgaaattggattatgggtatgaagcatgaagaacatgccatcccaaaatatgcatgattgtttcgagttgaaaatattgcagaaactgtagattcagaaagggtgagctgacttgtctctttctgcatgcagcaagtgataaaagattcctctgggtggggtatgctttccataccagggtaagaaaacagcccttacagagacttggaattgaaggctgcaatggacctacataaactgaacaaagtaacctttatcttccacctatccatccccccaccacctacaaccatgtatct

SEQ ID NO: 16165 - DNA, 4015 bp, Homo sapiens
tctaatatggttcaacataagtcttccatactttttttttttttaacagctgaagctaacccctgaatatctgcagctgatgaagtacaaggccattgcttccaacagcaagatttactttggcaaagacattcctaacatgttcatggactctgcgggcagtgtgagcaagcagtttgaggggctagctgacaagctaagctttggcttagaagatgaacccttggagacggccactaaggagaattgaaaaaaacttgatatgactgcaaatgatacttaagcagatctttattttttaagatgaatcagaatgttcctccctccccgactaccttctctgactgtcttccagttactgtggtgaaaaagaagaaatgaacttaaatccactccctttctagggaaaggagggtggggactgatgatggggggttttatttcaggtaagcagtttatatgacttccaataagatttgtaaatcatgggcttgacctttgacctctagacactaattttatcctttgaggctggcttaattagggatgctgtcattaaggagagggagaaatgtagagtgttacctccaactcatttgatttcccttacttgggaaaatgcagtccagtgttctcacctctgcctccaaggtaggagatgtctgtgggtgaggctcagcaactgagcaaatatgtgcctgtgagtttgccagtagagctgtgaagaaacagctgcagagaacatttgaccttcctggcattcttgtctgcatgtgtgtgagttattttagaggtgtgctttcttgagccctcataaggaagtactggtgctaggttttgcaagattttgtatacactttgctccttgccctagggctcagagtggtggtttctgactacatttctagagtcagagcttgatcaccacaactcaattatttcggcatcttttcacctatgctgtgatttgttttttttttttcttctcaaaaattctgttcattggttccactcagcatcaagaagacagggacaaacaactcaagtgtcttaacagctgctggagtgggatccttgttatctcttagccactgcaggacctgcctgacaggttatgtgtgcacctcgagatgaagtgtctttctattattgtagagattctgtagtgaagaggtctgacaccatgtgtggaggaggaggaacgatcagtcaagagatgtcctggtcttaatgcctgtggcttgtgctgggagtgggtctgacttagtgataaaaggactctattcactaagtagcctgtgtttttaaatccagggctgcaggcagcaacgcaagtcaggctgaacattcagtctccagagacagctgtgtggagcaaatcagagttcatgcccaagtccccaggttggaatggctgtgccaaaatccattcaaagggttttctttttcattactaggtcagaacattttgagtcaccttgggagattcaggatggggagagcaaatttgaacaaaaggtttttcttatatcctgagattgaggggtagggggtgtccaacctgtatagcccatgggttgtgtctagaattaagtggagggcagctatctggagttaacttgcaagcatattggtgccctccatgaccacctctggcttaggacttggccctgttatgagctgacccccaccccccaccccccaccccccccccccgccaactcctatacccatcttccctaggtgaatctgtgaatggtcctttctggcagcaatccctgccttctttttgggcccatgcccagacttctggtttaaggaatggtcccagagcttgggccagcttgctcagaagttttgggagcattgagcctgcctagaaagatacagtgttagctccccttacttcaaagttgcccttctctgttctgactcctgggacttctggtcctgggcacactttttgcaggcaacaaaatgtgcctgggagtgatggattttaatgtgctccagagtcctttcagaaggtggtcatttcccttggccgggcgcggtggctcacacctgtaatcccagcactttgggaggccaaggcaggcggatcacctgaggttaggagttcgagaccaccctggccaacatgcgaaaccccatctctacgaaaaatagaaatattagccgggcatggtgtcaggcacctgtaatcccagctacttgggaggctgaggcaggagaattgcttgaactcgggaggcagaggttgcagtgagccaagatcatgccatcccactctagcttgggcaatagagcaaggctccgtctcaagaaaagaaggtcatttcccaagactagcatagggagtatccatttaaaatacattcatcttcctcccatttccgtgctattaatcacttgttagagcaacatgacatgcccagcatcccacttcccgaaaatgtctactccttctactctgagctcttgttgcctagacctcagaaaacaccaattcaccacagtagaaccgggagcagggatagctcagcttctctgaatagcacactttgctcaggtcttaacttgagggcctctccggtactaacatcctgcgatagcttgtcccatgagcacagaagagcctcagtagagtcaagtcctgctgcagctgccccaccccaagtttctatcatttcctctttaaacaaaaaatatgttatcctacacattagtgtcaatccaatggttgtctcttatctgtctaaatagcaaaatcatgaaaatcagctgttttatttgcataggacaactaacctgtctgtgtaactttgtttttattttaactcttactagaaaatctaatcttaaaacatttgaattctaaacatgtaaaatgtgacagcctgcaattttgtagacagtgaagtaatggctgctatttataaatggaacatctatcaaaataagtaactgtttataaaattcagtttttgtagggttttccaaggaaaaatcaccttggttgaatgtttctcactcattaaactttgcagaagtgattcatattcagtactgtttttaatcactttttaaaatataaggaccgaatgcaaggaaaccaaagtttattaataatttttatataactaaaataaaatagatgtggagggatctgtgatcatataaaaagggagggttactgaaagaattttagcaatatattgattcaggaaaaggagctgttttataaatgatcattcactgttcctatggttctatgtatctttcaaaccgatacctttactatttaaagagcgtaaatagtgaaagtaagatggtcatacttactgactttatctatttaagtttgatggagataaactatatcttggctagtggctactgtgtctgtgaatgtaaccagtacttctttaagctctattcagtagggttccagccactgcttttttgttgtttctagccactgttttttttttcttgtttccttataaaacaggtaataaccaatcattttgtgtttgtatttccattcctttttatttctgcctttgtgtagactgatgattaagtaggcaaactacttctactttcaaagagccccaagggcttaatgaccccatttgtaactgagaaatgattcttgttttagtaatcattctataaatgatactgctggattgattgccgtgggttgatagctggaggaattgttttggacaatactaacatgtgaatttatgtcttagttttatttgcagtcttgctaagtaaaatgagtctttgtatctacttttttattaaagtgaaatttagcaatagttaatattaggtgacataaataaaacatcccagactagtgagttaagtacaagatctctctaaaaataaacagatgaaaatctatccccattatcgatacagaatttgtgaacgtggcataattcttggtaggtgctatagagatttatcattttaaacagttcacacaccactgcaa

SEQ ID NO: 16166 - DNA, 1707 bp, Homo sapiens
caagtgcgcagcagacgtgaaggccccgctggaggtggcacaggagcactgagccagggaatactgagagcactaactatgcactaacctagattttcatttcgatattccctgtgtcccagcgcagtcctgctctcctgtgacctgtggagagcactaatgatcacgtgtgttgatggaaaccatctgtgcttagtctctgacataggaagcttgcttcaggcaatggctttggattgagtttgagaaattcaaacatttctgcagaacagataccaaatcaatagctaggaatcatgttcaatattgaattctgcccaggagcatgaactgatccatgaatgccttttccaggttaaaatttggtcactgatgcctataatcgtggaagtcagagggattcccctttttcatctcattttaataggaaaattccttatggttaacatctccctacaaactcctactacgtcgtctaaattgctgctctggaataaggtgatttctgcccccagattcttccctagccggtagatacgtgaagatattcccaactgtggaatggcagtgtaggtagcttcaggaaatggctcaggttaattctcaaaacacaaattgttgctggccaggcatggtgactcatgcctgtaatcccagcaatttgggagacagaggcggaaggatcacctgagcctaggagttcaagaccagcctcagcaacagcaggagccccaccccccgtctctacaaaaaaatttaaaaattaactgggcatggtggctgaggtggaagaatggaagaatcacttgagcccaggagtttgaggctgcagtgagctatgattgcaccactgtactcctgccttaaaaaaaaaaaaaaaatcccaatagtccatgaaggctttgatctcttgggaagttcttcatagatgctgtcacatttcttaaagcaaccttttaatatgcagataataccccccaacttttttagagacagcctgtctcttaaaaaaaaaattaatttggtagtgagagcttgtgtcactgccactctgttttatccctgaaattaaaggataacataaggaggacttgggcctttctgacatcatcctgaagagacaggactttgcgtttttcctctgggacctacagtgatgagaatttaatgattatctcctccactataatcctctttagggtgattttttaaatcaaaacccagtgaatctcattactcctaagaaacgaaagattccttcaaagccttttcaggcacatggtttcaacaaagcctggctttgacattccttgtcctgaggagcactttccaggcatagttacagcttccccactgtatttacaagccagaattgtgcaactcttctggatcattaataaagtagcaagatcctcaaaaaacccaaaaacaccattctctaatagtcatgacaaatggcttcagtatggcttgttttttattttccagatggctttttctcttattttttgaagccccagtctttgattttacaggtaactttcaaaacatcatgatgctgccaaatgtacttttgtaaacttaaacattatgattcctgtattatttcagtgagagctacagtgtgatatttcagagtctattaaataaaaatgtgagtttgaattacaccatctgtgccaattacaaagcaattaaaagatttat

SEQ ID NO: 16167 - DNA, 1257 bp, Homo sapiens
cagctgttgtctccagacagggcagctccctgaacctctttgaagatgtgcagatcacagaaccagaagctgagccagagtccaagtctgaaccgagacctccaatttcctctccgagggctccccagaccagagctgtcaagccccggtgagttttggctcttctcgtgcagggcatttctgccttgccattggtggttttcaggcttacgttagaccagctcttgtgggtcccatgatatcatagtacccatatatgccaaaggtttgctggtctaaattatttttttaaccagtccctactgccagcctggcctgccctgtataaattgcagtgatgtttcccagctcagagctactgcccagcaggcatggtctgtcctttcagtcagcttatcagatctcagtggaacgcagtggtttgtagcagattgtgggtgttgcaagttgggaatactgagtttgggttgtagtgtatgcagaacctgtgttttcgaagttcttatctcacatttccctttgagccagatgttatcctgcctccttgccttttggcattggtttctggtatgagagaccctcggtcctctctcaagtgacagtgacggttctttgtgtccactctgccccttgttgtaagagccggcataagccttggggactggccttggggacttctgcttttctgtgtgatcacattcatactgacaatatttctgcggtctggggagtgagatttttttttttagagattctgcttactttgacatgcacacacacacacacacacatatacacacacatacacactgttcctcttaaacttatctgtgcctgttgctttgtgttacatctttaaccactttaaaccttttaggtgcattttgtcctgtaataatcaaatgctcgggccttgtgttaatcaccacaagaaaccagaggctattgctttaccgggatcttttcatttctattgcaacagacttttgtgtgacggatctgcttggttataaaagtgtctgttgtgtatgttaagtgttagtgttcctttttttttttgagacagtctccctctatcgcccaggctggagtgcagtggcacgatctcaactcactgcaacctccacctcccaggttcaagcagttctcctgcctcagcctcccgagtagctgggactacaggtgcacaccaccacacccggctaatttttgcatttttcagtagagatgaggtttcaccatgttggctgggctggt

SEQ ID NO: 16168 - DNA, 1190 bp, Homo sapiens
gcagaccccttccattggatcattccatgtgaaggggagttggggccgtttggaggtagcagagttctgggtggcagccaggcccccaaataagcctcactactctggcttttttttttttttttttatgaaaaggagtctcgctctgttacccaggctggtgtacagtggtgcaatcggctcactgcaacctctgcctcccaggttcaagtgattctcctgccccagcctcctgagtagctgggattacaggctaccaccaccacgctggctaatttttgtatttttagtagagacggggtttcaccatgttagccaggctggtctcgaactcctgacctcaggtgatccacccatgttggtctcccaaagtgctgggattatgggcatgagccaccgcacccagcctcctctgggtttttcaggagaatctgctgcctctactgcagccacgcctttaaaaagtggaaaaaccggcaggcaagaggctgcagatggcttgaccaacctccctgttcccttctaggtaccaggatcatctatgaccggaaattcctgatggagtgtcggaactcacctgtgaccaaaacacccccaagggatctgcccaccattccgggggtcaccagcccttccagtgatgagccccccatggaagccagccagagccacctgcgcaatagcccagaagataagcgggcgggcggtgagtgtcggggcttggccaggctctaccttgggaaagggaatgtatgaggctcctggagtccatccactgggggcaattccagggaggaggaacaacagggactctgccctaccctctaaggagcagctcagagcccagagggtgagagtaggggtggggaggttgaactcttcattggtagcaactttccccctgaaaggggcccaggcacctcaggaaaggtgatctggcacctttgggtcatgtaattagcggggagtttgtttgaaatggcagcggctgcacacagcaactttcgtaagcatgtgcctctgtataattgtctctgaagcatttccacttggaacacacccatgatgtttgtggtgcaagagacaagttatcaaagacacagtgtacttgtcctttgggaaattatatgtctacaagataagaaatacatccgggatgcctcctgttgggctgttggtcccctagtgga

SEQ ID NO: 16169 - DNA, 1491 bp, Homo sapiens
gaagccaagctgaggccggcgtcatgcttgtacagcctgcagaaccgcgagccagttaaacctcttttcttggctgggcacggtggctcgcacctgtaatcccagcactttgggaggctgaggagggtggatcatctgagatcaggagttcgagaccagcctggccaacatggcaaaaccccgggtctactaaaaatacaaaaattagctgggtgtggtggtgggtgcctataatcccagctactcttttgggaggcttaggtaggagaatcgcttgaacccaggaggcggaggttgcagtgagccgaaattgggccactgcactccagcctcggagacagagtgagactccatctcaaaaaaaaaaaacaaaaaaacaaaaaaaaacttattttctttataaattacccaacctcaggtatttctttatagcaatgaaagaatggcctcatataccaagcattcacccattgttgacctggccctctgtcccctctctccccaggtgaagagtcacagtttgagatggacatttaaagcaccagccatcgtgtggagcactaccaaggggcccctcagggccttcctgggaggagtcccaccagccaggccttatgaaagtgatcatactgggcaggcgttggcgtggggtcggacaccccagccctttctccctcactcagggcacctgccccctcctcttcgtgaacaccagcagatacctccttgtgcctccactgatgcaggagctgccaccccaaggggagtgacccctgccagcacaccctgcagccaagggccaggaagtggacaagaacgaacccttccttccgaatgatcagcagttccagcccctcgctgctgggggcgcaaccaccccttccttaggttgatgtgcttgggaaagctccctccccctccttccccaagagaggaaataaaagccaccttcgccctagggccaagagttgggccccgtctgagcttttttcaactctgtttggtaactaacaccagctgctatctgtacagtgctgctgctttttttttttttttttttttgagacggagtttcactcttgtggcccaggctggagtgcaatggcgcaatctcagctgattgcaacctccacctcctgggttcaagcaattctcctgcctcagcctcccgagtagctgggattacaggtgcccgccaccatgcccagctagtatttttttgtatttttgtagagacagggtttcaccatgttggccaggctggtctcgaactcttgacctcaggtgatccacccgccttggcctcccaaagtgctgggattacaggtgtaagccaccgtgcccagccttgtacagtgcttctaaagcgtgggcctgtccttatttgattctgactctgatcctgtgggtaagtagaacaactgttatcctcactttacagctgagaagactggcacaagaacaggtaaaatcgtgcagctgctgaatggc

SEQ ID NO: 16170 - DNA, 1141 bp, Homo sapiens
tttttttttttttgttgcgacggagccttgctctgtcgcccaggctggaatgcagtggcgcgatctcggctcactgcaacctcctccccccgggttccagcgattctcctgcctcagcctcccgagtatctgggattacaggcatctgccaacacacctggcttcttttttttgtctttttagtagagacggggtttcaccatgttggccaggctggtctcgaactcctaacctcagttgattctcccgcctcagcctcccagagtgttgggattacaggcgtgagccaccgcgcccggccttgtttttacatttttaagcgaatcaaaaatacattcaggccaggcacggtggctcatgcctgtaatcccagcactttgggaggctgagacctcaggatcacttgagaccagcctgggcaacatagggagacccccgtctcttaaaaaaataaaataaagtaaaatacattcaagtcaactgatttgagtctcgaactgctctgacacaggaaggtgctggggatacatcagaggtgatggatactcaggcgggctccgtggatgaagagaatggccgacagttgggtgaggtagagctgcaatgtgggatttgtacaaaatggttcacggctgacacatttggcatagatacctcgtgagtacttttcatagtttttgtgagaattgctcggtaaaataaatctgaacatgctcaacagttactttgtgggcaaaataaatgcaaagtatttcctatgtctcctaacccctattcagcaagtaggatgttgaatcaggagttgttttaattcccttagcatgttatctgcttactgagggcacagctctggtagatacaatggtgggtattgcccctccttttgagttgacaacctggtttggagacaaaaaaaaatgcaattacaaagtgttatataaacaaatttagaacaatataaaccttgtgttggtgttttggatttttcagaaaggatatatgtggataaagcctgttgtccaaaatttgagatgacccatgctctttatgcctgaaccatcctttttttcctttctcattgctgctgactcactcctttaggtatattgtctactctcctcagcaaacctatttccaatca

SEQ ID NO: 16171 - DNA, 1196 bp, Homo sapiens
ataagccaggtgcggtggctcatgcctgtaattccaacactttgggagaccaaggcgggcagatcacgaggtcaggagttcgagaccagcctgaccaacatggtgaaaccctgtctctactaaaaatacaaaaatgagctgggcgtggtggcacgcgcctgtaatcccagctactcgggaggctgaggcaggaaaattgcttgaacccgggaggtggaggttgcagtgagccgagattgcaccactgccctccagcctgggcgacagagcgggactccatctcaaaaaaaaaaagataatcacatgtaataaaaactaagtaacctaacaactttctcttttttgttgctttctcattccttgccagtatcttatgctgagatttttaaactcctcaactaatatttcaaacacctgacctgatatttgtgatttttaaattgttttattggactaatgtttttgtggcaattgtccccaagaacctcaaataagttgcaggccttcttttaatctctgtcaccgcagctccccagttaaagatctcagatgaccggctgactgtggttggagagaagggctactctatggtgagggcctctcatggagtacggaaaggtgcctggtattttgaaatcactgtggatgagatgccaccagataccgctgccagactgggttggtcccagcccctaggtaagctggggccttaatatggacatcacagcagatagagaggatagaccatctggccaagggctaaggcttcaaggctgttgggtttaccagattgtgggcatagaattcagttcctgagggttgagctggtttgctattcccgggatatttttgtaattctttgcttgtgagaaagtttttaagcaattttacaaaattgaccaaaaaacataaaaagaaataggatctttttccttcagcaaactagatttgacttgcaatcttctgacttcctgtgtatgtttttattgggacaggaaaccttcaagctcctttaggttatgataaatttagctattcttggcggagcaaaaagggaaccaagttccaccagtccattggcaaacactactcttctggctatggacagggagacgtcctgggattttatattaatcttcctgaagacacagagacagccaagtcattgccagacacatacaaagataaggtgagtt

SEQ ID NO: 16172 - DNA, 1727 bp, Homo sapiens
taaagtagctgcctgtggggatatttaacgttttatctgtaggtgtctgcttagcaacaaaaggaaaggcagtttcttgcatgactcagctttcagcttaattttttccttttgacagagcaaattgggatcctgaatttttatttttctttgacaacagaaatcaacacagatctcttttagttacctaattcttgatggacatcaggatgttgaccacttttagtaatatttaatatatatcttatttgttccatttatcccccgagtattgtagccacatttaaagtgaaaatttcctgtgtcaaattaacttttccaatattttttgtccattttttccatgtctgcttgaattgaattcgctccaggtttccattaactttggaccatgcttcaagtatcctccgaaggatctcacttaccgccctgtgagtaacattacaaatggctgcatgtgtcctcagcatctccgtggctgctgtagtcaccgtgttctgtttctcattcctcctgcagatgagtgacatgggctggggcgccgtggtagagcacaccctggctgacgtcttgtatcacgtggagacagaagtggatgggaggcgcagtcccccatgggaaccctgaccaggtccctcttttctgtcaaggactttctgggaataatactgggggttttgtttttgtttttgaactgtctcaaatgttctcccaaagatgctaaaaacacagcctctccttttagcaagttaaaaggctgggtaggactgcgggagactgcctgcctttcaccattttctccccacttccagtgactgctcttattttgtgtaccataagccaacaaccgctgactccaggattgcataagccccctgtgaaatcggtgctgtactgcataccctgccagctgtgacttgttatcctactatattttctaaggagtgaataatattgtccgagtaactaacttatttaaaagacatttccttctgtgggcattgactgtatcccacctgttttccaaggaaatggtaacctgtttctgagaacacctgaaatcaatggctatacattccaaaccaatctaaacgctatttccttttggtgtgggtttggttttgttcattttgaaatacacttttgaacactgagatccgtaaaactactagatctctggaagtgtaattgtgaaagaaacttgcttgcagctttaacaaaatgagaaacttcccaaataaaacttgttttgaagtttatgtgacactttgcttcccttcagattgggtgcctcttggtgacagtgttcagaaatgtaagcagcacgaggaagggagctggcactgggaggaagagccgggtttctgagttgtgttttggctgctttcctattgctcccattcttgccaatcagccaccccctttcctgtgaaaatctgccaccttgaggagaggaacaagagtttaaaagggctaatgatctccctcccggtcttcccttggaacatggatgttgatatatgtgcgggtggtttcctgtcttgcttatcttcctttgccctgagctgatggctaaagggcagttttcggactattaaagactgaaatgtaagaatgagccttctaggctgggcgcggtggctcacgcctgtaatcccaacactttgggaggccgaggcaggtggatcacgaggtcaggggttcgagaccagcctgaccaacatggt

SEQ ID NO: 16173 - DNA, 1176 bp, Homo sapiens
ttatttattataaaacaggagctgggcacagtggtgcctacccacaatgccagctactctgaaggctgaggtgggagaattgctggagggcaattcgaaaccagtctgggcaagatagtgagacctcatctcaaaaaaaaaaaaagaaggaaaaaacaaaggagttgatgaaaccaaattatgacaaactaaattaaaaaattaaaaaatagcattagtgggaacactgtggtatttcctgaggtattaaaattttacaactagtaaaggtatttattataatttattcggattgtttcttagtttatttttgacatggataaaattattgtttatctaggagcctcagagttgagagaggatagttgtagagaagtatttctaaaatggaattatcatccactaccagctaagagaaaatagttacttgtttaaagataccttaaagcaacatatattgtagtttcaagagaacaggctgacagtcaagaaataggcttttaacaaacccactggtttgctggattctaattgcctccttcaaactatgtaattgtgtctttctggtttctgtggagatattttcccacttgtttaattttacactggaataaaacaagttatcactgttgatctgattacagaaactattttatataggacgctgtgaagagtagatattctctgagcccttcaaatgaactgtattaaaacacacacacacttttgaagtttgagaagaacatcattacctgtaacctttgatttgtgaaaatatatacaaaaagctaattttataatttagatggagagtgtgtatacaacttatatgtggtaatttatattacaaagagttaacattcagcttcctctaaataacaccaccctcattttcttggagtacctcaaactccgatgatctagaagctttataaccaggtctgcccttgaagactagttcacgcattaataggtgtctagggctgagcctcagcctccaatcacactcgacctgtataggctttcctgttcagagatatgcagtggccaaatcaaagtgtctgggtgattcatcgggagacaaatatattaatcaatgctactatgttaaaataccaatattgtcttgaagtgtgggaactctcttaaacaggaaaatgataagatattcagaag

SEQ ID NO: 16174 - DNA, 1229 bp, Homo sapiens
gtgattttataagataatatggtgataattttattctaggattttatttttggcctaatataggaatgtttaaaaaaggcttttctatgaaaattagaaatttatacttgaaattaaaagtctagaagggggaggaccttaaagctaagctaccagtaagacaatgaataattcagaagagaacactattcttttactgactgagtgcccaagatgccaatttccatgaagtcttgatttatatatatgtacacatgttatgcacatacatgtttgttttctaacagttattttttaagcttttgagataattttagacttacagaagagttgtaaaagtagtagagttcttgtatactctgcacccaccttgcccttatgttaacatcttacgtaacaatagaacatttgtcaaaattaagaaattaaccttgatataatactaactaaagtagaaagtttaaaaagtagagattttagtcttttcactaatgtccttttactgttccaagacccagccttgcatttagctatcatgcctacgtcctgtcttccagtctgtgacagtgtatcataacaggggatacctgatgttgtaatgtatttctggtgttgttaaccttgatcactatgctaaggtggtgtctgctaggattcgctactgtaaacttactgtgttttccttgtaattattgaatatttgctggagatacccggagactatgcaaatgtcccgtttctgcttaaacttttgctcattttactatccattggcagatcttgcttgtggcagttactactgtggtgttctaatggtgattttctatttctctcaatccttctacatttattattggaattcttctgtaaggaagagttgtcagttctggatttatatttttaactataataagatattcaggataagtatagatttagaacttaaagatgttaaatcatgttaaaattattccaaataccaatatcaaagaaaactaagttggtaatctatctcagaaaatatatgaacttaagaaggaaaatagtatttatgatttgtagaattggttcaacttttgacttaatactgactttggactgaattcaaagttttcttgaaatttcacatctggactttttaaagtgtctacatttatattactttggggatcattttgtcaaagtcttgaataaagttacccagtcctggcatgataaacacaactatg

SEQ ID NO: 16175 - DNA, 1204 bp, Homo sapiens
aaaggaaaatgaagggtaattactgtcaccatggagattgtagaggtaaggttggggtataggtcaggcctggcctttctttgtcatctgcttatagtctagtgctaagtatgccactaagtttcagatatatggaatactttatttttttaaaggtatataaactctgagttattgagaattaagtattcactgtatattaaggggaagcttttgccaagttgtggtcttcaaatttatgtttactcttcctattggcagaataggtgctatttaagagtaaaccaaaggataagcagagggagtccctataaccaaagatggacagcatagccctggatagccagataaaccactctttgtattaagaaatgtttctttcctagtggtgaggggtgggtaactgtgaaagagctttatatcttgtctattcatggtattatagctgtatattcccaggatgataagcttgattgaaatcctgtatttagtcatatattatttgcgctgcttcatttgtatcatgtgcaatctctagaccaaccctatttttaaactctggtacagcatcattttgtacatattcccagctgcagaactagtatcacttatctcagcaaaagagattgtttgcatggaaagattaatagcactgattagatttctaatattttgcatttttgaaatgtttgttttctacgtgattatatttaaaactttagtaaatactaacatgaaaccatattgactagtggcctacttttacctggactcacccgtctcaaagtcaagaaaatcagtacagtcacgattttctctgtctttatgtattactaaaacaaaaaaataggttttgggcaaagaactaatatgtaagttctttcctgttgactggtattttaattgtcataggcagaatttaagttcagaatttaaagcatggcaattataagagactttcctttggtatttataaatattagccagtactatagataacagcagttgaatcacttagggcggatggggaattcaatgttttgctttactaaagttccagccccttaatgtactttaaatatttaaaaaagcacacatttaccattttatttgaatatcaggtttactgaaggaaaaagatacattgaaaatataggaacatacacataaaagacaatgtcatatttaaagtataatcacaata

SEQ ID NO: 16176 - DNA, 1192 bp, Homo sapiens
gagccgggcatggtggcacatacctgtagtcccagtttctcaggaggcagaggttgcagtgagccaagatcacatcactgcactccagcctgggtgacagagcgagactccatctcaaaaaaaaaaggtaaccatagttctgaagtctttggccatgaatgttctttaatggtctaaaaagcggttttagtcatgctggtgccaaggagttctcctcacacctccatagcgtcaatgttgacctatttgatatatttttaagttgcagattatagatgcagaaagagaaaattgtcctttatgtgtgcatgagtatacatgcactgtgcctgtgatacaccaatgaaatattccaaaagacattgctcactcatagtctgaagttggtatttgttaacttttaaatctatatgtggtcagagtgtaagtggctggtttttattcttgtccaacaatgaaataacttaaagcagcatgggctaatggtggtattttttttaaccacatgttaatttgttgaaggaagaagtgaacataagatttttgataatcagcctaaagcttcagaaactggatcagtaagagctaaagatgaaatcctgggaaactttctcaggcactgtgcaggggagggaggggctggaccgccactgctgcgagggaagaatcagaagagctgcctgtggctggctgagaagggcaaggtggatggctcttcattcctggaaggctgaagcagccagaggcagtgattcacctctttaatgtctaatcagggagagatacaggagtgaggtgggttttattttcatttttgttttaacaagttcccactcttatcttaattctcaaaaatgatctggcctcatctatagaactggctgagttggggaatcatttaaaatttgggattttctgtacaagtcaagaacatatgtgaaagctaaaaaagtaatggaggcagggggactgctcccagctcccttctgccatttacacaaaatatttgaaaacatgtctgtaaataacgttgtggaactgagatattgagtatctaatcatgtaaaggaccctcagatgggacaggctattggacaactttcctggttcatgaagtggaatttcctttttgagtagtttcttgcatggtgtattccaataggtcaaacccagacctactgtttgcaaacag

SEQ ID NO: 16177 - DNA, 1183 bp, Homo sapiens
taaagaccctctttgacttgtgcaaacttttgctaattatcacagtcttctgtaaaacagagcttctgttggaagcatcaaatgggagccatagttattgtgctgtgaaaattaggtctttgataagtcctctcatacctagtagcaacatgtcttatgtgaaatcctgttcttgttctaccaggttatcccgccaccaaatgagaatataggtgtttactccctttatttcagagaacccacaaacaagcgtattttctcttgttttcagttatgaaatttccatctagtgaaagtagaaatacccaggataaataagtgaaaattcacatgaggctttgatatttttgtcaactaaatgacaaaagagatggttattaatctcagcttattcatcaggaaagacaacctttctcggagtagcaccacgaggcagtagcgtggatgttttagatgttcctgttcacattgccagatgacttacctgctgcctctctctcgcttgcgattttgttttctaggctaacaaagtaataggaaaggtgcagatccaggttgctgacctgtcagagattccccgctgtaactgcaagccagctgatgaaaacccttgtggcttggaatcggagtgcctgaacagaatgttgcagtatgaatgccacccgcaggtgtgcccagctggagatcgttgtcagaaccagtgctttacaaagagactataccctgatgcagagatcatcaaaacggagcggagaggctggggcctcaggaccaaaaggagcattaagaaggtagcatgggatggtggtggggggtggaagagaccagaacctggcttttcaggaatgcttcagtagggtatagttctagggataaaatcagcaggaatttgtggtaaaatgttaaaactttccatgttgagagtttggtacttcttgagcaaagaagagtagtaggaagaagatagtgataaaatgtgcttaaactttgagtgtccagtggctagtcataaaaaggagagaggggacactggtaatttctatgtgaaatggtttttacttgttttttttattgttttatttttattttcttttaaagacagggtccccattctgttacccatgctggaatacagtggcgtgttcatagctcactcaagccttgaactcctgggctcaagaga

SEQ ID NO: 16178 - DNA, 1224 bp, Homo sapiens
actagtttgctttgctgaccaaatgcctggtaccagaggatggtgaggcgaaggccaggttgggggcagtgttgtggccctggggcccagccccaaactgggggctctgtatatagctatgaagaaaacacaaagtgtataaatctgagtatatatttacatgtctttttaaaagggtcgttaccagagatttacccatcgggtaagatgctcctggtggctgggaggcatcagttgctatatattaaaaacaaaaaagaaaaaaaaggaaaatgtttttaaaaaggtcatatattttttgctacttttgctgttttatttttttaaattatgttctaaacctattttcagtttaggtccctcaataaaaattgctgctgcttcatttatctatgggctgtatgaaaagggtgggaatgtccactggaaagaagggacacccacgggccctggggctaggtctgtcccgagggcaccgcatgctcccggcgcaggttccttgtaacctcttcttcctaggtcctgcacccagacctcacgacgcacctcctgcctctccgctgcttttggaaagtcagaaaaagaagatgtctgcttcgagggcaggaaccccatccatgcagtagaggcgctgggcagagagtcaaggcccagcagccatcgaccatggatggtttcctccaaggaaaccggtggggttgggctggggagggggcacctacctaggaatagccacggggtagagctacagtgattaagaggaaagcaagggcgcggttgctcacgcctgtaatcccagcactttgggacaccgaggtgggcagatcacttcaggtcaggagtttgagaccagcctggccaacttagtgaaaccccatctctactaaaaatgcaaaaattatccaggcatggtggcacacgcctgtaatcccagctccacaggaggctgaggcagaatcccttgaagctgggaggcggaggttgcagtgagccgagattgcgccattgcactccagcctgggcaacagagaaaacaaaaaggaaaacaaatgatgaaggtctgcagaaactgaaacccagacatgtgtctgccccctctatgtgggcatggttttgccagtgcttctaagtgcaggagaacatgtcacctgaggctagttttgcattcaggtccctggcttcgtttcttgttggtatgcctccccagatcgtccttcctgtatc

SEQ ID NO: 16179 - DNA, 1183 bp, Homo sapiens
aataaattagccaagtatggtggcgtgtgcctgtagtcccagctagtctgaaggctgaggcaggaggattgcctgagcttaggtcgaggctgcagtgagctatgtttatgccactgcaccccagcctgggttgacagaatggtaccccatctcttaaaaaagagagagaaggggttaggcattcccttgcatactcgcatctgctggctgtgtatgcacatgtgcgtgtgtgtatgcgtgtgcatgtgtgtgtctgcagcccccgccatccctcctgtgttcaccttctggctatctttacctgaaaccaaacagcccctgcccgccggccccatttctccatgccgctcaccgcccgcatgctcggatgggccagtggctgccagcatctggtgaagggtcgtaaccagccatcgtcttctcaggtctgccggagttcttccctcagggtctcaccctcttcctctaacaggttttgctgcctggtggttttcgtttgttccttgttgcaaagaagatgtcagggagcatttcttcctctagtcccccttctttctgtctccttcccttgctctgcgtctcttagaggtctcatgtcctgtgcttgtccattttgcttccgttgtctcttctagactgctggagttaataccaccgacaaagagatggaggtgcttcacttaagaaatgtctcctttgaggacgcaggggagtatacgtgcttggcgggtaactctatcggactctcccatcactctgcatggttgaccgttctggaaggtacacactgtaacttctcctctcgatgtcctgccctcgccacgggcacggggggagcatgcatttccaggcttggggagacacagaggcaggagagctggaagaatgggctcctgcctgcctggtgccacatcctgccccagctttgagggctgaatcctctcagctcagagaagagcttccctagttttgcaggcgcacggaggcctcccacccgtacacctgcctctgctctccccctggccattgcaatgcatgcccgggatctgggtttaccctgcagcccgactcctccagggcaggctccttccgtccttgggtccagcagcctcccccctccgctgggtactgagcatctgaaaagtctcagatagggccctacacctcttctcccttctcaagt

SEQ ID NO: 16180 - DNA, 2442 bp, Homo sapiens
atccctgtttctcactaagcaatttttagctttccgtttttatatgtctccggtgtattttctttactgcatttccaattatgtactcatacctgtgccatccattcatcaagagcaggagtttttatcacagggtctgttagcccctagaacggtgctccctgggagattcagactccagcatccctagatatgctaatggattgagtgagacccagatacttatgtttttgacaagtaccccagataattcctctgataacaagaaaattggggaactaagagattcatggacaagtttcagagggctggtgactgtcctcaccctttactcaatttaagcatgattttatgagtacattttttgaggtgtgtagcctttttttctttaaagcatctctgatgtagaaaagttaaaaatcactgaattaggatgtctagggtagggtagatccagacttgggactagttaactctatttgcctttatttcagaatacaaagtggcctgcataattatgtcatttgtctttcagaaccaagaaattgaagaactgacaaaaatctgtgatgagctgattgcaaagctgggaaagactgactgagacactccccctgttagctcaacagatctgcatttggctgcttctcttgtgaccacaattatcttgccttatccaggaataattgcccctttgcagagaaaaaaaaaaacttaaaaaaagcacatgcctactgctgcctgtcccgctttgctgccaatgcaacagccctggaagaaaccctagagggttgcatagtctagaaaggagtgtgacctgacagtgctggagcctcctagtttccccctatgaaggttcccttaggctgctgagtttgggtttgtgatttatctttagtttgttttaaagtcatctttactttcccaaatgtgttaaatttgtaactcctctttggggtcttctccaccacctgtctgatttttttgtgatctgtttaatcttttaattttttagtatcagtggttttatttaaggagacagtttggcctattgttacttccaatttataatcaagaaggggctctggatccccttttaaattacacacactctcacacacatacatgtatgtttatagatgctgctgctcttttccctgaagcatagtcaagtaagaactgctctacagaaggacatatttccttggatgtgagaccctattttgaaatagagtcctgactcagaacaccaacttaagaatttgggggattaaagatgtgaagaccacagtcttgggttttcatatctggagaagactatttgccatgacgttttgttgccctggtatttggacactcctcagctttaatgggtgtggcccctttagggttagtcctcagactaatgatagtgtctgctttctgcatgaacggcaatatgggactccctccaagctagggtttggcaagtctgccctagagtcatttactctcctctgcctccatttgttaatacagaatcaacatttagtcttcattatctttttttttttttttgagacagagtttcgatctattttaagtatgtgaagaaaatctacttgtaaaaggctcagatcttaattaaaaggtaattgtagcacattaccaattataaggtgaagaaatgtttttttcccaagtgtgatgcattgttcttcagatgttgaaaagaaagcaaaaaataccttctaacttaagacagaatttttaacaaaatgagcagtaaaagtcacatgaaccactccaaaaatcagtgcattttgcatatttttaaacaaagacagcttgttgaatactgagaagaggagtgcaaggagaaggtctgtactaacaaagccaaattcctcaagctcttactggactcagttcagagtggtgggccattaaccccaacatggaatttttccatataaatctcaatgaattccctttcatttgaataggcaaacccaaatccatgcaagtgttttaaagcactgtcctgtcttaatcttacatgctgaaagtcttcatggtgatatgcactatattcagtatacgtatgttttcctacttctcttgtaaaactgttgcatgatccaacttcagcaatgaattgtgcctagtggagaacctctatagatcttaaaaaatgaattattctttagcagtgtattactcacatgggtgcaatctttagccccagggaggtcaataatgtcttttaaagccagaagtcacattttaccaatatgcatttatcataattggtgcttaggctgtatattcaagcctgttgtcttaacattttgtataaaaaagaacaacagaaattatctgtcatttgagaagtggcttgacaatcatttgagctttgaaagcagtcactgtggtgtaatatgaatgctgtcctagtggtca

SEQ ID NO: 16181 - DNA, 1699 bp, Homo sapiens
caactgaacaattccccccgtggctgcccagatagtcacagtcaaggttggagagtctccttccagccagtgacctacccaaaccttttgttctgtaaaactgctctggaaataccgggaagcccagttttctcacgtggtttctagcttcttcagactcagcccaaattaggaagtgcagaagcacatgatggtgaaaaacctaggatttggcagccttccagaatggtatggaatctgagggaagatttatgtttcgttttggaggatagctcaagttgaattttctttccagccagttaccctttcaacctacccatactttgtacaactcttacacaaatacttagatatttattagatagccctgaattcactctaattataaacagggagtgtaaactgcccccagatgttcctgggctgggtaaaagcagctggagtgaagcactcattttccataaaggtaacaaagggcagctcagtggttactcaagctcaaaagggtttttttaagagcaagcattggttaagtctgtgtatactgagttggaagtgatttcagcacattcttttttagtggagtgaaagttctgaagcccccttttaacttcctcttggtttttcattataattggtagccatctcatgaactgtctctgactgttgtctctttgtggtcatgtgattgtgagcttgctttctgacttgcatttctgactttatcctgttgttaggaagatagaaactaggttttgaaagattacatgattcaagcgagggattttaaagtaaagatgtatttattctgaagaatctaaaagataacagattatttgcttatgaaagaacaatatagtctgggaatcccagaatgtcaagccaaaggtctaagaagtcatctccttcaaatactttaataaagaagtatttcgaggagatatctgtccaaaaaggtttgactggcctccagattccagttatttttaaaaagcaacttaccactaaatccttgagtctccatagagtaacagtaaagaaactgatgtaacagactctcctctcaaaggatctcctctggaagagactatcagcggcagcattctccagggaagacccatcccctagtgccagagcttgcatcctggagactaaagattgcacttttttgtagttttttgtccaaatgcaatcccatttctgtgcctcttagcatgcagttagatttggacaaacaagattcctaaggaatgactttattaactataatatggttacagctattatataaatatatattctggttatagttctaatatggagatgttgtgtgcaatgctggcctgtggtggtctgtgtaatgctttaacttgtatggaggaggccaggctcagagctgagatgtggcctgaaccttccctgtatcgatcctttaatttagaactgtcaagatgtcactttctccccctctgccttttagtggtatctgacatatactcaaaacagtaatttcctggtcacatcattaactgctaattctgtatttataaagaattttcagatggacatgtacaaatttgaactcaaaccatccccagtccagatacagggcagcgtgtaggtgaccacaccagagcctcagcctcggtccttctcagccgtcgggataggatccaggcatttcttttaaatctcagag

SEQ ID NO: 16182 - DNA, 1348 bp, Homo sapiens
ccagagattcctcagataaaagagcctagaaaattgagttttgagcgggcatggtggctcacgcctgtaatgccagtagtttgggaggctgaggcgggtggatcacctgaggtcaggagttcgagatcagcctggccaacatggtgaaaccccgcctctactaaaaaatatgcaaaattagccgggcgtggtggtgcaggcctgtaatcccagctactcagaggctgaggcaggagattcacttgaacccaggaggtggaggttgcagtgagccaagatcgcgccattgcactccagtcagggcaacaagagtgaaactccgtctcaaaatataaaagaaaattgagtgtcccacccaaattttagggcgtacctccttccatttgataagaagatgctatttccagtgtccctgggagaattcttccatccagtttatatggtgaattgccaccagcgttccctaaaggaagagagaacttagcttatttctgtctgtgacttttatcagctagatcagttaattgtatttttaaattaaaaattagtaactagaggaagagactaagagaactatttttacctgagtaaatgctctcctcttcttgtgtccaaatctaatgcagaggtgaaaacacttgatgagaaaatcctttgtggcttgaggggaatcatgtttctttcaggacgtgttgtttccctgaagtctatgtcacactgagaactttttctgactgcactgctttggagctattcatttaaattgagtttggcctagttttcctggtataaaacaggaaatctacattgttccctctttctctcccttccatcccttcccctgcctttcctatacacgctggtgtgcttttgccctcagaaattcttggtttgggagttatgtatttttgagtgatcgaggttatgacatacttggagcggcatgatttcaagaagccattccaaattcttatagctccttagctctggttttactctcgtattttccccaagaaaattttttggctattcaaagaaagcacaaaatatgtgatgtggaactcatgaaaatagggacttttgatatctctttaaatattccctgactcacggaaaagatgtcctcttttggtgtatacattgtgaaaatctacccatttatctctctctctctcttttcttttaaataaattatctgataaggccggcaaggtggctcacgcctgtaatcccagcactttgggaggccgaggcgagcggatcacgaggtcaggagatcgagaccgcggtgaaaccccgtctctactaaaaatacgaaaaaaaaattagccgggcgcagtggcaggcg

SEQ ID NO: 16183 - DNA, 1311 bp, Homo sapiens
tgcagtgattctcaaattaactgtattggtgtaagagttttgtcattaagtgtttaagtgttattctgaattttctaccttagttatcattaatgtagttcctcattgaacatgtgataatctaatacctgtgaaaactgactaatcagctgccaataatatctaatatttttcatcatgcacgaattaataatcatcatactctagaatcttgtctgtcactcactacatgaataagcaaatattgtcttcaaaagaatgcacaagaaccacaattaagatgtcatattattttgaaagtacaaaatatactaaaagagtgtgtgtgtattcacgcagttactcgcttccatttttatgacctttcaactataggtaataactcttagagaaattaatttaatattagaatttctattatgaatcatgtgaaagcatgacattcgttcacaatagcactattttaaataaattataagctttaaggtacgaagtatttaatagatctaatcaaatatgttgattcatggctataataaagcaggagcaattataaaatcttcaatcaattgaacttttacaaaaccacttgagaatttcatgagcactttaaaatctgaactttcaaagcttgctattaaatcatttagaatgtttacatttactaaggtgtgctgggtcatgtaaaatattagacactaatattttcatagaaattaggctggagaaagaaggaagaaatggttttcttaaatacctacaaaaaagttactgtggtatctatgagttatcatcttagctgtgttaaaaatgaatttttactatggcagatatggtatggatcgtaaaattttaagcactaaaaattttttcataacctttcataataaagtttaataataggtttattaactgaatttcattagttttttaaaagtgtttttggtttgtgtatatatacatatacaaatacaacatttacaataaataaaatacttgaaattctcttttgtgtctcctagtagcttcctactcaactatttataatctcattaattaaaaagttataattttagataaaaattctagtcaaatttttacagatattatctcactaattttcagacttttgccaaagtgtgcacaatggctttttgttaataaagaacagattagttttgaagaaggcaaaaatttcagttttctgaagacagcatgttattttaacaatcaagtatacatattaaaaattgtgagcaatctcaaatgaaggtccatcgtttcattttaaatctctaaatgaattcatat

SEQ ID NO: 16184 - DNA, 3490 bp, Homo sapiens
cagtagtggacattgtaatccagtcggcttgttcttgcagcattcccgctcccttccctccatagccacgctccaaaccccagggtagccatggccgggtaaagcaagggccatttagattaggaaggtttttaagatccgcaatgtggagcagcagccactgcacaggaggaggtgacaaaccatttccaacagcaacacagccactaaaacacaaaaagggggattgggcggaaagtgagagccagcagcaaaaactacattttgcaacttgttggtgtggatctattggctgatctatgcctttcaactagaaaattctaatgattggcaagtcacgttgttttcaggtccagagtagtttctttctgtctgctttaaatggaaacagactcataccacacttacaattaaggtcaagcccagaaagtgataagtgcagggaggaaaagtgcaagtccattatgtaatagtgacagcaaagggaccaggggagaggcattgccttctctgcccacagtctttccgtgtgattgtctttgaatctgaatcagccagtctcagatgccccaaagtttcggttcctatgagcccggggcatgatctgatccccaagacatgtggaggggcagcctgtgcctgcctttgtgtcagaaaaaggaaaccacagtgagcctgagagagacggcgattttcgggctgagaaggcagtagttttcaaaacacatagttaaaaaagaaacaaatgaaaaaaattttagaacagtccagcaaattgctagtcagggtgaattgtgaaattgggtgaagagcttaggattctaatctcatgttttttccttttcacatttttaaaagaacaatgacaaacacccacttatttttcaaggttttaaaacagtctacattgagcatttgaaaggtgtgctagaacaaggtctcctgatccgtccgaggctgcttcccagaggagcagctctccccaggcatttgccaagggaggcggatttccctggtagtgtagctgtgtggctttccttcctgaagagtccgtggttgccctagaacctaacaccccctagcaaaactcacagagctttccgtttttttctttcctgtaaagaaacatttcctttgaacttgattgcctatggatcaaagaaattcagaacagcctgcctgtccccccgcactttttacatatatttgtttcatttctgcagatggaaagttgacatgggtggggtgtccccatccagcgagagagtttcaaaagcaaaacatctctgcagtttttcccaagtaccctgagatacttcccaaagcccttatgtttaatcagcgatgtatataagccagttcacttagacaactttacccttcttgtccaatgtacaggaagtagttctaaaaaaaatgcatattaatttcttcccccaaagccggattcttaattctctgcaacactttgaggacatttatgattgtccctctgggccaatgcttatacccagtgaggatgctgcagtgaggctgtaaagtggccccctgcggccctagcctgacccggaggaaaggatggtagattctgttaactcttgaagactccagtatgaaaatcagcatgcccgcctagttacctaccggagagttatcctgataaattaacctctcacagttagtgatcctgtccttttaacaccttttttgtggggttctctctgacctttcatcgtaaagtgctggggaccttaagtgatttgcctgtaattttggatgattaaaaaatgtgtatatatattagctaattagaaatattctacttctctgttgtcaaactgaaattcagagcaagttcctgagtgcgtggatctgggtcttagttctggttgattcactcaagagttcagtgctcatacgtatctgctcattttgacaaagtgcctcatgcaaccgggccctctctctgcggcagagtccttagtggaggggtttacctggaacattagtagttaccacagaatacggaagagcaggtgactgtgctgtgcagctctctaaatgggaattctcaggtaggaagcaacagcttcagaaagagctcaaaataaattggaaatgtgaatcgcagctgtgggttttaccaccgtctgtctcagagtcccaggaccttgagtgtcattagttactttattgaaggttttagacccatagcagctttgtctctgtcacatcagcaatttcagaaccaaaagggaggctctctgtaggcacagagctgcactatcacgagcctttgtttttctccacaaagtatctaacaaaaccaatgtgcagactgattggcctggtcattggtctccgagagaggaggtttgcctgtgatttcctaattatcgctagggccaaggtgggatttgtaaagctttacaataatcattctggatagagtcctgggaggtccttggcagaactcagttaaatctttgaagaatatttgtagttatcttagaagatagcatgggaggtgaggattccaaaaacattttatttttaaaatatcctgtgtaacacttggctcttggtacctgtgggttagcatcaagttctccccagggtagaattcaatcagagctccagtttgcatttggatgtgtaaattacagtaatcccatttcccaaacctaaaatctgtttttctcatcagactctgagtaactggttgctgtgtcataacttcatagatgcaggaggctcaggtgatctgtttgaggagagcaccctaggcagcctgcagggaataacatactggccgttctgacctgttgccagcagatacacaggacatggatgaaattcccgtttcctctagtttcttcctgtagtactcctcttttagatcctaagtctcttacaaaagctttgaatactgtgaaaatgttttacattccatttcatttgtgttgtttttttaactgcattttaccagatgttttgatgttatcgcttatgttaatagtaattcccgtacgtgttcattttattttcatgctttttcagccatgtatcaatattcacttgactaaaatcactcaattaatcaatgatactgtgagctgtgacttttttttcccactcagtcatacacttctcaccctttccggtgaaccacatgtatctttctcctcttgagtttcttcagtgatgctttctggtcccagttcaacagcttgcaaatggtaactgggtgtgggtgggctgaaggagaacttgggaggcaccacaggctacccgtggcccccaccctcccatttaccatctgctcctataaataacttccagaagtgtttctcctggttgtgtgtgtttcagatcagagagaaggttaaatgcttgctctacaagaatgtagctttcggccctgcctgaatttcttttccatgtttctcatggaaacattctctttcccctccggctcaactcaatgtta

SEQ ID NO: 16185 - DNA, 2231 bp, Homo sapiens
atacatgattattccatcacaactagtgataataaaaacagctaatgtttgttggcacatctgtgccagcactattctaaatgcttaattttaatcatcacaacaaccctatgaggtagatattgttatccctgtttttcagatgaggaagccgaggcagagagaacttaagttgctggcccaaggacaaacagctagtagacagcagtcaaggcagcgtggctccatggtgatgtgcttggtcagagatctgaatatataggacttagatttgtagactattgagctgtagactcatttagacaaatggtaccaagatattttagtagataaaattctaggttagtagaacatagaccacatgttataagctgatatcagttgatggaagaaaaatggttttacaagttattttcaggatctctatcaaacctttacttctccctctaattacagatcccacttccagccgggcccctcatgtatccactggccgaccgcagagtgtccctacctcctctccagagcatcattcctttctatctgctgccagagccacggtgccatttactccaaggactcactttctaaaattccacacctggagtgacctctagtcgctcagcatccactttgtgtctccaaattgtgtaggactctgtaatcttttgattagtttctgagaaaacacaatgaagcacttcacttttttttattcaaagccatttaataaaacacagttggtcagcccagtgcaaagcttgttatctgccaccagtacataccattggttctcttcattccttgggccagcttctcaggtggctttagacctcaacaagccgtatcttcaccagtgttctatcttgttcccctaaattaataaaatgtttttctccaggattttggtgagggttggctgtggctgtcgttttgcacctcccagatttcaaagaattactggttttaccatgactcaaatcttaagatctgtttctactattcagttcctcaaactgaagcttattgaaaaaaaaatgtataatgttatttgttttattatagcaattatgcctaattaaagcagtatttaatgcaatttccagttatttctttggagaattttatgtcattgttccattaccttgaatgttggaaagatatgatacgtgctgcttgttcatcacaaaaatcagtaagcacaataaagtggatgccaaaccatcagacacataaatgttcccgctgtgtccctggatatggaataagcaggtataaaaaatattttaattatagttttgttataaatataacttatgagaaaaaaatttgataggaataatactgtatattactaatttttaactatccctaaggcaaaccttatgacccacagaattttctcatatacagtattcagtgcacagaaatcttatgattggctcaagtacagtaagttacttctcagtaaaactctcaagtctgagtccatatttgtagctctgcttttggctgtacgttcctaggatcggggctgcttatgcctttcgtttatccttggggtttgagagcgctgtatttgggagagagtttaaaaatacattaggagagagaaaccattaaaagtttcactgtcagatatattgtaggtgctaatactggatttcgtctcagatttaatttcttttatgggtctgttagtcattcaacaaatcccataagtatgtgttaatattttaattgtgtaaaactcatttgttactttacagcctgtaatagtgtgtctgcattttcaacctgttgcaataactttgctgaaatattaacacattaataaaacttttcttaaacaagttgtctctgtgtcatatttggtgggatttggtagtaaatgatggtaaagtggtaaatgataggacactaaatttgtcagataatactagaattgtagtagtgtaccgtacaatgtagcttagtgttttaaaataaacatcttacatttctatgtcacacctctcaatttcttacctgctttatcttacaacagcaggtatattataagtaaaaattaaggagtagtcgttgacaaagcctgctctcttccccggacagcatgagcttcaccactccctccaccttctccaccaactaccagtccctgggctctgtccagccgcccagctatggcacctggccggtcagcagcgcagccagcatctatgcaggcactg

SEQ ID NO: 16186 - DNA, 1201 bp, Homo sapiens
gtaatcccagctactcaggaggccggggcaggagaatcgcttgaacctgggagcaggaggttgcagtgagccgaggtcgtgccattgcactccagcctgggtgacagtgagactttgtctcaaaaaaaaaaacaaaaaacaaaaaaaaaacaaactaggcataaactcatgaggtcaggagatcaagaccatcctggctactaaaccccatctctactaaacccatctctactaaaaatacaaaaaattagccaggcatggtggcgggcccatctactcaggaggctgaggcaggagaatggtgtgaacccgggaggtggagcttgcagtgagccaagatcgtgccattgcactctagcctgggcgacagagcgagactccatttccaaaaaaaacacactaggcgtaaacaagaatgaagacctggaaccgtagagaaaatactagaaacccctcgtatcacgttgtgcctgaggacaataataaagtagtttactaggcatcagacattcctcagcagtgctgtgggtcacgggcgtgaagcggagctcgaggcaggattgcttgtgttgctgcatgtcctgtctgctgttttagcccgtgtcagtagatggggccattgtactgtttgttctgcacacttggcggagcagcagaggctctcagcacgccttttccctttgtagtattttctgagctaaggaaagtcaggcagaagtagttcataagaaggcatcactgcctgtgatcggggctgcatttagccctgacctgataatggtaggagagttcatttagcctttctgctgcgaagattgtaaatagattaaagaaaacagctgtggccttctcccgtcatacatcattagactgtgtaaactaacattttagaacctctaatattggacttaaaaccaatttctgtcgtgcttaattgaaaatcacaactaaaccaataaaccattattaaatttccattctgcagcagaaggcacctctggacggctcccggcttgtagtttaatgaagtatgtgctccctgctgttaacccgcagccctccccaactctccagcagctttgccaagtcagcctccgggccatctggctgtccttggccaaggcactgttaacggagtgacgttaaccatcttgtattgtgacctgtggccgcttttctggtttaagtccttcactttttc

SEQ ID NO: 16187 - DNA, 1643 bp, Homo sapiens
tatatacatgtattttatattcagaaagtttgaccaccgatcatatcatttgggttgaaaactgtgaaacctctatgtttccctcccacattcatgtctgccacctgttgggtctgcctggtctctttgaccttgatgacttgagaagcagtcattgaccacactgacagttttaggcttaccctaaaacagtccgcctggcccccagcatattgacatttttcctcttgatttgtgtgactgacaatgtttctgtttccctcccccagctttggcagcatgtaagcagctgtttgccaagaacccaggtcactgctaagaaagggtgccttcgggagaagagtgtccagaggataccaatgccagatgcatctggagttacactcagcactcgcagtatgagacattgtgtgccagcatctctttccttctggcaaagactgtagctctccaggtaggaggatcctggaagctgtgagcaccaggagccttgccagaggaggatggggccagatatgaactctctaccatgaacatggttctcggcttatgaaggaattttaagtaaaacagttatttaatttccacatattcaagtcaaaagccttctgtgtgaagtgccagtgattacccctccacaggagttatcaggatttttctggcaccaagtttaattcttcttcgtacttctggtagtgacagatctgcaggacagatttatctgttgaatgctcttgggcaggaaaaccatgtaaaacctctggaagcagcatcaggacagcagagcagagcccccgtcctcactgctcacttgcacagaaactccatctggactcggatgcttttactgaagacccatctagcttcaatcatctttagagtccatccattctggagagacctggcgtttgcagttgcctcctgtggccgtgtttttctgtcattctgttcccaggccttctattcaggcggttgaagggtgtggactttggaatggggtttgctgttcttcgggaacttgcttcctttccctggctggtgctgtcaggaaggaccatctgaaggctgcaatttgttcttagggaggcaggtgctggcctggcctggatcttccaccatgttcctgttgctgccttttgatagcctgattgtcaaccttctgggcatctccctgactgtcctcttcaccctccttctcgttttcatcatagtgccagccatttttggagtctcctttggtatccgcaaactctacatgaaaagtctgttaaaaatctttgcggtaagttatgctgttacaaaaggttgcttcacagaggagggtagaagtgcatttagcaaaaagttattcttacaggcctattatctctttattagatagggagaaagttgggagaatgggaagtggctttttgagtaagaagaataactaaacgtctacttttgaaaggtacttgtgtgtttgatttatgccgagccgagggacctataccatgactccacatgttgcctgtttatttcaaagagaatggggcttagaattaaagaaaagcactgccaatctctgtctcttcttgcataactgatgccatagctcgaagctgctgcaggcatattccctcactgagaagcatgggagagcc

SEQ ID NO: 16188 - DNA, 1622 bp, Homo sapiens
tcctttgtgaggtgaagatgaatgttagagtagaaagaattgtaaactccttggtaggtttaagcagttatcaagtaccttgaatgtgagtagtaaattctcacccaagggcaagggtagaccttttgagatagaaagggtggatattgggatcccggagccccaaatcccctgaggttgtcttggtgagagtgccacggggtaccctgtttctggcaggtttttcttggtgtttgggcagcatggtgcatctcccatggtgtgagcgtggctgggagccctcttggctgttactacatccagcctttgtctctccagggatgggggcctgaagagggagaaggtgaaggacacgttcaaggaggagcagcagaagctgtacagcaagatgatcgtggggaaccacaaggacaggagccgctcctgagcctgcctccagctggctggggccaccgtgcggggtgccaacgggctcagagctggagttgccgccgccgcccccactgctgtgtcctttccagactccagggctccccgggctgctctggatcccaggactccggctttcgccgagccgcagcgggatccctgtgcacccggcgcagcctacccttggtggtctaaacggatgctgctgggtgttgcgacccaggacgagatgccttgtttcttttacaataagtcgttggaggaatgccattaaagtgaactccccacctttgcacgctgtgcgggctgagtggttggggagatgtggccatggtcttgtgctagagatggcggtacaagagtctgttatgcaagcccgtgtgccagggatgtgctgggggcggccacccgctctccaggaaaggcacagctgaggcactgtggctggcttcggcctcaacatcgcccccagccttggagctctgcagacatgataggaaggaaactgtcatctgcaggggctttcagcaaaatgaagggttagatttttatgctgctgctgatggggttactaaagggaggggaagaggccaggtgggccgctgactgggccatggggagaacgtgtgttcgtactccaggctaaccctgaactccccatgtgatgcgcgctttgttgaatgtgtgtctcggtttccccatctgtaatatgagtcggggggaatggtggtgattcctacctcacagggctgttgtggggattaaagtgctgcgggtgagtgaaggacacatcacgttcagtgtttcaagtacaggcccacaaaacggggcacggcaggcctgagctcagagctgctgcactgggctttggatttgttcttgtgagtaaataaaactggctggtgaatgaactgggggacttctccctttactttctcccctggctgtggccctgagtagcaggcttctcgtgaggattcccgttctcttctgggagcatggccctggggctgcggagaagccaactgactgctggagcgaggaaccctgcagctcagaaggtgaacagctcgtctcagatgcttgcagatctttggttaatttagaatttccagcacagacgtggatttctccagagacggggtgtgtgcgggtcgctgatgtgaggcctaggggaagcaatgagtaaactc

SEQ ID NO: 16189 - DNA, 2609 bp, Homo sapiens
aaccagaccctttcctccaaacccaacctttcatttcctacttcattccagcaggaggcacttaggggagactcggatggggacatggagaacaacccaagctccttaaacttattattattgttaatattattattattattattaataaagtgaggcaggaaaatgcttctccttttaaaatcccctccactcctcacacacacacacctcttgaaacccttccccaagaatgtttctttatagacggacttcattgaaatctttgttgttcttgaatcaagtgtaatataatttttttcttcttttttaaaatattcccactcagcactcagagacacaaaaatactgtaagtctcaattaacagcagaatctcagagaaaagctgtttgcaatccaaatccagcctttggaggaatagagatggtcaattaacaatcaaaaagaggagattaacctcttgtttttttaccacctggtgaatcagccataacgcacacacacgccacccagcctcttgtttctagtatgtactttgaaatgctaactgagggtcttgatgcttgagcctttgactgataaaactcaaatagcagtccccagtgatttgcctcttaggttctttcttaaattgttggtggatgactgtacattttagtgatttgaaaaataactgacaaaccattgaaacagtttattttatgttggaagagatggcgcagatgtgtgtcagaagggagatcacggtgtgagtttcgtagctatttaagtgatacatacctctagtttttgtatgtcttttgagatcctgagttcatcccctgtgaatcagagtgcacaagcacctctcctgtgagtggctaatgagaagagggacagaccgaccaccagcacagtagggcagatctggacagcagaatgttataacgcaagttcatgtgttgctcccaactccattctcttttctctcgtgcaaccagtttgcccattctcttcctattacttgctccagggataggtaaaaaaaaaaaaaaaaaaaaaaaaaatatatatatatatatatacacacacacacacacacacacacacacatatatatatatatatattccatcattagaagatggaaactattataccacttggtatgtgcagtcaaatatccaaaagggggaagtactgcttagagaaatatctgtaagcattaaattctctcctttatttgtacattttatatagataaatttttaaagtactaattaggcattaacttttttcaaatgcacaggtttgttggtttttttaatacactttaattgactttctcaagcgtgctaggtagaaacgcagaattccacatcttcccgctctcagctctgagcatgtgcaaggctgtgtaggacccagtttctctgtatatactattccagttcccagtcatctatgtagaaagtgcactgtgctgccatcgccctacatcttcagctgtgtcattgcttcctggttggggtggggacggggtgggtcgggagggaggtatattgggaggagggtgggtcaaggcagaaggagaagctgttgaaatgagggccgtgaaatcagtttctgttggtttgcggttgtgtttggttttgtttgtttctttataaaaaattcaatcgggcagctcccttttccacaagcctctttgtgactgtagaactattgtagaaaaaaaaagttcttttctatattataaaagaaattatccaacacagtaatattggtacctgtcattttttcacttctgtttaaaaaaaatgtatttttagcaagataacttgggtaatcttctaaaaaagaaatttaaaaactcactgttagtgactttgatgccttttaaaataagagctttttcatttcattccatctttaaaattttttatctttgttgtagaatattaaaaactattttaagaaagataaattctctttaaagagatctctagcgtgtgtgaatagagctccagatgcctctaaaagccgcatgtacaaaggaagccacgtctatcctgtctgtttatatttgcttttcctgttttgtaacctctttgtactttgttcatggtgacttgtaagctaaggggaaggggtgcctagatgcctttgtatctctccatgtcacgcgctcctgggccagccggcctcccttcctctccttgtatgtaatacctttttttcccctttctagcaagtactttcaaaagaactctgtacattttaacataaaaaataaattatgttgagccattttggatgtctgtcttgcatgtggaatttttctcccttcccagtatgtcagaactcttcaattcttgttctacacccagagacctataaacattagtcttttcattttcctctttattataggagtacaagtccatggcctttgctttgaaattccagttttcatttatgtctgtgtttaaatgccaacaatatggatgggttttccatttccaaggaacatggcacggtaaccctactttggattttgtaggggcattcatataaaaacctcctaaagggattttaattcccgtcccccccactcccctaaaaaaaa

SEQ ID NO: 16190 - DNA, 1129 bp, Homo sapiens
ggtgcaagaaggatgaccaaagagagttaaacgggttgctgagccctgctgaggctcggggagacagtgtaaatgcttattgacagtaatcgggctaatcctatgtttctttccagcatttgattaaactcagcattgtctgtgtgtgtattggcaccaaggaaataaacagctagatcttggaagtctagttcatgcttatttttgttggcagtgcactgaaattctgatgatggtgctatttctccatgaggcttattcatttagcatcatgcacctgccttggtaccagaactatagggcaaacaaaaagacacagactctgccttcatgaagcttttagtttcacaaacagacagataataaacactcataaaaataaaactgtacttacaaactgatagtcggaaggaaatgagaatgcagtgaggggttctgacgggctgggctaccttgctgagggttggggttggagtgtttatgagaagggaagacttttgaagaagtaacaatttatacatagttccaaaagagtattcaaaagtcagcagagtaaagagctagagaagaacatttcagagacaagtggattgcctatgtaaacgtctaagggtgtgaaagaggttgataaacttaaggaactgaagttcagtgtaactcaaatacagtgaacagaagagttgcataaggtgaagctggggaaatagactgaggccagaagttagaattggggtttttatcataattgcagtgggaagacattgaatggtttttagcaaggaaacagcaagatctgtttcattaaaaaatggtttttcttggctactacataaagagtggtttagaattaagcaagagtggaagctgggaaaccactttgcaggcttttccggtgatcaggatgagagaagatgttagctaggactagaggggtggtggtagaaatgggagagaagtggatggatttagatatattttggagttggaatcagcagaacttagtgatgagttttatgtgtagcttgaggaagcaagagatgatcaaagatgacttccaggttctctgacttaatttaataaagaaagtggtttgaagccacttgggaaagttcatgttgactagataaga

SEQ ID NO: 16191 - DNA, 1976 bp, Homo sapiens
attggtagagtgtagcctttgtggctcacctgtttttactttgcaatgtctgctcccacaggtgggctcggtggtggccgtgggctggatccgctcccgcaaggctgtggactggcgcctctttcggaacatcttcgtggcctggttcgtgaccgtccctgtggctgggctgttcagcgctgctgtcatggctcttctcatgtatgggatccttccatatgtgtgatttgtcttcttccagctgcaaacagctaaagggatggtctggtgttggcgtgtgggagacatgtgtgctcgtgccgcacatacacatcctggccgtgcacggctctctcatgaccagctctctgcctcccttccaggaggctccatcccacactgttcacccaggctgcggagactcaccttcccgagctaacttaactactgtacataataatatgtattaaactggtatcgtggtgatataatgtggtgcagttacttatatattaaatatctattgtatccatagaataggcagcattatttcaaacatattcaagttgggagtggagatcattgcctagaagtcaatattcaataaatcttgtacataactatttcgatggcaaatgttaagccttctaaaaggaaagtgtagattggaaaatgattttttttccaaatgatgtttttgccttctaatatactgtaaggtaatgagcttcagaacaggcaacctgaccctgcagaggtcgcgtgctgtgggatgacagcgggacgggagctcacaagtgctttcactgaagatttgttcatatactgtgtattgattgttgtgtaatatatcatcattgcttttgtaaatacgtaaaactgtaattttttaatggtgtgcttcccttatacttttttgatcagagaattttggaaagtaccaaagaagcaggggaatcattggccagtgttacgttttcacattgtctgtctcccaccctcactgatcacgcctgccccagagcagtgtgtggcggtgacaccgtcacccagcatgcgccacgccgtggctcccaccagcagtgccaccgccaccacaccccagatcccacccaccttgcagtggcctttccttgtcatcagagtagagaatgcacaggtgttggtgagggcgtgtggctgagcactacatgtcaagtccagagtcagtttctatcccaattctccctgcagcctgaagaacggatccttgtctccaatgtcagcacaaaggaggctttttctgtgctttgacattctagcacttcagggatgagagggagggagaatcctggatgctggatggagtatttctctgaggcccacacaaagctggacacccccaggctctactccatcccattggagtctcttctttttttgatagcgggagggaggaagtacgactaatgttggagcctgaaactatggaaatgctgctaaaatttttatattgacaaacattttcttggtacttcattgtcatttttcattaatcaaccatattaaatttataataaaaaatgcccctcagaagtttgcctctgaagcctttttctcaatattgacaatttttctttcagagtgagtttccacaaaaaccaaagctatataatttggcccttgtatttttcacatacctttttttggtttcccttatttgactactgttacgggcttgtacagaaaacacaggtgagcaggaaagggaggcacggcgtccccgccccgcattcagaaacccgcagtcagcagctcatggagcagtcggttgccatgttcagggctgaggacccagcagggaagtgcaggtcttatcctttgctcaagcagccaaaaacaccctggcttgcatattctggagcccccagagggaaaccccttaatcctctgtagcggtggtggcacaagctccgactcccttaggagctgtgaaggtgacagatgaggcaaagtgg

SEQ ID NO: 16192 - DNA, 1163 bp, Homo sapiens
ggaaaagattcggaaattcatagcacatggtaacatagctaagatgcattgtgtaatagagtgttgtaaaatctcatggtaatgcagtgatgctgaagtcatctgactctcttagaggatgcttggaggttggaatctcaaattatttgttgaatgtagccagttagggccaaacctggacttggctgtagtgagcactatgggttttgaggaaggagatgctgagctctgggctttggtcctccggaaccggcttgacccaacagatcttttctgtttccaagtctgacatcagctcatgtgattccagggctttaatgtgtctgctggccacaacagtgggctctttgacattgcatttgtgtgggagagatggccccagccaatgccatttctgcagaagtggagcagatcacaggcagtgacaacgcccatccttttggccacactggggtttgggaagagtttcttgtaacagtattttgtatcattttgtctgtgttggctccaaatgctgctgggatcctgaccttccactctgtctccttgtcttcctacaggaagaccctgttcccaatggcctccgggcactcccagtattctatgctgctaccatagcaatcaatgtcttttccatcatgtacacaggagcaccaggtaaggatcccttggaagcatactccaggggcaaagtgcattgtattctaacagtatcagtttatttggtgctggtattgttggctgacagtaaaaagcattactcatggtcattatggaataggtgctggagttgttggctgatagtaaaatgcgttactcatggtcattatagaatagtaaaaagagtggtaaatgcatttacttgtcttaattaaatacccaagagatatgtagagtacaaaggcaacagactttcaagttagaaaaaaaaattaaatccccactctgccatttacgcagctgtgttgccactatagcttagcctctctgagcctcagaacctgatctaatcccacaggcctacagggttgtgcaggggtcaggagagggtgtggagcacctggggccatgcctggcacccagtgagcgggacagtccacacatcagcaatgcccagcggagctctaaagccgttcacagcacagagtacagacccctggaaa

SEQ ID NO: 16193 - DNA, 1242 bp, Homo sapiens
ttgcatgaaaaatgtaacctagtaaggattactattagtctgtaattattaagcatgcttcaactcctgacaattctagaaagcaggtttttttgtgtttttggttgggggtggttatcctaattataatcttccttgaattgctttatggttaggtccgtcacatgccaaagttagatcccattagcaggcttaaaacatttatttctgaaagaacaaactgttacaggttgctgagtataattgatttcttttgtttcctttctgctacaggaggagacatcacagctttcccagatcgggaggaaaaatatggaatgtgttttaccgctgactgaacacaaccaaatgaactgtcctgacagtagtttgcaaaccagcagctagcagtttgtccagcctctaacattgtccagcactttccagagcaaactcactgtttacaagaactcttggccttacgaagtttataacctcaagctttgtttatttaaaatattcctgcaaaagaaaagtacccggcacccactttccaaaatggccatggatgagtatttgtggatggtcattttgggtttcatcatagctttcatcttggccttttctgttggtgcaaacgatgttgccaactcctttggtacagccgtgggctctggtgtggtgaccttgaggcaggcatgcattttagcttcaatatttgaaaccaccggctccgtgttactaggcgccaaagtaggagaaaccattcgcaaaggtatcattgacgtgaacctgtacaacgagacggtggagactctcatggctggggaagttagtgccatggttggtgagtagcctcttctctataccgatgggacatccgcccactgacccgcttccctgcagtactttgcccatatccataaatgtgatttttgctttggcttttcaaaaactggttggatgtttcacatttactctcttatttttgctttctgcatattaatttatgatttttaaagtgtttaaatatcaggcaaccatttattttctgaacttttgagcaaacttggttgctaaaatagatttcagctaagtgaatacttttcagaaagtacagaaaaagacctttgtagaacagcgctttattattttagagttgtttgaaggttgtctaagtgaatgtgttttcaaggttgatgtatgaaatttccaggaaggttgatttagatttttttcttaaggtttttcatcaattaggag

SEQ ID NO: 16194 - DNA, 1140 bp, Homo sapiens
gaaatataaacaaaggaacatatttttaatttaatgaagcaaaattccatacatcattttgaaaatagtgtttctttccctgataggcctgttctgcatcattcttttagcttccttctgccctgtttatcacttggtcccacttttatatttttcctcttcggtccagaatttcttatttagtttcttgtattttgcctactccctcccttctccatgattcagcctagtctttccgtcctctgtggacttgggtgtgccttcctctgggccacctcgtcttttgctgctgttagccctcccgcctgcgcacctgccacttcaccctcgcctgtggtccacttacgttccactcagcccggtcagtcctgctttgttcttctccaccgccttggtctcccgtgtgtcttatctagctctggttccttctcgtctccacatttattttgttttcttcctgtgcttgttagtccttgtgcacttggtccttgagctctttttctattaataggtattactagatggatttgttgtctgcctttacatagaacacacatccttactgtgcatttcctgggtagccaggatgaatcaattattattaacttcccttcgaacattgagcttcctctgttttctgtttctaagaattagattagtattctagaagactaatactactttaaagacagtcaaaacagtcatacgctgccatttcagccctttatttaagagtttgtgacatttatcactcccttgaaagattaaagaacacccaaagcaagtttggggtggaggtggggaaggcaggaagagaaaggtaagtgctataaaaggactcattgttaatttctagaaattggactgagatctgaaagcataagccttaacattttttagataaacggtccctgaaaagaataaaaagtatcagtacttccgttaactagctttagtattgggtcatttgtagtttacattctcctttaagttttaagaccttcagtagttaacaaagcagacagagactggccaggcacagtggctcacacctgtaataccagcactttgggaggctgagttgggtggatcacaaggtcaggagattgaaaccatcctggccaacatggtgaaaccccg

SEQ ID NO: 16195 - DNA, 1105 bp, Homo sapiens
ccaagtcatcaattcagtagttcatcttacagcggagtgtaaaccatgcttttcaattatttgcggttcttttactgtataccctgtgatgcccttttaagtttttttgaaaatattgtatacttaaaactgaagtgaaacattaaaatttcttattagaattatttttcagtcttagctgaaatacaatattgtatgaaaatttgcactgcattattagtttttttttttaatctagttgattttcaacttttcttttttaaaggcatctccttggaaacaatgccatctttgaatgtgagagataaacctagtttcagcatgtctgcagcagagaccagtacatcaggcttattcccacaggaagcctcctaaagcctgtggcgcggcaaccatttccaggactaaataataatgtgtcagatgcctgtgagtggactgcctggccaaatgactcatgaagatattcacggaagaatagtcaaaaaccaaagaaaaggcatattctagaagcaccttcaattccatcgaggatttttgagcagctgaagaagaaagttctgaaaatatgagtgacaggactccagcacattttttttagttgtttcttacattatctttgttaacccatccgcttttgtgtataatattaagttattttccactactgcaatggctagtaatttacttaggctcagagttttactctgtatggacagagaaataggaggtaacaacagtgggagaacaaataggaacagttcactgggatgttggtccccagaaattggctttcattgaataattcctaaagggtgtcgtgtgctgaattgctttttcatagtgatgtgctgcttcttgttcatactcttatgactttaatttcacctttatctactcccagcctctgtatatgcctacgtttttaaaaataatttttggcactgaagatctgattaccatattttttcagtttaaaaattaaatcctcgcaaatagatctttggtatagttgcattctaccctaggttattttctaggatcaagaatagaacaatttctgttctttccagcattactctttactattcatatgttcttgttc

SEQ ID NO: 16196 - DNA, 1269 bp, Homo sapiens
ttagaggatcatgaagtgtaatacatcttttccaaagaaacaaaattgttttaattctagactaattacttagcggggtacagtggctcacatctgtaatcccagcactttaagaggccaaagcaagaggatcacttgaggccaggagttcaagaccagcctgggcaacatggcgagaccctatctctgcaaaaaataaaaaattagccgggtgtggtggtgtctgtctgtggtctcagctacctgggaagctgaggtgggaggattgcttgagcacaagaggttgaagctgcagtgagctgtgattgtgccactgcactgcagcctgggtatcagagggagactctatctctgaaacaaacagacaaaaactaattcttcattgagaatcatgacttgactgtaatgtaatattgttaagtagtaatcattttgcagttttattaattttatctcttctttttcttgttgtgaatagcaagaaagtacgactatcagcagccacaaaaccaagctgacagtgtgcaactctcattggaatgaaacctcagaaaaagagcaacagaagtaattgtttcaagctcctgattctttctactaaatcatgaacagctttaaaaacatttctgtctgcataaaattattttacttgtaacttttccccaattgttctgtgcattgttttgcctttttaaattacatctccaagtggctcaaaaggccttgacacagggaacctgcacatatccaggatatgtgtaaccagcgatggtgacttgaccttgccaagacctgtgattccttcaggatacaatcagtgagaaataaaaacacatcttgggaagtgggaatcctggagtttatgccatttgcaatattaaaaaataaaaatgcaagttattatttcaataataacttcctgtttcattgtattctgtgagtgataagtgtcagatcaataacagattaatttgttgttaacagctctttttttttttttttttttgagacagagtctgttgcccagactggagtgcagtggcacaatctctgctcactgcaacttccacctcccgggtttaaacgattctcctgccacagcctcctgaatattctgttaacagctctttaattaatgatctttgcttcttcagaacttgtatggtagaccgtcttttctacagcatgatgcatactcctgtgctaattttagaagctttctgtaactagatttttcctcattatgctcccaggagcgagtttgttttt

SEQ ID NO: 16197 - DNA, 1106 bp, Homo sapiens
tttattgtaaaatcagacaattaagcctgaatttttccaaaagaaaatttgtgcctaattatgggaactaaaatgcctctatgagattttaatctatagtgagtagtattaacattcctaattgtgctttatgatacactgtaacaaattctgcatgatgaaattttcttttgtgaagtatgttccactattttttcattgattcctttttttgttttaatgttgcagggaatgaccctgcataaaaaggcagctgaagatagactggcaagcacaggctcagggcagtcatttctggcgaggcagaggcaagcgaccagcagcagaagatcatacccaggccacgtgcagccggccacagcaaggtagagaagttgtgccgctcaatcacagacacctgcacccacaacatacttctgttacacacaagaacatttcaggaaactcagccagcttattttttgtttctcttctatgtcaatacttagtgtttctcattttgaggactttttctctctcctgtatctttgttttagtttctttggtttttattttgtagtcctttcagttatttttaatgtgccaaaaatttgtacatgttcaattaaaaatgttgtataatagtgtaatacttttctttgtatgaaaatgtcctcttcttcaaaggtataggctttgtaatgaattagattttctgccaataattgatatacaatttatattctttattgtgcctgtgtgttaccatgctaagaatgtctttgtttaaagggaattaatctttttatgatgtattaatctgtgttttcaattgttttccaagtacagttcaaataacttgcatatttactatacaaaatggttgacaagtgttctttttgcaaagacttgaatacattggcagaggtgctaatcacatcttccctaaggcacctggaagaattatttgaggaaaaaatgagttttcacattgttttataggaaattaaatttgtccaaagatttggagactatttttaaaacataaatacataaaatttcattatttcctgctatcttgtttgctggcagaagtgaatgtttggtgaggttattttgggataaat

SEQ ID NO: 16198 - DNA, 1149 bp, Homo sapiens
aagccataggctcaattttatgtccttcttacttacacacagtagccccacacagttttgttttaaatgaaggcaaaagtagacatttttaaagtatattcaacattgtgccattatttacctgataaaggtgaaatcagaggtgtccacggcctcaaagtttgggcccatgggactatcaaatccgaattatatctacttagagcttagaggaagaattaggtatcatgagaaaagcaactcctacttgagagaaagaagactaccaaagcatgttgaggctttaacatgggagacttccaggtaggcgttaacacttgagtggtaactagcttgatgaaggaaaataattactttagcagttatgttgtaaaattaataaaaaggactcatgtttattctggtgtatttgtcaacccatgggtagtgattactccgtgtacattctatagtgtgtgtattttatttagtgtcttaatatatagtctttatatagtatcttaatattatttactgttacttctagtcatttatgtagtatattttactgcaaaatttgtagcactttactaatattagatcattattttccctcttcccctctacctttctggcattttctgttatcttagagtcaggaatctaaaggtctaagtctagaaatctgttggaagctgggttggagctactggatatgagttactttttacatgtctccttaagaagactcttttataatgtaatacttagaagccaaatcctttcaaacgcaaacacccttgaaacttgatgctttctgaagttgtattcataaaaattatcccatcttacagttaatcagaagatgttcttacctttggtttgcctgcctcctgaaacacaaacctgcagattgcccctaacttcagcagtgcctccgtcactgcatgtacctaaaagacaggaaagccaagttctgggagctgtcaagtcggaggatcaggaaaatggtggggaagaggtgactggaaaggcaggcactaaagatggcaggctgcaaaagcattctgagttcccctgtaacagataggttttatgaactcagctgttttcttttttctttttttttcttttgagatggagtctcactctgagtctcactctgttgcc

SEQ ID NO: 16199 - DNA, 1363 bp, Homo sapiens
cgcctcactgcaacctccgcctcccaggttcaagctattctcctgcctcagcctcccaagtaactgggactgcaggcacatgccaccacatccagctaatttttgtatttttagtagagacggggtttcaccttgttggccaggatgatctcgatctcttgatctcgtgatctgcccgcattggcctcctgaagtgctgggattacaggcatgagccactgcgcccggcccaaatcttttattttttaacagccttagttatttataattcaaatgcactaaaatatcatcgctgtcatgaactttgctgtttacaggttctgtgtaattcagaatgctttgtacttagaaaataatttctaggcttatcttgttttgcagttttcatgttttgacaattgcccaccatttacaatactcaatttttgattatgaaatgaatagtaaaattcaaacatatctaataataatttgccttagtttgattaataaattatatcaaaaaacttggggatagaaagaggcttttttttccccctgtagtatttttaaaactttttagatgagctggatgaaaccttagtacattggagctggagttgtattgagtacagccccaactctgaagccttatattcatgtcttaagtaccattgattgttctgtgaattgttgttagtttcatatttgacattgtagtaatccaccttgcattttagtctttgcaaaaaggatattgctaggtatattcttatttctgattgagtattgaatttacatttttcagaatttcattctttgtcattataatccaaaaacaatgtccacatcagacttggaacttctcacttcaaaaatgaaatacagatttagcagtgttgtacataatgatgtccaagcatttttccacctgtttactgagttttccaaccatttactatgtgttgagattggtgggttttctggctgtttttctgaggtgaatgacttgttacagagcctcagtaagaaatttcaactaaaatcacaaaaacataaagtccaggaaaccaccagaagatggatttttagtgtttttgaaatcttgtatttccttttgatatcatttactcattttaattttacgactgccaacttgttacggtattaattatatgtatgtgtttatatgtatgcatataatatatgtatatgtatatgaagaataaagttaagatttggtcaaactatattttcccattcaagtacaaaaatgttttcaaggctgcaaaaagtgtacagttgttaaacaagttgtaaataaagacttgtataaaaattcagcctagatttcttttttctgctcttaaactctgacaaatat

SEQ ID NO: 16200 - DNA, 1219 bp, Homo sapiens
tgcaccactgcactccagcctgggggaccgagtgagactctgtctcaaaaaaaataaaaaataaaaaataaattaaaaaactaaaaactttaccattgtagcctgttgattacaagattgttgtatttctaagaaattacattataaaataattggtttaatgggaaaagagattaaatggagagttgcagaccctcactaaagttatttaccctgtggaattaaggtgcttttatgtaaaaatctgtagctataaaattctgacatcacaggcattagtgtttgattacatcgagtttttgctaaagagaaattgcttttcttttctggatactgcacactgtcattagcacttcatcacccactgttatgtaaaacacaaaaccactcaaagtagctgctatggaaagcccagcagttttgaaattgttgtacatttctaattatccgctctgttcgttttataaccagtgtagtacaggcgatgcaaattctgtatcccagttaactaatcacttttattaacttctaactgaaaacttatgctataacataaagccgtgtaactccttaaatccgagaacatcagcatgaactttttcttcctcagtttgatatcctggaggatctgattcttagcttttctaaattactgaactcaccagcaacctggaaaaataaaatccagctagtgttcactgacttggaagatttctaaaataaatttggaaaccttctgtctaggcttttgtttttggtagtatcttgtcttaatctgtaagacgaattttttaattttccaggcatgtagaataggtcattcattaagcattaaatccttccctttttcctattgttctgctcacttttagttgaatgttatactctaatatagattttttaagggtccgttttattgagatatagttcacttaccatacaattcccccattcaaagtatataattcagtgttttttagtatatatacagatctgtacaaccatcaccatagtgagttttagaacattttcactaatagatttatataaatatttcagccaaagaaaattataaaaatggaacccaatataaaatccttaagtattttcctagcgcagaaactcctggccgggcgcggtggctcacgtctgtaatcccagcactttaggaggctgaggtgggcggatcacctgagggcaggagtttgagacctgcctg

SEQ ID NO: 16201 - DNA, 2144 bp, Homo sapiens
tttaaacttcatttttaaaaactttttctacttagcttgtaattatcctttttttttttttttttttggagacaggatctcactctgttgcctaggctggagggcagtggcatgatcgtggcccactgcagtctcgatctcctaggctctagtgattctcccacctcagcctcccaagtagctgagactataggtgccaccactaggcatggctgatttttaaaaaaattttagtagagacgagatcttgctattttacccaggctggtcttgaactcctgggttcaagtgttcctcctgcctctgtttcccagagtgtttcccaggcatgagccactgcacctggccagctcttaattaactaatgatctatgataagactcatgtaatttaaaagtttcattatagtttcagcgtcattcattcaaaataactctccttttcttgtttgtgtttcagggtttattttctcttgatctttctactgcttttgttcttccttcacaaaatcaagtctttgttttttgttgttgtttacaggattttgcaggatcgtggtctttccaaatatcctaatctgttaaatcaattacttgatttacaaccaagtcatagttccccctacctaattgcctttcttgtggatatctatgaagacatgctagaaaatcagtgtgacaataaggaagacattcttaataaagcattagaggtaagctggtggggctcagtgctgtcatttttggtatctcagaattgatctgcccaataccactaatatccatgtcccctttcaacatcgttcctcagaattcagtgcagggctatttctggttaggggcagcattgacatcacttggcaacacagccggtgactcttaatagtgtgtcttcatttgaatgtgatttgagttaaattgtattggctcaaaggcatttgcgcttgaaattgaattacatattactttaatttttatttttcattttcagttatgtgaaatcctagctaaagaaaaggacactataagaaaggaatattggagatacattggaagatcccttcaaagcaaacacagcacagaaaatgactcaccaacaaatgtacagcaataacaccatccagaagaacttgatggaatgcttttattttttattaagggaccctgcaggagtttcacacgagagtggtccttccctttgcctgtggtgtaaaagtgcatcacacaggtattgctttttaacaagaactgatgctccttgggtgctgctgctactcagactagctctaagtaatgtgattcttctaaagcaaagtcattggatgggaggaggaagaaaaagtcccataaaggaacttttgtagtcttatcaacatataatctaatcccttagcatcagctcctccctcagtggtacatgcgtcaagatttgtagcagtaataactgcaggtcacttgtatgtaatggatgtgaggtagccgaagtttggttcagtaagcagggaatacagtcgttccatcagagctggtctgcacactcacattatcttgctatcactgtaaccaactaatgccaaaagaacggttttgtaataaaattatagctgtatctaaaaacaatgccatagaagtttgattttttaatagcattgaactatatattatacaagacacattgtctcagcttagaaaagcatttgagaaagaaaatattgctataaaactgtaaactagaaacatgatgtgttggaggaaatgttaaaatgtaaattggtcagttcttgactgaaagtgacaaaatccactcaaggtagtttaaacccaaagggtttattcaggtttataaatatctcacagaagaattgcctgatcttttagaaagacattcccaaaccatgctacacaactggaccgtcccgttgctgctgcctgtgccagaatcaggaaactgctggatgaggagtgaggaagccacgatcctggctgccagctccaggactgtgctgtgtctgcacgttccacgcaaagcacatctgctgcttttcccatgtagtgtggttccaaattaaaggctcactgcagtgcatctgattggaaggaaccaacaggatgtcttaaaagcttaactgcagaggaatctgggaa

SEQ ID NO: 16202 - DNA, 1320 bp, Homo sapiens
cccaggttcaagcgattctcctgcattagcctcctgagtagctgggattacaggcgcacaccaccatgcccggctaatttttgtattttaatagagacggggtttcaccatgttggccaggttggtctcaaattcctgacctcaggtgatctgcccgccttggcctcccaaagtgttgggattacaggcgtgagccaccgtgcccggcctgaggtttttttattcttgtccctctgttcgcccttatgaggtcttgtcatttacatatgcttttcaccttcctagtggttatcttggtcctgggggcattggagattttggcaagtatccaaattgcactggaggagctgcaggctacatcgaccgcctgctgctgggagacgatcacctttaccagcacccatcttctgctgtgagtgagactcgagttcgcttagaactggaactcaggctttcagaagtgaaggaaagtagaaagagccagcaaacgttaaaccatgcccatttaagaaaacacactgagaactgatgattatttgaaaagtcagctaacttaatgactttagggatcactgtatggcagtgtgtaaacattattttggattttaaagtgagaatgtggagctggacacagtggctcacacctgcattcccagctactcgggaggccaaggtgagaggattgcttgagcccaggaatctgagaccagcctgtgcaatagtgagaccccgtctctgtaaggaaaaaaaaaacaaaaaacaaaaaaaaaagcaagtgagaatgcattgtgtaaatgatcatagcacagtgcttttctgtacgtctcaggtcggatttcctggcagcagaccctgagacagagggtcacatgcaggaagtggatcaggcagtccttgcgggggaataaaggaggcaggaccgtgcagagggagaagttgacctgcacggtcaactttgtaggtagccccagcaaaggccccagccaatcttgggggcaccggggtggcgctgcagaattgttctgaattgaggcaaaggtttgggcccttcctacccctggatggtgcggaaggccccctgcagaaggctgatccctggagaggtagctctctttagtcaagggcagatccagaagaggcacctgtctgagagctgtggtcatgaatacttccagcagctggaggaatgaaggttttgtgctgaaagggttggagggctctgagggtgtgtgacagcacctaattacactgttcatttccagatttctacaatttctgcagtaacatttattttataataaaaaaagaaacatatttaaa

SEQ ID NO: 16203 - DNA, 1166 bp, Homo sapiens
aaaaaatgttgattaatattagctattactataaattatttttaaagcttctcatcctttgatgttttcaaaaatgaatacctaatttcagagggattgtatgtgaagtccatatttcactgtttttaaatgtttccctgcctcccccaccctgcctctggttccaccctgtcccggtccctcttcctagtgctgcccagactgggtcaccaaacaggcctgtctgacggaacccttgtcacctttgtggagaattctctttgggccctgcctggaagtaagagccacggagcctgcccaggtgccccttctcctcctttccccatgacctgggcttctgcattccctgcagcagtggagatgtggtgtggctaccatgcttcccccgagctctgtgcctgctgccccattctgctcaggagcctcttcctgcggggaccctctggtgctctggcctcacctctgtggctcgtcctctctgatgcctcctcctccccagagagggcgttcatctctggtcccatgctcctctgttagtctccactagtcaaaggcagaggtgatgtttcccgcctccctgtaatcccagcacctagtagcgtgcccagcaagtgaatctctttgtcaggtagttaagacagtggattaatatgaaataaaaatatccctttggcgattcttttggtcacactgtgttatctcctccaggcaggaaaaatactattgtattacaaggctcggaccaaagacatcctgattcgattcactgcttggtgttgtattcttgtaagtaagcagcattcctcgctaaaattcctttccttcacatgtatagatatttaaaaggaataaaatgtttagcaacactgagctagccattgtcaccacatggcagcaggtaccattttcttcacttgaataacagagaggaacaaatctttccacctaaatgcacagatttattttcttaggaaaatgtctttatcaataaggcagtgtttgccatcagatagccaggaatgcctgaagaaatgtgaggtatgggctctgtgtggagaggcgtatcagagagactgggcaaatcagaccaggttgcagacatcaacttccagattatatgggaaagagagttgcaaggttgactgtttgttcatttcatcctgacc

SEQ ID NO: 16204 - DNA, 1126 bp, Homo sapiens
aacctcttggcctttgcggcatccagccagaaattcatgaaaactacggcataaatggataggaggagaagcgcctgttccatggactggcattttagctgccctcatgaaataagaaactttagcaagctctagttatattctaatgagaaggcatttaattatttctgtatgttgtatagttggtcccttcactttatggagagcagcaaatccagtttcttgtgcagacatagaactaaatgtgtcatccttttacttcatgtttcttaggaatttaatggttatgtgctgtctgttttcctatgccttttggctcaagtaacatatagcaatgttgactttttcttttttagatctagtaaaacaacaacaacaaaacaatctttgaagaaaggaagggattaagtatttttcctctaatactttcttgaaggtcaatgaaaaagtggtaaatagttatatgtaacctgtgtgaagcagcagccagccttaaaggagtccattccttccaaggcttagaacagtgactactgctgtaattgcttaggctgctgttagtttctcttaatcaaaattactatgtgatagaattcatgttattacttggtgtactgaaaataatttaaaagtaaagactctgtcgtgcaagaaaggaaaaaatgagaggcaaagaatgttaaaatagaaaaaatgtttttatgagagagttaaccttttaatggcaactatatgtgaataaaattaaaccatcacttaaaatattcattagaatgaataatagaataaccaagttcataattagtaagataaaatatattgttgttttttcgttattttttaattcatattagaatttctgtcagtgtttgaacattcatatttatagtttgtacattttcaccttccaaggtttaaaatgagaaccacactacatcacaaaaggtaactaataaacatttcacaattgtgtgaatatccactcactctcactctcttaacttctttccttaatttctttccttgctgtaatttacaatgaagtgtgccccactcatatctcagcaaagtttcagatattatggattcatcacatgtatattcttttaaaatatacttctgtcaa

SEQ ID NO: 16205 - DNA, 1212 bp, Homo sapiens
agtcccatgtggactggattattaatattttctcagttgttttaaaagttgattcttccagattctactattaacttacgatatcagtttagttcattggttctaactttagcatacattagaattgcctggagatctagttaaaacacagattgctgggctggccccaccctcaatttctgtgtacccctggggtagggccagataatttggatttataacaagtgcacaggtaatgttggaacagctgtccagggaccacactttgagaagcactgctttacaaggtatattgcaaaggaaacatgaaaatacttagtgctgttcttttaaggagaactttttaatttttccccacatgaaaaaatgaacatgagcagcatttaggacccatttcacctatgttattttgattgcatctaattataatacattaaaaataagtcgaatgccttttagtgagatttctacatatatctgtgtgataaagatgagtttatgatttctagagccttggtagctgaatgttgcatgttggagagggactaatgacagtatgctgtctctgtgcagaggatttccaccttccgcatcattgtgtttattggatctggtcaagtggcttttagctcattgtgggaggccccagacagaatgtcgacacaaatccattgaactcttttataaattcgttcctttattgccaggtatggtaatctgtatatctttaatttcaccacggtgctttattatcccatttaaaagaagtaaagaagaattgagtaattgggtatcattgcagttaacatggtattcagttaagattcagaatattaacagttgatgaggtaatgcagttctgtttcagcatgtgattaataagaaattgccagcatcctaagtctgaatgatctcaaatcatattaaaggaaagcagtgaacctgtgcttttcagtaattactaaaccattaaactgcttatggactgaaataatgacaagtttctcaggaataaatgtattgctcagttttgtccattaagtccaaacctaggtttgatagcttgggagtggggaagctgtgctcaggacagatcaagccctgccttcccccattgtgggctgtcacagccctgtgccatgtgtggagagtgcctcaggttagatgggtgtgctggttccttggcaaaagttggggtggagtttttttttt

SEQ ID NO: 16206 - DNA, 1523 bp, Homo sapiens
cagcactttgggaggctgaggtgggtggatcgcctgagctcaggagtttgaggccaccctgggcaacttgatgaaaccccatctctactaaaatacaaaaaattagcccggcgtggcggcgcatgcctgtaatcccagctactcgggaggctgaggaggcacaagaattgcttgagcctgggggagtggagattgcagtgagctgagatcataccacttcactctagcttgggctacagagtgagactctgtctcaaaaaaaaaaaaaaaaaaaaaactttccatcgtcaaaattatagtaacgtttccctaagggaagacttcctttgactcagctgattggtccccagccgttccctgggccgacctaaggactagggacagcacagggtgagtggggtgagtggatggacacgaaggccctttccacaccaggcaaagatgcttctccctgatggcgctcacagggtgcacattgactgcacatctgtggtgctcaagcagtctttagtacgtcgtttgtaggtgtattggtgtctcaactaggaaaacagtttttttgttgttgttttgggtttttttgtttgtttttttgagacagagtctccctctgtcggccaggctggagtgcagtgacgcgaacttggctcaccgcaaccttcgccttccaggttcaagcgattctcctgcttcagcctcccaagtagctgggattacaggcaggcaccaccactcctggctaattgttgcatttttagtagagacaaggtttcaccgtgttggccaggctggtctcaaactaccaacctcaggtgatccacctgcctcggcctcacaaggtgctggaaaaacagtatttttactttgttttcttaggtttgatttgatcttcctcttgctggaccctcaggacgaagcctatgacaggcgtctggctcaccacctggtcgcactgtactaccagagcgaggagcaggcagaggaggagctcctggacatggcggtgctaaaggactacattgcctacgcgcacagcaccatcatgccgcggctaagtgaggaagccagccaggctctcatcgaggtaaccctgctgaaaaaaggcttactgtgcctgtagcccacagcattaatgtaactgaccaatcatctcctttaaaatattaattattttgttacgaataacatactgttctcttccttgttttgagacagagcctggctctcttgcccaggctggagtgcagtggcttgatctcggcttactgcagcctgtggcctgtgcttctgggttcaagcgattctcctgcttcagcctccctattagctgggattacaggtgcccacaaccactccggctaatttttgtatttttagtagagacagagtttcaccgtgttggccaggctggtcttgaaatcctgacctcaagtgatgcgccagcctctgcctcccaaagtgttaggattgcaggcgcaagccaccatgctgggcctaagaataataaacttttcttttttttt

SEQ ID NO: 16207 - DNA, 1300 bp, Homo sapiens
aaaaatacaaaaaattagccaggtgtggtggtgggtacttgtagtcccagctactcgggaggctgggcaggagaactacttgaaactggcagacagaggttgcagtgccgagagcgcaccactgctccagcctgggcaacagagcaagactccatctcaaaaaaaaaaaaaaaaagaaaaatattaataattgaccttggctgtatattaaaatagttacttttatagtagagcacatttctcaaacatgccctgaaaggcttttatcaagctcatataaagttaaagctttgagctaccttttcttggccaataaagtcactgacagtttatgtaaacattaatttcaacatggctgttgcattttaattatcaaaaatgtttaaaatgctttaagatgacacatagagaacatacacatacatacaaattagtgcatttgtaatttgttaaatttgaaatgaactattaccttgaaatatagtctttaaaaatttttaatggttaaagattaaattgaatgaaactgtagtctaatggtaactgatgatctgaatccgtctctctgataacctcctttccattttgaaaatgtgtcttattatacatggaagctagtaactacgtgaatgctgttggcaggatgagggtctgggtacctcagtctcttgtcctgtttccttcccccaaatccaccattgtgaagttgccaaccccctgccgccttcccctgccaagtacatgttgtcagagtcagccctataatgttcatttcccctcttgtttgtgggattatggatctctgcagaaatctgcatgccaattaacccatttctaaagcagaatccattttgcatgtcacaatcaagatgtacttggcaatctaagacacactgggagactgtaagaggaattaatatagaaaagctcttaattataataacatttggaagaaatttttcctttgttttgtaaagtggctaaggttgtaggagtgtgtggtatttattaccttttaaatgaactgtaaatttgccttagaaatttgtttaaaaggctagcaagtgagacccttgaggatgatcatatactaataaagattaccaaaagaaacttcttgtcctgttaggtcagtgttatgatttaatggttttaattacttaaccaattttaagaattgacaatttttaaaaatatttttttctaccattctaaagtaatgtcttttgttgtgggtttatgtgtaactacaggattttggaacataaacattttgaaggatagtcaatggtatttagtc

SEQ ID NO: 16208 - DNA, 1969 bp, Homo sapiens
tgcaggccaaggggattcctcaaagggctccacccaaaaggaaaagaaagagagttaaacagagaattaacacttacgtatttgtgggtaatcagcttattcctcagcctctagacagtgaagaggatgaaaaaatggaagaggataacaaagaagaggaggaaaaagatcacaatgaagcaatgaagccagaggagccacctcaaaatttactgagagaaaaaatcatgaagctgcccctccctgaatctttaaaagcttacttgacatattttagagacaaataacttagatcaagaagaaaaatgcctactgataattcctttagtcttgaaaatgtagcatttgttaggagttaaaagagagaattatttctttcatcagagcaaattatagtggaaaaaaaatcacttgtttctgtcagtaacacaaatgatgtattcagtgaataaaagaatcccttttataaaatctatttttctttaaatcttggaaaaatgttgttttagctcagagtgatttcaaagtggaatgcaacagtagtcaagacttgtgtactataaatccttttctgattccttacagatttgtagtgatgaggtttagatttaattttatatatggtttaaataattgttaagcttatataacctgatctgaattgcagttgtttgcatttcctctatgaaaacttcatttatctaataaggaagtcaaatgctttgtagactatttaccttacttttgttgcaatcactgttgttgggttgctgtatatatattccgggcaatatatgagtgcaataacaatacaagatattgaataatttagctttaaaaaatcccacaaattttatgaaattttacagccctgctacttttgcttttgaatctcttgccaaaagacatgggtaaaatatctgcctctctcatagagattttaagagcacagcaagtgaattattaaaacaaagtctatacttaatacaactctttatatggaccctttacattttcagtatttaaaaaaatgaggttatcttaactctatagaattttaaaagtatatttagaattgttttttctgtagttcactgtataaagtatttggttttttaaaaaaagcaaaaccattgttatgtgtgactcttgataggacacagaacgagtgaatgagcatgagtgaggccactttcttggatggctgtaagtagcagggccagggtagacctggtcagcggatgcactttagcagatggaacttctagtttatctgaatatttatctttgacaaggtagggctgagcctacatttgcttttgatctatctagtataagaaatattcacagaaattgtatgtagataccctttgttttgaaaatgctgttcagaatcatagtgtaatctttgggacctatgccatgttcatttcactccttcccatattttttgtgtttcttttggtaaaactataatggttttcattttttacttaatatcacacagttaaactgtccatatttgagctttattttagcttatcagtgataaaaaacaggtagtaactgccattgtttgtttgttttcctaataaggcctgaaaacagccattccttgttaagaaagtgtacaatgtaacatatttgctagagttacatggattatatatttcttaaagggaaaaatttgagagtatcatggactaccaccagcattattattacagtagttactcagatttggttaaggaagcccaagcaatgtatagtgaaaggattattatctctctgctaagattcagatattgtttcagaaatctcagctccagtaattccacaacatctaaaaacaaatgtttgtgatcatgtgtaagcatgaaattgttccaagtaagtgaggatattttagttatgtgaaagacagtttcatggaaggtatttgttttataccagtggctgggatggtgga

SEQ ID NO: 16209 - DNA, 1496 bp, Homo sapiens
gtccttcatagcaggccaagtattgcctctctgcaatagacagctactgtcaatacatgctgtaatttgacattctgggtcacagatataaggtatttaaaatctatttatgctttatagagaaaccagacattaaaacttcatgcactacttatttcgaattactgtaccttatccaaatttacacctagctattaggatcttcaacccaggtaacaggaataattctgtggtttcatttttctgtaaacaactgaaagaataattagatcatattctagtatgttctgaaatatctttaagactgatcttaaaaactaacttctaagatgatttcatcttctcatagtatagagtttactttgtacacgtttgaaaccaactactgtagaagatgaggaatctattgtaattttttgctttattttcatctgccagtggacttatttgaaattttcactttagtcaaattattttttgtattagtttttgatgcagacataaaaatagcaatcattttaaattgtcaaaatttccagattactggtaaaaattatttgaaaacaaacttatgggtaataaaggctagtcagaaccctataccataaagtgtagttaccatacagattaatatgtagcaaaaatgtatgcttgatatttctcaactgtgttaatttttctgctgtattccagctgaccaaaacaatattaagaatgcatctttataaatgggtgctaattgataatggaaataatttagtaatggactatacaggatgttaataatgaagccatatgtttatgtctggatttaaaaattttaaacaatcatttactatgtcatttttctttaccttgaagaacataaactgttatttcacttctacaaatcagcaagatattatttatggcaagaaatattccattgaaatattgtgctgtaacatgggaaagtgtaaatgtttttcatggtttctatcaatgtgaaataaaatttaattctgacttttctgtgactttgagtattttaatatttggaatgttaacatttggaatgaatgtctataatgcaatggaggaaaataacaatgtacttaaaagaatatatattcagagagagaaattttgatgatggtgtggttgacttagaatggaaccaggcataagaaataatctcatgttattcagttttaattggctaaaaaaaaatttcccaaatttggttttcaatgtttctacctatttaagaagttttatttggtgtttatcttttgtctttttcttaactctttttaaattttattttattttattttatttttgagacagagtcccattctgtcacccaggctggggtgcagtggtgcgatctcggctcactgcaacctctgcctcccaggttcaagtgattctcctgcctcagcctcctaagtagctgggattacaggagcccaccaccatgcccagctaatttttgtatttttagtagagacagg

SEQ ID NO: 16210 - DNA, 1154 bp, Homo sapiens
acctgaggtcaagagttccagaccagcctgaccaacatggtcaaaccccgtctctactaaaaatacaaaatgatccgggcgtggcggcatgtgcctctaatcccagctacttgggaggctgaggcaggagaattgcttgaacccatgaggcagaggttgcagtgagccgagatggtgccattgtactccagtctgggcaacaagagtgaaactgcgtctcaaaaaaaaaataataaaaattaataatcaagagaaactctgtaacatctctatggtacagagttacatctctatgttagagttacatctctaggtatgtctatgagctaatatttgcatctcactttttaaatttaaattttcttttagacattgtatgcaaacctgttccattctttcttcgtggacaacccattccaaaaagaatgcttccaccagaagaactggtaccatattacactgatgcaaagaaccgtgggtacctggcggatcctgccaaatttcctgaagcacgacttgaactcgccaggaagtatggttatatcttacctgatatcactaaagatgaactcttcaaaatgctctgtactaggaaggatccaaggcagattttctttggtcttgctccaggatgggtggtgaatatggccgataagaaaatcctaaaacctacagatgaaaatctccttaagtattatacctcatgaattcccgtccaaggaagcagagttgttaaagagtactggaataggggctgaaggatctatattcccttattgcattttccttatgtataattttccagatggtgatgttacttttcagtgtactcatatgtctcattttcatctaaaattaaatggcaggaaacaaggactgcatagagaaactgagtctgtgtgggttctgtctcaaagatacaaactccctgatagtctatggaaggaaaatgacaactattttagaatatttctagtttgttttttcagtgatcttttcatccaggccttgttactgttacagatcagaatgaaatgcacaagtggaatgggattgacctgtaggcctgctctgccgagatgagagcagatggaatgagttggtgacccctcttaatctgtagcctcagggaaacacggctacccaatgccaag

SEQ ID NO: 16211 - DNA, 1128 bp, Homo sapiens
cttagatagtatatcacttgtttgtggagctaaaagcccatagtggggctttagagtattttgtttaatttaatgtcaaaatagacttggattctactttcttttatagttcataaagtgcattttatattcaagttatttatctgatataggtatctatgaatactagaaataaagttaaaataaaaaagaaaaaacatcaaaagaaatacttagatgaaattgtgcaagaatcttggagaaaagaatatgaagaagacgacattttggcttcagatgatccatcttcaattgaacagtatgagaacaccagaacatatgaacttcaaagcaaaaaagatactgagacagaaaatcctccagttgaaaacacattatctccaaagctagaaattacagagaaatgggaaaagtattggaatgaatatggaggaggactattgtggcaaagttggcaagaaaaacatccgggtcaagcactatcttctgaaccttggaactttcctgatacaaaggaagaatgggagcaacattatagtcaactttattggtattatttggaacaatttcagtattgggaagctcagggttggacttttgatgcctcgcaaagctgtgatacagatacttacacatctaaaacagaagctgatgacaagaacgatgaaaaatgcatgaaagttgacttagtatcttttccatcttcacctattatggttgataatgatagctctggtacaagtgataaggatcatagtgaaatacttgatggaattagtaacataaaactgaattcagaggaagtaacacagagccaattagattcctgtacaagtcatgatggtcatcaacagctaagtgaagttagtagcaaaagagagtgccctgcttccggccaaagtgaaccacgtaatggaggaaccaatgaggaaagcaactcatcggggaatacaaacacagacccaccagctgagggtaagattaaccaagatttattctgccatgtaatggttagcaaaatgaattcatttagcaaaataactactaatcctttattgtagagttaaataataccaagtacatttcatataataatgaaatgatttaatccatcctgttttcatatca

SEQ ID NO: 16212 - DNA, 2525 bp, Homo sapiens
tcctttccagaaatagatgtagatacttctgctggactgggaagccaggagctgaaatatcacaacaggacgtttcaggctatgaaaaataactgcttactaattctaacgtaagttatccagattacgagaagcatttctgccaatgctcatgtcagctaagctcagagaagttacctcatcctcagagagcaacgaatggtatggtctatgtagaaagcaaaatttgcaacggaaaaaccagagttcgtgtgcactttatgaggaagagggttaggtgcaccagacagaggagtttctcaggtttccgtgtcgcctgttctctcgaccaggtggccctctcggcgcaggcggggaccccaccctgcgggacttcggctcctccgtgcggacagggggcgcccgcagccgtgcctttcccgccaactccactagtgctccagctcgcccttgtgcgaccgcctctagggcccgggatatttcctgttccggggcgtgtgggacccggatgcaagcgtgctatataagcgttgctcaagtcccacccctttctttttgaggaagacgcggtcgtaagggctgaggatttttggtccgcacgctcctgctcctgactcaccgctgttcgctctcgccgaggaacaagtcggtcaggaagcccgcgcgcaacagccatggtgaggcggcagtcggcggcgggcggcgcaacgcagggctcgggcgccggggggaccccggtttcgagttcgtgctcctgagggcagatgccggggcgtgtaggggcggaaaggcgctcctgaaatggtggggaaacgcgggaagcttccggaagctgcctttctccagaagtggcagaccatttttggcttattgttctttttcatgtatctaataataggcttttaaggataccggaaaaacacccgtggagccggaggtggcaattcaccgaattcgaatcaccctaacaagccgcaacgtaaaatccttggaaaagggtcagtgcattcgttatgcgggggggagggggaattgggcgaaaagcgacgagctttactcgttaatgttagtgtagaaggtggactgcaagaactaaagtgacaagttacttaaaaaagtaaagcgtggcttaaaattgcttttactgtcatacagctggcgatgaggaggtacctattgtgttgagtaacggtgataattttatacgctattctgagccagcagaagtgaaggccttaagccgattttaattgtttcgattatactgagaggtcttttatttcctgtagtgtgtgctgacttgataagaggcgcaaaagaaaagaatctcaaagtgaaaggaccagttcgaatgcctaccaaggtaaagtaaatcggaggggcaggaagtaggagttgcttccggatgttgcataaattcaggttctttaaggagttcggctgccaaaattgttaacactgatgctgtctacaaacgcacatagaaatcggtggtagattgcggttcctagtaagtagctaatgtttagatatgattgttgaattattgttgctgtgttcttggtgtgctttggtgcttaacaggcgcaagctctaagggtggtgtcctagcacagtgaaaacagacctggcattttcaacccatggtacctgaaaatctattagtgtaaattggaatcataccaaagggaaactaatgaaatgattagaagtaatgattttccagatgttctagggataagtataaaacgataaacacttggtttcctttgtcttttgttacagactttgagaatcactacaagaaaaactccttgtggtgaaggttctaagacgtgggatcgtttccagatgagaattcacaagcgactcattgacttgcacagtccttctgagattgttaagcagattacttccatcagtattgagccaggagttgaggtggaagtcaccattgcagatgcttaagtcaactattttaataaattgatgaccagttgttaacttctgttggtttttattcagaatactggcagattttaggaatataaaggtgtactatgagacttccacttttcaggtggaatatatgggtatcttagagtggtctatcctgttttcgttgtcgtttgagtcatttgaaaactggattccgttaactacataatatgtgagacctgactggttttattggacactggcagtttataactttggcatactctagataaattctgattggtatggggtgttaaggtttctggggcgtttgtaatgcacacccatggttgagaacctagtgcgctagtaggcacgtgttaaaaagctagtaactaatatttttaaattaaccaagtttaacgtccttaaaaaaggattaagtggcagaggcaggactaaaactaagttttagggttttaggaactaaaacttagtttaaaaatacttatattttcagtgttttatattttaaatataaaattttcactttttttttttggggggggggacggcgttttgctctg

SEQ ID NO: 16213 - DNA, 2525 bp, Homo sapiens; identical to SEQ ID NO: 16212

SEQ ID NO: 16214 - DNA, 1961 bp, Homo sapiens
catagtagaaaagtcttcctaaagccataaataaaacaattgatgttttcaactacaaaaacagggaacatgtcttcatagaaagaaaattaacaatataaataaagattaacgagaaataacaaactggaggagaggatttgtacctcatattacagcaaagggtgaatccctctagtgtaaaaagagtttctggaatttgacaaggaaaagaccaacagatgaatgatcagttcacagacatagaaatatgagtgattcttaaatatatgaaaattgctaattaaaactacctttcaataccattttccattatggccaaaatacaaaaatttgacaaatataattggtgaggcatggggaccatggggaaatgcctaggcactcttggatattgctggtggaagtacagactttagggaaaataatctgggaacatctattaaaattacaaaattgctggtgtgattccatcctgtgcagctgttctcttgagcagtggtcatttatctctgtcccccttctctgccacctaagtgcgtgctgccacccgatggaagatttgatggacatggacatgagcctcctgaggccctagaactatcttttcggttgtgaactgaaggccaacaaagattatcactttaaggtggataatgatgaaaatgagcaccagttatctttaagaatggtcagtttaaggctgggcgcggtggctcatgcttgtaatcccagcactttgggaggctgaggtgggtgcatcacgaggtcaggagtttgagaccagcctggccaagatggtgaaaccccgtctctactaaaaatacaaaaattagctgggcatggtggcacatgcctgtagtcccagctacttgggaggctgaggcagcagaatcacttgaattcgggaggtggaggttgtggtgagccgagatcgtgccattgcactccagcctgggcgacaaagcgaaactctgtctaaaaaaaaaaaaagaacggtcagtttaggggctggtgcaaaggatgaattgcacattgttgaagcagaggccatgaattacgaaggcagcccaattaaagtaacactggcaactttgaaaatgtctgtacagccaacggtttcccttgggggatttgaaataacataaccagtggtcttacagttgaagtgtggttcagggccagtgcatattagtggacagcacttagtagctgtggtagaagatgcagagtcagaagatgaagaggaggaggatgtgaaactcttaagtatatctggaaagcggtctgctactggaggtggtagcaaggttccacagaaaaaagtaaaacttgctgctgatgaagatgatgatgatgatgatgataatgatgatgatgaagatgatgatgattttgatgatgagggaactgaagagaaagcaccagtgaagcaatctatacaagacactctagccaaaaaaggacaaaaattaaatcagaatggaaaagactcaaaaccatcattaacaccaagatcaaaaggacaagactccttcaaaaaacaggaaaaactcctaaaacaccaaaaggacctagttctgtagaagacatcagagcaaaaatgcaagcaagtatagaaaaagtgcattgaacagtcctgggcactactggtaaattaagcccaaagatggggagaaaggaaaaggagagaccaatatagtccatactgagtgtcatcaacaatccagactgaagtcttctattttaatcccaatccccttttctgatttgccacccatgcctcttcaggctggaaacaatctcactcttggttccctaaagcactttcttctgactgctgtgattcggtgaaccttgccctttgctttctattacttgtgcatttgcatcacctctgaccatgttttttttttttttttttttgagacagagtctcactgtctcccaggctggagtgc

SEQ ID NO: 16215 - DNA, 1157 bp, Homo sapiens
agccatgtctacaacacagataagtctgttgtgatcacatagatctacataagttgtgcagttttgtgctaaaaacccatagggagctcctttgggatcatagaaaagaagatcatgcaaccagcattggtgaaggcacactcagattgcacttagggcctttctatgatgttgtcaaccctctgaggatggaaggcagtgtcttttgatgttatctagcctagaaatgacacagaactattgctaatgtataaaacacttcattatataagcttcagtggtacagatgaaccagaatgaatgtttatcttctcagaaacactccttcaatattatattggatcatgctgctaatgtaacttgggctacaactcttcatggtgctacaaacttctctgtctcattcagtcgtatttttttatccatagaaaaaggactacattaggtgtaaaagtgtacaatatatttttatactgtgacttaatttgtcattaacaaacttttacaccaccacaatgtattcatgtgcacttgcaaaaggagatctcggacatgcaaatgttaccagaacaaacccagcttttgtccacaaggtgactgtaactcagaatggaaagtgggctttataatagggtgtggagtgaagaacatgctgtatgttactaacagccctttgaatttaacaaaaactgggaatccattaggaaacggattgcatcatacctgaacataagctggactgctgaaattgtatttttagctaatgaaaaagtgtttggactagtactctaaaaatgttctaatgataaagttttgagtcaaaatagaaaagaaaaaaatctgcattccaggccgaattttgtatatttttattgcatttaaaattgctattctgtaatattgggaaatcaagtggcttatcatgtatatcgtgtacttaaaatgtattcacaaactactgttgtatttgtataaaatatagacaaagatcatattttttgtgtgtgtataagctctgtaaaatagcaatcacattatgaagctgcagtgatactacattttaaacattcacatccaaagaagcagactatttattgtccatataccagatttaaaatattaatttgctgctaattaaataatagtactgcagcttc

SEQ ID NO: 16216 - DNA, 1252 bp, Homo sapiens
ggactttttaatttccatgtgccatattgtccactaccggcagtagccaaagctagctgtttcagtcccacagaagagacagtgctctgccatgatgacagggcactgctagggctggtttttcttgtttttcccttttggcagtgtggacttcaggaactagatgtatatgcacaagggattgagtttacactaaaactaggaaatggagttttcaatctatgttcttgcctcttcatacttttatttattttttgtcatcctgccttatactgggctaacaatgagataaaataaaaatacctttgaatactcttttccctttcatgcatttaaagccatggaggaactagaccattagctgttgccgtcacatgcttagacaccagtttacttagcgtgttatgaccttcctcacccatactaccaaatttaaatgggtcccgacttcaccctctggaaggaagtaaactcttctctccccatggtttcagagcagtttttacctgcaagcaccatctctgtatgtgctcttactagattatacagttcttgagagggattgcatcttagtgtttttgtatttccacctcacccccagcacatagcccagtctcttgcacaaattaagtacttaatgtgtgttgagctaaattgaataaaggattattagcattagcatattttgtgccttggttgtataagctggttgtttgttttgttacctttgcaaatatttatgattatcacccccccacatactaaattgtttttaaaagttttgcctttccttcagatactaccccaggcaatttgctgtagataatgtgattgcttccaatgacataattatcccaaactctctgccccggatatactttgccaaacgaaatttgaattctctgaataaattggtcatgtctaaaagagatggtgtgctgcatctgcttttttttgcgccccccgcccccccacctttttttctcattgcggtaaaacacacataaaaatttaccattttaaccatttttaagtgtacagtttagtggcagtcagtacatttacagttttatgcaaccacctggaaccatttccagaacctattcatcatttctaaacaaactatactcattaaatagtaactcttcattctccaccatcctcgccaaccactgctaaaatccctgtgcccacccctgagccaactcctggtaactcttcagctttctgtctctatgagttcatctgattt

SEQ ID NO: 16217 - DNA, 2577 bp, Homo sapiens
gtgacatacatcaaaaagtgggatatatgtgctggtaatgccatcttaaaagccctaggggggcatatgactaccctgagtggtgaagaaatcagttacactggttcagacggcattgaagggggactccttgctagcatcagaatgaaccaccaggccctggtcagaaaactcccagatctagaaaagacaggacataaatgagcataactgattacagggtacagttcttcacagctgaaatggttagcctgagatgctggaagcttcaaaggattggtggagactatgcatggttaaggccatcccgaactttttaaagtatttatgaagcatcagagacttattttccctgtaatagaatgcaaaatcagggaaaatgggttgctttgtgtctcaagtattgtctttatttttgagactattttcatacagttgtcatacacaaggcgcatatatatatttgtgaattaaaatctgtagctgagtctacattgttatgagtcaccattttcacacaacatcatgaatcttcactgttagtactttcatatagaattcggttgaaggaaagattgatttttgtgtagatgtttaatataactttacaactatatctcattgaaaataaagtcattggggatttttacctctaatttggatggaaagcacaagaagccacacattcattaatatgcaacaaatgttgtatttatgttactgaatatttctatggattaaaatagaaaaagtttaattgattttttcttttaaattttaataacaggttcaccagctggtagaaaatagagacacatgatgatttgcattgtaataatttctgtgtgtatgtgtgtgtgttgttttgtttttataaagaaaagtgtgtttgtacccatgagttcagcatttctgccatcttgctattttcattttccctgtggaagatgcatggttgcatccttttccttctgaccaacacttagtctttaactttgtaaggttcggtttaaggtttcagggttagcactatagttttggttcattttctcattaacgataaaatatgctgtaaggcactataagaatataaatgattctattacaattgaaagttacttgacattacatgaattgaactgcctttcattatcttcagacactttgttttagtatttttttttaatttgctaggtttgtatatagaagatcctttcattatcaagaatgagtatggttgcttttgccatggttgcttttactattaataaatgtatctagcctacccaaactctgtagtaacttttgagattctcttaatttcccctcagattaaaatagagaaggttgaaggtactttttgatgaaatttttttctagtctggttagaaaaaaaaagttgtgacatattcattgtgttaccgtaactagaaccttgctttgtgaactgtctttcattgggatgtatggtttctctcaatgtgaaatctggaaacttcatgtaaactacccatgccgttatttcatgtgactccagtgcccttgtattccataacatgctgatgagagggatttctcacggtttctttctttgctaaattttttaaccataaagcagcttaccctttattttcccatcttggaagtaaaattgaccaaagaatgtacgttctagcctggtggaatgtgcatactttaggtttgtatgttacattgtccaaagccctttactttcttattagtaaactgaatctaatatgacacaaatgttttcacccaatctcttgcaactggtcaaattcgagaaggtgttgggccttagcagtaggccttttcagtgaaaattcattcaaagttttggtaggtggaacacttgatatttaaataggacttgaaaattttgaaaagagtatcagagacctcatttttttcctttgcaataagctgaagaaactttctttttcaggagagatggcaaaggtatatgctgttgccagagtcctgtggtataagcatctgtttttattatagtatgtcaaagttagggaaatgggactggcaagtaaaaaatggaatttaatttcaatgttttatgggaactctgatttaatgggaagcaaactagttcatattagcaggaattattttattttttcgagacagagtttcactctcgttggccaggctggagtgcaatggcgtgatctcggctcaccgcaacctctgcttcccgggttcaagcgattctcctgcctcagcctcccaagtagctgggattacaggcatacaccaccacacccagctaatttttttgtatttttgttagagacagggtttctccatgttggtcaggctggtctcgaactcccgacctcaggtgatccgcccacctcggcctcccaaagtgatgattttatttttatttttaattgtattaatctgcatctagataatgactttgtgaagggtgtgtgttgtgtgcaaaacttaaggtattggttgagagttaaatacattatttttataatatgttgggtatagtctagttactaatgattttttttaagtacttttata

SEQ ID NO: 16218 - DNA, 1214 bp, Homo sapiens
tccctcttgcttctgctcttgccatgtgatatgctgggtccccttttgccttccactgtgattgtaagtttcccgaggtctcaccagaagcagattctggtgccttgttgcttttacagcctgcagaaccatgagccaaagtaaacctctttgctttataaattacccagcctcggatatttccttatagcaatgcaaatggactagtacacccaacaagcaaaaacacccatatcaattttcagaactttctccgaggagtttattaataaatatccacattacctttttatcctcataggaattttctagtgctgatttacatataaattgctgtcttaaaatttaactttctaaataccagaagctctccaagataattgtgacaaccaaagcatccctatgttgagaaccagtaaggagtaatgtgaagtgactttaaaaaagatctacaaggactgatcagtcattatggaaatttttgtgttataatttaagcaaaaaattctgttttccagtgtagctcatgaaataattacagtaatctcaacagtgtagtttaattcttggaaaacttaatgataacttttttcccccctttttaaaagagagattcccctggagcttcagcgccttgttcatggtggccaagtgaatttggatatggaggatcatcaggatcaagaatacataaaacctagattgaggttcaaggcttttagtggagaagggcaaaaacttggaaggtaaaaatcctaaaatgagaaaaatacctttgttgaacatgaatttttctttgagaataagaaaagcaaaatgacctatgaagtaaaaaacaaaaatatgaaccatgcacattagatatatacatctgttaatattatatcataatattatatcatgtgataccattatatcataatattaattgtgatattaataatactgtaattaatacttagattgcagttaccatgtttgtggccctctaagccgtatacatgtgttatctcacttaatctttacaacagctctttgatgtagatactgttattacttcattttgcagatgcagtaatttgcccaagattgttgagctaagaaatgactagcatgtgggattcaaacccaggcactctgactacagagtttgtgcttttcaccactatattatatgcctctttcagattacctggtttcaaaggagagaattg

SEQ ID NO: 16219 - DNA, 1196 bp, Homo sapiens
gtagtgaagagatcatttttcagaggttttctgcagtaaattcacagagggatatactcaaaaatatacaaaggaatatacagttactcaaatgtattataattcaagtaattataattatgtagtcagagccttataaagtgtagtgtgaaataaatgccacttgtgtcaaaatggtttataggatgataaaaataatgacagaaaaataggaaataatttaaatgtaagaatagtttcaaggcctatttattttggggggaatgagtttagctaagggttatttggtattatttacttgtctgtcatggcttctgtggtagataatctcacctatttctttgaaaaatgagtttttatcatgccatttctaaagagtcagttttatctaagcaatcaatttatattaccatttttcttatattaaatgtagtgtttagacaaatgtcatagaaagtcacactgtagctcccttagataaacctagaaagtagatcaatttctgatttttcttacttttgctgaaaaacctattttcaggttccaaaacatttctgaaaagctgcacatggaatgcaaagcagaaatggtgacgcctctggtgactaatcctggacacgtgtgcatcacggacacaaacctgtattttcagcccctcaacggctacccggtgtgtagaccacagggtcaggtggggagctgcccatgtttaagctgtttccagaccatggcctcacaatgccagggacctcactttttgatgaggatcaagtcatgtccctgcccacccccttcacaggcagcatctgtgtattttacaaacaccgtgtgtaatcgtgatgtgtagtctctgaagtttgagttcttctgatctgttttcagtcatgtcaggggcacttgctctcagtgtggtgaaaagaaaccctgctcctccctattttagtaaagggtcgctagagatttagacctttcttctaggaggcatttcctagagaccagtgaaatatactatgattaataagaaatagattttgaaatatatttgcttatatatacacagatgttggtatttcttgcttcttcttaatgatgaacaacctcagtagatctgaatttttcctgaaggagcactatgagcaggtcctcccagctagtgcagaggtgtgtgtggagatcctgccgtctggcagttatgg

SEQ ID NO: 16220 - DNA, 1880 bp, Homo sapiens
ttttacgttgtattaaagcagcatgggctttgggtatttttatgctttaaagattacttgcaataattattttaaatgatttctgcattatgagaatttcctgaaaagcagcattatccaataactgtttaccccgtacctggtatgataaagaattattttcagaaacatttccacagtgtttttaaaaggaaggaacatcccttaggagatattgttttaattgttgctaaaatctacttgctgtatttttctcagttgtttgataaaattgtatcataaagaattaaatgagttttttaagaattagttaaactatattgtctggtcatatttattgttctgttctcttttatttcaggcaaatggcattaaaattggccctcagcatgctgctaccaatgcaacacatgcaggcaatcagggaggacagcaggctgggggcggctgctgttgagtctgtttttactgtctagctgcccaacggggcctactcacttattctttcaccccctctcctcctgctcagctgagacatgaaactatttgaaatggctttatgtcacagaagactttaatccgtcaaattcttgtataactttgaataaatggttaatgttcacttaaaagacagattttggagattgtattcatatctatttgcatttgatttctaggtcaattgatgtgattatttttgttaaatgttgtcttgtgcccttaactacgaactgaattgtattaaacactacaaagtcatcttgagtattttaaatcggtttgtgtagttaggtttcccaacatctgtggttacctaatgtttaatattatagaactgtcctcagaaactttgtcaattttcacggctataaggaaacagaaggactcttttaattctgtatttatcatttactttctgtatatatagtttaataacctgcttgggtgtaatttgccaagcttgaattctttaatgcatttgcataaattctatactgtttagagcttaaagctacagaagcattgttaggaattgcttggacactgaattttaaactttttgacattgttaacaagcatgttcatcttttcttgtcactagtccaagaaaaatatgcttaatgtatattacaaaggctttgtatatgttaacctgttttaatgccaaaagtttgctttgtccacaatttccttaagacctcttcagaaagggatttgtttgccttaatgaatactgttgggaaaaaacacagtataatgagtgaaaagggcagaagcaagaaatttctacatcttagcgactccaagaagaatgagtatccacatttagatggcacattatgaggactttaatctttccttaaacacaataatgttttcttttttcttttattcacatgatttctaagtatatttttcatgcaggacagtttttcaaccttgatgtacagtgactgtgtaaaatttttctttcagtggcaacctctataatctttaaaatatggtgagcatcttgtctgttttgaaggggatatgacaataaatctatcagatggaaaatcctgttacaaagtagaaaagctttagtaatttactcagtgtggtggttttatcctttttttctttttctcccttggtctataatgaaattgttacagcagtgcaaaataaaatcctatgtataaaagtgttctttttttttattatgaccacctcttttttaatgtatttttagtccacttacagcttttacatgggtttaagcatgttttttaaaagggtcagaatggttaacactcaaccctttttaaaaattttgctaaaatgcgacaaatctcaccatactgaaattatttttgttgatggtgtaagcagtgtaa

SEQ ID NO: 16221 - DNA, 1179 bp, Homo sapiens
tcttactgacatgcatcatcctaaacctaataagacaggttcgctggccttatgtatatggggatttttcagccagccatgcgagttcctgcaggactgatgctattcacagagtggatgggggtggactcagtgcacccctgcagaggtcataaaggaacattgcgaatccttctaaatgtcaagcaaaattagatctggggaaaaatagggtcagaaatcctcccaggcatcttgcagttattctgaacctgtttttctattagtgtttgtggtaattctgataatatccctgaagtgtaacttggctcccagtagcttccctagaaggagcgttccatagaatgatctactaaaacaaggtccacttggattcaacagagatgctaaccttgactgaaaaacaaacttgtgttgtggcagtgctgtgattttgccagtgatggggcctttctttgtttctgtgtgttttctgtgcacggatgggcacggcacaggctatgagaagtacaactccatgcgagctgaccccgcgctgtgctttctggaacgagtcggtatgcctgatgccaaggccatagctgccgagcaaagaggaacagacatgctagcagatggtggtgacgggtaagaaggacattttaaaatttgaataaactttatgtcagtttcacatctattggcagggttcagttcttaccctgcagtacacactgtattgtgtctgatttgaagttcaggagatgtttaccagtctactctatttgtatgtcgtaatgactgtttaaacaatatacattatcttgataatctgaaacttgtttttcttttccaaatgtcatttcccgcaatctccccagaccccctccaccacactgccatggctgcatgttttaaatactgatagagttgcttttgatgtcaaacccataattaaaagtagcactgggcagattattactctttcctacccaccccccttccttcttttgcttatcagtatgattcaaataatttttgtgtttgttttacataggggagaatttgatagagaagatgaagacccagaatataaaccaaccagaacaccgttcaaagatgaaatagatgtatgaacttgagtatattggcttttatagctccattaaaatattatatgcccacataagacttgttaaa

SEQ ID NO: 16222 - DNA, 1071 bp, Homo sapiens
ttgttacctggaattctatgtcaattcccaggaaaaggccatagagtagccttttctttgacctgaggataattgaagaggcaaatatattagtaataattatgaattcatttattcattcatcaaatatttattgagtgcttcctttagctagacatggccctaggtgactgggaatatataatggataaaatatataagcttcctgtcctgatgtgtaacatcctaatgagaggaaacctgtcccccaccacatatacttaggcagattagcacttggccagaggaagaaaatagctgtggagtggacaatggtgtcttcagcggccgaaaggaggggcaggggaagccccagcagcaggagcaggtgtgtggcagcccttcacaaggggctttcatgtctcagttgtatgttgccagtgtcactttgttcattgtcatagttgagggagaagacttgcaacaagaagatggacccacaggagaaccacaacaagaggatgatgagtttcttatggcgactgatgtagatgatagatttgagaccctggaacctgaagtatctcatgaaggtagaacacttttttttcaagttttaggataaaatataatcaatgacttctaattactgaagtttttcttaaacccctttaaaactgatatttaacttttgcttagatttttaaaagttgaagcttaaagcttcaattaaagcaaattttttcttaaaatagataccttgattttggttcaaagcacttttcagggaaactcagaatatacaaatttcttataaatagtgagtcaaatacttgaggaaactagttttactatattcttctgcttagggtgctatttgttaaataaaattcaaacaactgatgaaatattggacttgataatctatcacaggctcatgttcacacatgaactctgtaattacagtgagcaaaacacaattcttagcttctgtaccaggcattggcaaacttttttttgtaaatagccagagagtaaatatttcaggttttctggatcgtacagactctgttcagctactcaactctgcca

SEQ ID NO: 16223 - DNA, 1249 bp, Homo sapiens
ccttaggcctcaacggatcttgtaaaggagtaggaatggattgtgctgtttcacttttctgtccttttctctctggctaagaatatggaatggtttagggggagatattttcttctgtgtgttaacagagtttttaagattctgcagaaatgaaatgggacggagaaaaggatttggctacatttttatgtgatttcattaagttgtttatgtgctctgcctttggaaagaggtaatattcaggtcattttgatgagtaacttggatggaatatacatattatactaaatctttaaaaaaattcaggagtttatttcctgcactacttcaaagttagtgttgcatctaaacaatcttttctgttttcagaaatattttgtgtgacgtgttttgagaatttaactggaaactgtttttgaaatgatctatcattgtacataatcccaaattattggagaaataattgtgagaataagtgttcagtaaaatgttttcttcttatgatatcttacatttatttctaaacagagacaaagcatggaggacacaagaatgggaggaaaggcggactctcaggaacttcattcttcacgtggtttatggtgattgcattgctgggcgtctggacatctgtagctgtcgtttggtttgatcttgttgactatgaggaagttctaggtaagaattttgatatccttatgtgaatttgtaagagagtaagtgacatctcttaggagtcttgaatatttgttatcatctttctggtactggtaatttctatagcctttcagtggttctcaatagagtgaggctgaaaggggatatgaagaaggttaccttggagtattgtcttttgaactctttaaatgtgacctgtaggtttttgaaaaaaggctttatattgtatgtctgtcacacagggagaagttttatcaaacagtactcattctcactatatgcagtactttttgatttctattcaattttgttatattataaattttaaaaatacttgatcatgagccattacatttatttaaggacttgctaatggatcataaccacacaatatgcaaaactcttccttagagagggttttcaaagtacacccttctgtgtctctgttgggatgggatgagtacgtgtgcacacatataggtactggatgggtgtgctgagataggcgtttgtagatattattgtgtgtgtgtaggtgtgatctgtgtgctgttctgaggaagttgctgtg

SEQ ID NO: 16224 - DNA, 1279 bp, Homo sapiens
ggaggctgaggcaggagaatggcgtgaacccgggaggcggagcttgcagtgagccgagatcccgccactgcactccagcctgggtgacagagcgagactccgtctcaaaaaaaaaaaaaaaaaaaaaaaaaaaaactggaccctgcctgttttctaaaaaacactttaaagtattttaaaataaaagcatactatttaaaattgtataattaaaaataataaaagaacaaaatcacttaaaaagaataaacagtgtcaataacaaaaaacctctggcttacccaacttttgtttctagaagatttatatcaatcaccagttccacttcatttatttttgtttatttcaaacactttcttatgactctgtggaggagtgattagtttagtacccaaataaaggataacattttaaaatgtcctttaaattagatttttttggtgataggttccatagtaaatagaattaagataagtcagttaatctaggcatattttatgatggaactttgaagtgtttataaatgaaacaattcactgaagaacattaaaagaaaattgaaatgaatggtcaaattaataaagtgtcaaagcaaataattgtctaattgtctatattactttagtgattatgccagaagtgccttttaaaaggttaactgtattatgtgctcattgtgttactcaactgcacgtaatttatttgttttaatattgtttgaaagaaaataaacatctttcacataaaccatagtgtacaagttattttttaattttaaaatgtaaatatgaggcattctttttcaaaaactgcttttccttacagaaaaaaaaatcttagcacatctatttgtccatcactccagtgtcagttttttcttcataagtttaatgacaggctggtattccagctgcttagttcaacaccgtatttctctaatgtctttcgctgtacataaaggggaccacaaactaattactaagccatggatagtcaagaagttaaaagttttaagcaaaaaatgccatagtttgccacttaatcagataattttattttctttaatagacttcattttttagagcagtttttggttctcagcaaaattgagcatgaagtacaagatagagccatttaatttcgaaacaatatgctattagcctagatcatgatttcatttgtcaaactagatttttcttacagaaatagcactgaagtcctattacaaatatctttatctttgccaatcacctaaattaagactgtagatcataaaaca

SEQ ID NO: 16225 - DNA, 1155 bp, Homo sapiens
ccagcagcctcagccattaattcaaccaccaccattggtgcaaagccaactgcctcaacagcagcctcaaccaccacaaccacagcagcaacaaggacctcagccacaggcccagcctcaccaagtgcagcctcaacagcagcagctgcagaatcgctgggtagctcctcgtaacaggggagcaggcttcaaccagaacaatggagcgggcagtgaaaactttggtttaggtgttgtacctgtcagtgcttcaccttctagtgtagaagtgcatcccgtgctggaaaagctaaaggccataaacaactataatcccaaagactttgattggaatctgaagaatggacgtgtgtttataattaaaagctactctgaggatgacatacatcgttccattaaatactctatctggtgtagtactgagcatggtaataagcgtttggatgcagcttaccgttccctgaatgggaaaggcccactctatttactcttcagtgtgaatggcagtggacatttttgtggagtggctgaaatgaagtctgttgtggactataatgcgtatgctggtgtctggtctcaggataagtggaagggcaaatttgaagttaaatggatctttgtcaaagatgttcccaataaccaattacggcatattcgcttagaaaataatgacaacaaaccggttaccaattcaagggacactcaagaggtacccctagaaaaagctaagcaagtgcttaaaataattgctactttcaagcataccacctcaatctttgatgactttgcacattatgaaaagcgtcaagaagaggaggaagccatgcgtagggtaagaatatagtaattttttgtttggggtctttgtattgctggtggggtgcatggatgggtatattctgagtttaagaactttctgtgaaggaaaccaactacttaagaaacaactctacaaacacccttgaaggtatctatgtgtgtcctatatgaaccatttcttctttcctttcccagggtaactcacgctgagttagcctcttgctcattcttcatactccctagatgataaaggccattgggcctcagtgtttatcatcaaagctgaatgaattttggcatttgtaactaaacagacttcatgaactaaccaggggc

SEQ ID NO: 16226 - DNA, 1098 bp, Homo sapiens
tgtaaaatgttttgtggtaataatctcactatggtatatagaggtaattatcaattgtttttaattacttgaattagtacttgaactttatatggagatgatttacattatatgtgcatatagtttaaatctttaaataatgagagtttttcattgtaattctttttgtgtgtgtgtgttttttttttttcaggagagaaatagaaacaaacaataaccgtatgaagatgtcctgttaaatttacaacactaacgatgtagactctggaaatgcctaataagtcaaagaagacgtattaaagctcttttctgcttaaggtgacatctttgaacactttaacacaaagttgactcttctcgtaatggttttcatcagcgcatctgcccttatactcttcaccaaacacacttgagaactgtaacttcgtcaagcactttctgtcctgaagcttttaccagtatctgctgtcttttgtaattatgcatcctagctaaggcacagaagactgaatgaatgcaaggattcattaactctttgaatttgttaaatactaacagttaaccattagaagtggttcaatgatgtaagagtcacactgcttcaactttttctttgttgtagtttttaaattgtcgatttttagctatttgacagattaaaagcaaaataatcatgccatatttagtcctggagttcaagtctaaatgttgatgtgaaaaattattgtagtaaacttttaatatggcaaagcaaccttaagctctattttagccaaatgaaacataatctgaaattatattagaacatttcccttgtcttcaaactgtttggtgtaacagaatattgatatgcagcttggtggatttcaccagttaatgcacattcttcttccctcctccccccattaatatgtatactgaaaaatgtgcatttgtctgaggaattattttgtttgctaccacttaatgaatctcaaaattttgagtaaatgtacctcagtctaatcagactttttatgacctttataactacatttaaaacccttaattcctatttctgggtgtttgcgagcctgattgctatcatgaagtaaaaat

SEQ ID NO: 16227 - DNA, 1679 bp, Homo sapiens
ggcataaggttatgaaaataatgtactgccccatgtattactgttccaaaaggagaaagctatgtagaaagatacattaagggtgaaaatagcaatacagtagatttgaataccttgatgttttgcattacttcatttatgtttacatcatgtttagaaatgttttcatttactgtggtctttggtcacttcagctcaaagacctagtgatggatatttctttgaggctttcatttatataattttattttgtacaatgttttttttaaatgtgcaaatactgtattcaagtgaaaaaaatacagtatttgtagataaccatagctactacacagttcttcggtagtcccagtgtagttatatcagtgtttactgaagggaacatcaaaatattaatggtatattataaaataaagactttcttaaaggaaaattgcacctattttacctttttaagagtaagccatgaaatcttgtaacatgtctcttaactatttataatgaaaagtggcatttgggtatagtcaccacagcaatgttctacatccctaagattatctaggtaggacatgtcaaagatgactgttgtcattctggaggtcctattagagaatattataaaagggtgaccttgtaggaaggatctgagtcctccccctgaggttctctttttcttggtgctttattagcaactctggatatttttataaaactagttacattataaacggtttcaaacatgtttaatttacattaggtttttatgtaagagtgtcatggaagcactcagcaagcaggctgattgcaatagactcagacatgcgaataaatgtaattgagagtctattcatggtgaggagtacatcccagtgcctttaacctggatttctaatcttaagtgaaatgggtgcagcattcctttggaaaaaaaaatctttttattttcaagtgataattttgtgtttttctcatataagttttctccagagcacccaccttctcttccttcttggtctgtcattatattgcaaaatatttttcctctgaatgaaattatcacaggttgtctcaagcacaaccaactgaatgtctcttaactgtggggaccaaaagggagagagcctggggtctacaagaggagacacatcatcaaatgtttgaatgatcacaaattaagacattatcagcccagtaaatttcttgcttaatgtttttccaagttctggcttgaatatttcttattaaagctatcttatgtgggtattttattttgaaaggtattatagtttgtatatttaacagtaaggaggaaactgtaaccaaaattagtatttctctatacgtattggtacttgaagattcctttcaaaagaaatccagcgttttcctaattttagtacttaatttctctttttaatttaagtgatctttctaattcgaaagctgtgttctttttgaataccgtgcatgggggttaagctgatgttaaaacagtttgcaataaaaaaaaatgaatcagcttaagtcatttaatcatttcaagtgcattctgcatcctttaaaaataagtttaagaaatttaagagaattgtgttttcattaagttttgcatatcttttgttatgccatgtaaattccctttttcgtatgattaaaggaaggttatgataaaatgatta

SEQ ID NO: 16228 - DNA, 2304 bp, Homo sapiens
acgatcgcatatgctgcatttcacgttttattggacattttaccccactgagtggtaaaaaggacagaggctacagatggagttgctttgtttatgaaagtattttggtttgttttctttcatttaattgcctcatatttaaaaaccatgggtccactgttaaaaccacatgtgtatgtgcagctttacattttattttacgtgaagcatgtgattaggaaaactcattttcttttcaagcctcaggacctacctgaagagaagttttcttgtagctcaagttgtgcatgaattactgaatattttactgtgcttttcttcatgaagggtacatgctttgtactcttcactgaaagctgaaaacatttcttgttaccctcttttgtgcctttttattttgccaaccgtgtttatagaaaggacattactaatgacattttgcagattaaaaacattcatttgaacacagtagtcccctagaaaaacaactctacaaaaattttgcagccttattcattataattttgataaaattaacacaaaatcagtcaagaaggaaacatgtatattagtgaagtgtttttggagactgtttgaatgtgaccaaatgtggttctagttgacttcttttcactttggcttatatcaattcttgagagttaatgtgatcatgatattgcaaacaactataaatggtctctaggccttactttgtgattatacgttatctccggctagaaaaaaataatggtagtaaagaaactgacaaactgaaaataagaaaacaaaaatcaaatgcctataataccataatgccagtttggtatagagtccaactttaaaacatgaattgctcgacagagttctattcagtaggtgtttctttgtattgtcttttgtgaatttattatgaaaatgctgcgttgtgttgaatgaaaaagacccaaattactgcttatgaagaaataaagccagcattgatcacttaatcctgtttctcatgtccagccagaaaaaagaacttcagtgaaggtaagataaataaatacatacacatatgtttttttggtagataagtgctaattacatatatgtaatgctttattaaatttctgaaatatttggtaactaaaattttctttttggaaattaataaatccagatacatattaatgttgatatgagtaaaaacaaataggaagaaattgaaatttcttttcatcaacatgtagagctgctattttactatttggagaatatgatgtgaaaattggacctcaaagggtttccttgtgttttcattgtaaaataccatcatcagtgagagtcttgagttcactaacattgtcaccttctggagagagagttaatggggggcattgaggatgatatttttttacatgtgtttggtttctgattcaagtgacacgcacaaactgaaaaaaaaaaaacaaaaaaagcaacaataactttcagggcacctattgctctaaatgcataatataacttgctgccagaaccagatgtgtttaaaaaagaaaataaaaccaccttctttctatagccattaaagcaaactttactgttctaacaaatttgtattttattttgcattgccacacatctgcttatttaaaaactacatccctttggtagtaatgtttcaggacaagtaggtattacagcttgatgtttgtgtgttctaattctaagagttctttattccagatcatatagagtagttaagacaactgtaacagcattttttgaaatacattgtaaaataataaaaggtaacataattaaaatcgagtggatattatatacttgtggtataagcattattgattatttatttttaaattttattttaagttctgggatacatgtgctgaatgtatcataggtatacatgtgccatggtggtttgctgtacctatcaacccgtcatctaggttttaagccccgcatacattaggtatttttcctaatgctctccctccccttcaccccaccccctgatatgccctggtgtgtgatgtttccctatgttgattactcttaagcctgtttgtacacacgttgcctggcacactttcccagttccctgcagttgtgctacctgactaattcccatgcatcttccattcgtttccttcctgacaccacacctgcctctctccagattggattgctgctcctgtgcatatactcattgtagcatctatcacattatatcaaaattgcatatttaacagtgtctctcccctgctaagctctctgagaagagaatcttttttaagt

SEQ ID NO: 16229 - DNA, 2321 bp, Homo sapiens
cctttattaacattactgtcctggggcgtgtgtgtgctaatctattccagagaggcaggcatctcagaaattccagcacctttgaaacttcttaagacattggaaaggaaactttgtactttctctctttactcagagaagtaaaatttaacaaaagcagggtattgccaagatggttgtagttttcatttagaggaagcagtttggctacttctttacctttcattctgttgatatgttctgtgttcataacaacccatcaatttgtaaaggttttaatattcccagtagttgcttggtttttcatgcagaacatacccagccctctaatccatgattgggaggtgggggcgtatcgttactgttacttgaaccaatatctttatttatactttttgtttgtttctagtttgggccacacatgttgaagccaacaggaaaaatgaaggctttaattgaaaatgtatcagactcctaatagacaatgagctgcgaaaagactcctggttcccctgttgatttgtgagggccaagtttgctagtagaaatcgacactgtttagtaaatacctctttagtattcagtggtcttcttttcaggctaattagtggattaagcaataatgaaagcactaagtttggttttgcttttgtgagatggtcagctttggtgctctccacaacatgtgtgttctgacatgtttctaatatgtggccagggcgttcagatttccagttttgaaaacaattgtatagatttcacaacacaaaaaggacatttgtggatgttactgcacattttaaattcttaacactaatttatctgtataagtgttttatatgcatatttttggacataaacagtttatgtaaaattagtaatgaatgatggcaacgagggcactgttatcttcgtttgttttcaatgatcatttagcattcaatgatggaacagctggtataacataagttgttggcatgaaatatttgagattggaaacttcttgccttgaacagaacttatatcttagattctctctcacattttcttggagctggggtttgaataggaaccagatgatgttcactgctgaaattccataatgcttcccattgaagggaagttgagaaccaggaaagctgctttcacgtcattgccatccagtactgacagggaagaaagatgtagttttccagtagtgatgaatcaaattattgaattaaatttcttcttaagaagtaaaaactcagaatgtaccatcttgtttcctttcagtttattaaatggcatcataaagatgactttgctaagttaatagagttaaaaatttttttaatataagccaaaatattaactttaatgaaacattgacttggcaaatgaatttcctataaattatcattggtcagaatgctgttttgtttaataatattacgcaacataaaccataggtgttattagaagtggagaactgcctttttcatctggggcttttaaggacttgctataaatgattattttttaaatgctttataaatcttcatggtttttctatttctgatacactcagctatagttaataccagagtatcctaccaggagtaatatttggaatatttaaatctagtaaaagaagaaagttgtacttcctggctgggagtattaggagatgggagtagagattcacttttaagttcttgaaaatatatgcattctcctaaatattaacaaaaatgatttggggaaatgacatggcttgattgttctgtttaaatttgtactgtggcttatgttacacatgttcatgttcacctctcattcacctgttttatatggtttaaaattctctttaacaaaattcagaaaattcacctgaaacgtattttgacctaaaagaaacatatttttgtatcagtattgaattttggacagtgcccccatataaggaagttactgttttaaaataaagcaaactaactgttttattttccttggaccatagtgcttccattttttcttttttcacaataggtaagattcttttgcacacgtagcttctttagaataattttctttctgcatttttcaagtggaattatattccttaaaataagctcttaaaatcacctctcattcactttttctcatataaagagatctcagcattaaaacaggacagtcatgaggtatcacagttgactcagggttctcaaacccataatctacttctgagattggtgaaatttgtcttcccagcttctcccacacccacgtcattcagtttctagttctttcacccaacacaacacctgaagtaaaag

SEQ ID NO: 16230 - DNA, 1136 bp, Homo sapiens
tacgtccaaaatattgtatcactttaaaatgtcaatataaaaacaattagatgtttttacattcttttggggggtactaagtctttgaaatccagtgtatattgtgtacttacagcacatctcaatttggactagtcatatctcaggcacccaatatccacatgtggctagtggctaccatattggacagtgtgggtatagaggtctgagggtagtagaggaatatggtcagctggtcactctcgtgagatggccataccttggcctatatttaatgtgtacagaaagtctgataactcagatccttaaaaattcaggcccactgtttcagtacatagagagtggaactatcatggcaaacccacattaaccaagctcacagtaactatttttttaaaacactatcaatattttaatttacagtgagaaatgtaactatcaattattctctccctttaggcaaatcttcctgggaagccaaattatgagcagctggtgagcatggattctgagcaagggaagcaagttgcctcgtgcacccatgtccctttgggtgcacagaagacccatgtcttctgtgatattcatgtttgtggaccagggtaccctcttcccctggaaggtgctagagattctctgccagtagttgcttctctacatcagcttctgattggcacatgcattaaataacgtcattacctcaagccttgtttcagttgagcttacctgggctccattctgcctgtatacatgattgcttctgctctgatccattgtttctcttatagtttgaaactgaaaagatcatcctatttccacattctcaggggaactgtgggtgtggctcccatttcctgcctacacatataataaacccattgaaaagttgttttattatgtatatgtgggaatcaccttctatagcccttttgtttttttttttttttgagacagggtctcgctgctaactaggctggagtgcagtggcatgatcactgcagcctccacctcctaggctcaagcaatcctcccacctcagcctcctgagtgccaccacaccacccagctaatttttttttttttttttttttttttttttgagacagagccttgctctgtcgcccaggctggagtgc

SEQ ID NO: 16231 - DNA, 1091 bp, Homo sapiens
gatgtgtgtttgcgtgcatgtttgtgcatgtgtgactgtgcatgttatgtttctccatgtgggcaaagatttgaaatgtaagcttttatttattattttagaatgtgacataatgagcagccacactcgggggaggggaaggttggtaggtaagctgtaacagattgctccagttgccttaaactatgcacatagctaagtgaccaaacttcttgttttgatttgaaaaaagtgcattgttttcttgtccctccctttgatgaaacgttaccctttgacgggccttttgatgtgaacagatgttttctaggacaaactataaggactaattttaaacttcaaacattccacttttgtaatttgttttaaattgttttatgtatagtaagcacaactgtaatctagttttaagagaaaccggtgctttcttttagttcatttgtatttcccttgttactgtaaaagactgtttattaattgtttacagtttgttgcaacagccattttcttgggagaaagcttgagtgtaaagccatttgtaaaaggctttgccatactcattttaatatgtgcctgttgctgttaacttttgatgaataaaaacctatcttttcatatttttatctttgacatttaccttataactcaatcttttggaaaacacaatgctaaattacaaggaaatcaaagttagcttcttggctcttgtaattcatccctcagatgtttactcagtccgagcttatctactaatgactcaccttgcaagtgagtaagcagaagcccagttagggctgttggagtcctgactaacacaggggagaggtcagctttgagccaggccttttgttcctacagtggtgaactgcataagacatcagcaagtcttgcaagtactaaaatactagttgtatttatttctatcaatcattggcctttttaaagtgataagaaaaggccactccactctacttgattgatatcagttgtaaacaaggtaccactgtgccattccctatatcttcccaggtccaactcattagaagggatatggtgcaaacttctaaatcaaacacattaacatattattt

SEQ ID NO: 16232 - DNA, 1143 bp, Homo sapiens
tccccaaaaggaagatttttgtttagtagcctagaaagaagaaattgctattctttactcagtacttgcaaatgtataatattgttttgccacaacatgaattaatttaattaatgtatctataggggctaggagaaaattatgacaataatggacaagtataaaagatgggtttcctatatatagggagaaaaaggaattgctataaatgactttttacaacattttaaaaaacaatttagtcccagccacttgctttcttggaagaagatattcgggaagttttaaaagaagaaactggaacagacctattcctcaaagaggaagatgaacctgcttacaaaagctgcaaacaagaggtaatcttctagtattattgttaataaaagtcttattgtatccaagagactttgccataaagcttctacataaattactcattctagaataccgcttctgggaagaaagtcagaaaatcactagtcttagataattgggaaaaagaagaatcaggcactcaactgttgactgaagacatttcagacatgcaggtttgtaaaggattattattgttgttattttaaatggttgctttaagtcctagaggttcttatttcttactcattgtgtagccagttcattagaaattcatggagaatttttatcttagtatcattttgcctaattcacagagaaactattcactgtagagaatattttatttacttttttttatatttcttttgttatgagaggagttagctgccttatatctgatgtcaaaaaatcgtagttctcaagattttaaatatcaaagtttatctttggttcatttccaaaataatattactacattactagaaatttcatcagagccaaatgctttcttggagggaaataaacagggcttccattaccacttactcagtagtccctccatttgtctccatttttgaattagttattttcctctttcttttttctctcttagtcagaaaatagatttactacatccttattaatgataccattattggaaatacatgacaataggtgcaacttgattcctgaaaaacaagatataaattcaaccaacaaaacatatacacttactaaaaagaaaccaaaccctaacacttccaa

SEQ ID NO: 16233 - DNA, 1397 bp, Homo sapiens
aatgtgattcagttgtgttgctgtctgagccacagccaattgtgtgtgctctattaatatgttaccattatttttgattcctggcttggtcaagaacaacctgatttttttttttttaatcttgcagaaaagttgattgcaaagtgtggtagaaaaagaaataatggtagcagtagagaatttataaataagagtttatctttatgaatgagttaattgttctacaattttgatcagtggtatttaagcctgtatatgctaagtgtatttatgcccctttgagccaaaatttttttttttttttcagaatccataagagtttatttgttggcttcacttgggtttagatgcaaattttactgcatcacaccctgatcagctgggtatttgcttagtgtattcatcaaatcttcagtgccagtttccttgagaagcagctttcatgcttattccttaaaaacaacagaagagtgtttatcctgagattggtattgcactattttattttattctgcaaatctgtatcctgaagtgtacatttcaacccatattcttctctgttcactgaaattaagttgaatttgaatggctgaaagacaaaatatatgttaatacaatctcttacctagagcattcaaagcctggctgtctctgtttgcacatgtaacagatgcagaactgtgtttgtaattctaagaaaatgtatgtcagaaagtattttatcagatgtttaaaaatctctgcctgttgattcataagggatatagacagtactttaacttgtgtttccagataaggcagattttggtcatctttctgtgaaagtatctctaactgaatccacttcttaaacaaactactctattttaaataaggaaagaatggagaatctagacattttacaggtgtatctgagcaaaatatatatttgggttagtttttatcacattatcacgtttgtctttatattttatcttcatcctaaattttctccctatcaaaacagcaggaaatttttaaacttttatattgtacactatttttgcataaaataagagctgtagctaccaaatactatttactacttagtaaaggtggcttctgtgtattaaactacgaattacaaatatcacttcactaaccactataattatttttggctttttcagccactggaactttttttggggggatttaaatacaggaaaactgtttaagcaaaaaatgcactgctttcatgtaaaatgatataatcttctttaacaaatattttcttcattgataactgacagatatctcatagcattaacataaaataccagaaacaaactttatctccctattcttacatttagtgcaaattggaatgcgtatgtgaatgttagaagatggactta

SEQ ID NO: 16234 - DNA, 1273 bp, Homo sapiens
gcctggactggaccgagtcgggttggtgggggtctgggctatgagcttttgagggtcgcctgggacgcggagcgagacacgagagccaggagctatgtctcagccgccgccgccgccgcctccgttgccgccgccacctcctccccctgaggctccacagactccgtcgtccttggcgtcggcggctgcttcgggggggcttttgaagcggagagaccggagaatcctttccgggagctgcccggatccgaagtgtcaggcgcgtctatttttcccggcctccggttctgtcagcatcgagtgtaccgagtgcggccagcggcacgagcagcaacagctgctgggggttgaggaggtgaccgacccggacgtagtgctacacaacctgctgcggaacgcgctgctcggggttacgggggcacccaagaagaacacggaactggtaaaggtgatgggcctttccaactatcactgcaaattgttgtcgcccatattagctcgctatggaatggacaaacagacaggccgggccaagcttctccgggacatgaaccagggcgaactgttcgattgcgccttactgggtgaccgcgccttcctcatagaaccagagcatgttaacactgtgggctatggcaaggaccgctccggaagcctcctgtatttgcatgacactctggaggacattaagcgggccaataaaagccaggaatgtctcattccagtgcatgtggacggggatggacactgcttggtgcatgctgtgtctcgggctctagtaggccgagagctcttctggcatgccttaagagagaatcttaaacagcactttcagcagcacctggcccgatatcaagctctgttccatgacttcattgatgctgctgagtgggaggacattatcaatgagtgtgaccctctgtttgtaccacctgagggtgttcccttgggcctgaggaatatccacatatttggtcttgccaatgtgctacatcgtcctattattctgttagattccctcagtggcatgagaagctctggtgattattcagccacctttctacctgggctcatccctgcagagaagtgcactgggaaagatggtcatttgaacaaaccaatctgtattgcatggagcagctccggtagaaaccattatatccccttggtaggcataaaaggggctgctttgcccaaactgcctatgaatttgcttcctaaagcatggggtgtgcctcaggaccttattaaaaagtacataaaacttgaagag

SEQ ID NO: 16235 - DNA, 1101 bp, Homo sapiens
gcctgtaatcccagctactcgggagggtgaggcaggagaattgcttgaacccaggaggcggaggttgcagtgagccaagatcgcgccactggcatgccagcccaggtggcagtgtgagactctgtctcaaataaataaataaataaaggattaaattaatgaaagaaaagctaaggtgaataatactgtgcttttgatgttttaggctggaccagatgatatcagaaactttgacacagcatttacagaagaaacagttccatattctgtgtgtgtatcttctgactattctatagtgaatgccagtgtattggaggcagatgatgcattcgttggtttctcttatgcacctccttcagaagacttatttttgtgagcagtttgccattcagaaaccattgagcaaaataagtctatagatgggactgaaacttctatttgtgtgaatatattcaaatatgtataactagtgcctcatttttatatgtaatgatgaaaactatgaaaaaatgtattttcttctatgtgcaagaaaaatagggcatttcaaagagctgttttgattaaaatttatattcttgtttaataagcttatttttaaacaatttaaaagctattattcttagcattaacctatttttaaagaaaccttttttgctattgactgttttttccctctaagtttacactaacatctacccaagatagactgttttttaacagtcaatttcagttcagctaacatatattaatacctttgtaactctttgctatggcttttgttatcacaccaaaactatgcaattggtacatggttgtttaagaagaaaccgtatttttccatgataaatcactgtttgaaatatttggttcatggtatgatcgaaatgtaaaagcataattaacacattggctgctagttaacaattggaataactttattctgcagatcatttaagaagtaacaggccgggcgcggtggctcacgcctgtaatcccagcactttgggaggctgaggcgggcagatcacctgaggtcaggagttggagaccagcctgaccaacatggacaaaccccgtctctactaaaaatacaaaatt

SEQ ID NO: 16236 - DNA, 1101 bp, Homo sapiens; identical to SEQ ID NO: 16235

SEQ ID NO: 16237 - DNA, 1259 bp, Homo sapiens
aatgagttggactacaagagacctgcgcttatgtctcctgcctgccacctgtgttacctgagccacgtgtcccttgcctcctgtagatgatgagagttcactggttgaccctgatgacatcatgaaacacataggggatgacggatcaaactctgtagcaactgagccctggctccgccctggcacttcagaaacgctgaaacgtttcatggcagagcagctgaaccaggagcagcagcagattcctggaaaaccaggcactttcacttggcagggcctgtcgactgcacatggttaaaataaacctgtactggacccagtagtgccttttaaggtgaaaggaatggtaaatctgtacctttaatatgtcctacttttggcccctacctgaaagttactttttttccatcatctgtatataaaattatttttatcatgatgtatattatgtacataaataaaaggccatgattattgatttatataatagaattgtatagattatttttgcacagttttgtcataaattagggtggtaatgaactggattgaactactatatgtgcattatattgaattctgcttgtcattaagataaggtgaataagtgtcttaaacgtcctgtaaaaccggactcccctttgttacatgcacattttccattgttacctcgatgcaaaagaattcatttagtaggtacatctattgtagctgtgattattccagtttctgtgtgatgcaatcaaatgtcctattaattaattattatttcatgtcatttgtagctactgatacagcagaaatgaagggaactgtaattacttgtatttttgtaagccatacgttaaatgtttgttacatcatctttctgcttctatttttatgccaatgaaggcatttgtcttgttactaattacatgatgtaactacttcttgatataaataaatttttattttaattactaaaatctttttaactactatggagctttctagactagttttctagaggttgaatagaggtggggacacccgggagtcaaggacagagagactggagtcttcttcttccaccatggaaccttggataagtgagtccatgtgagttttctaatcactcagtaagtgatacttctaaaaaaggaaagagtcattcaaataattgtgacattctgactcagattagaatctcagaaccatgacagctgagaacatccccaggcactgcttctctctctaataatacttcctctgatgta

SEQ ID NO: 16238 - DNA, 1752 bp, Homo sapiens
agatatcacaaccacctgaacaggaacttggaataaacaagcaatgatgggaacttaatatttttgttggcatttacatccctctgctctttaaaaggacgctggagctgaggtttcctacctgaaaaatgatttctctggattgcagtgtctgagttactggtaaagatgcttagaagtcttactcaaacttgcaacactccagtcccttttagtgctggtggattttgtgtgttatattggcctcatgttgagcagaaagcctgtttaaacagtgtcagctcatgctcacgggtccttccctgtcttccacggcaggaaaagccccacgtttttggcaggtgtggaagtgaaacttacccaaagaactatagatgtaaagattgaacttctacaagaagtacaactcaggagagctgtattttgaaggataaaatgtttataattggggagtggggagagaagaagaaattattgttcatggtaaaagatatttagcaactatggtattcttattctgaagatttttgcacactcaggctatctgagatactggtaatcatcctgtgaaaaatgtacagagatgcaggtctgtaatataaaaatcttaaaacattatatagttcttcctgcactgttttctttattttcttattcatttgctaaatacccataatattttgtcaaatgcactaaacatttgggtggaactttcttttttattttatagggatttttagttttgccctttttggtaggtggtgattttgaggctgtaacatgcccagaagctgttgtggccgacacttcaacaatagggaaaaaaaggtagaaaatatccctactgacagtaactacctgtcacatatttctcttaggacttttaaagatgagccattaaaatagaatgatcctttatggaccaaaacttgaatcactgcaaaatgaatccagattgctgtcattttcttttcttttgggtggtggggcttgatgtagattttactctatgtacagaatttaacgttgaatatattaaaataacaaatctggcatggtttgcggaggttagatttactggaaatgtattcatactgtgaattgtgctctgatggttaaaagacaagattgtcaagcattccgtattaacagtggatgtagaaaattttttcagatggacaaaatgtatatggtacagatgtaaagttttctatgtaaaaaattctgtacaactttctgtacaatattgattcccatctggcatattctaatcaggttataggtcaataaagtttttgaattatttcatcagtgcaatcaaaacctgtataacccacccccatgtttcattgattctggtctattaaggctgaacaactatggaaaagacattttcagccagaactacaaattcaatattgtttggttctggtattttctttccagcttctagcattagatcctccttacactgtacttaccataggatacttatttttaaggcaatttttaaaatttttatttatcttttagagaccggatctcactctgttgtccaggctggagtgcagtggtatgagcacagctcactgtagcctcaaactgggctcacgattctcacactccaccctccccagtagtgaggactgtaggcacacaccactacacttgcctaattaaaaaaaaattttttttttttagagatgggatctcactatattgcccaggctggtctcaaactcttggacctga

SEQ ID NO: 16239 - DNA, 1179 bp, Homo sapiens
gttttagctacttgagaagtgaaaacttgagctggttggccaggagtgtggcctaggccaaggtctgccaagggctgggctagcaccgagcccgctggtttagagagaaaccagtctgctttctccagtcacacatgatgacatggccattttgccagccagttactaaaaagaagaggaggggttgtgaaagagaataattaaaatgatgcatggactccatagcagttgagaagagaagggaggacttgaggggctgaggaacgcagggccagggagttgggagtccaggagggtctggactaatgggaggtggtgcttggggacgaggatgcgtactggaaggtggaccttcccttactttctgttaggttagatcaagctgagtatctgtggctttcttgtaaaactggtctttggggagcattgagttgtaaatcaagtaaaattattgtgactgtgtgtatatgctggggtggtttgttttccaaagagagatgcggtggactttgatgttcgcgttgatactcaagaccaaggaatgtaccgctttttaacatcacaacaactttttaagctactggactgcttattagagtcacatagatttgcaaaagcgtttaattccaacaacgaacagaggactgccctgtggaaagcaggtaagctgcacacgcctcacatttaatgtttactgttgatggatgtgggacaggtacatacaggtctcagaactcattgactgtctgctataggtctgtgcatgtcactatatgtactctgaccttaacagtaataaagtaacctcacaacgaggcccttttctggtctacagtaagccagataactgcttgggtggattttttcccccttggtctattatttgacttacattgttctttcatcttgtttacccaacctggaccttcttgttgatactcattggcatgacaaaagctgtcttttcattaggaaataaatatgtgtaaaagtcgcacacacaaaacctggcatgtgtatttgaatggcttctctgtttactgggagtggccagagctcagagtgaaggtgaatttattgggatgtgaggtatatttgttctagaacaagttagacattttaaacaaaaaataagcttttattataaaccaaagtgacattgttaattttttaatttaa

SEQ ID NO: 16240 - DNA, 1176 bp, Homo sapiens
tttaactactttttaaatattgtccaactggaaaccagaaatatcactgatgtctcaatgtaaaatatttaactattttttaaaaattaggctaaatgatgttcagggaatgggcttaaagaaaagataataatgttgtttgttgcaagtaggaaaatgattaacaggatcttactggaaatagtgtgaaatattgcaagagacaaagcttacaaagagagaggagttctgaagtcgggtaaaactaatatttttatgaatattgattatttccatttttaaattgatgtgaataatttataggtacagttcttaaaatatgcctaaggtcctctattgaatgtattattttgctctcccatttattcaagcccaggcagcattatatagttttccccctttgtttaagaaagctttctagataactgccaagaatttcatttctttttttcagaacttgtattgtctaaaagatttgagaaattttaatgtgttatcataatctttaattaaaatacaatttttaatttttgtagttggcttggacgccttttctggctgcattcagtgtgggtctacaagattgtgatgatactgaagtagcctctctttgcctggaaggtataagatgtgcaatcagaattgcatgcattttcagcattcaggtaacagagaattttgtctttgtagccagtttggaacattaattacctatgccattacaatagtttaaattacaataattgtttatgtgtgacattaaaaactaatttcaagtttatgatggaatttaaatgaatcttaatgtttaagcttctgagaagctgttatagaaggggtagttctatactgatctgtctaagtttatcattataactttggttacagttttttttctctattgaagactatacagaaagttttcaagactttgaattcctatgttaatttgaacatcttgtttaaacgaataaaatatcttgttgaatcatagtttatatacaaggttgtatatattttatatgatttcataacttaagcctaagaacaggttatctttaagacatgtaaatattgaatacataattttcatgaaagaagtcctttctagtaatttatatgctttgaggaacttttaaaaaaagaaaaattcattcaacatttaattataaatgc

SEQ ID NO: 16241 - DNA, 1109 bp, Homo sapiens
cacccagctaattttttattttttgtagagatgggctttccctgtgttgccagctggcctcgaactcctaagctcaagcagtccacccaatgtggactgacaatgtgggaggcaagcaggcctcccaaagtgctgggattacaggcatgagccactgcgcccagcacagtaagcaattctaactcatcagagacaggttctccaaggcctgactttctcaaaatattacctgatggttttattgtggttattgttctgtttttgtgattattacaagtataaataactttgcatatttgaataaagtttctacagaaaaagttggtatagctttggctttgataatacctttatgtttttgtgtaaaaattttatgtatattcaattgtatactgtaattttaatgtatattgcattagtatgtataatatttgttaccttacttaggatctttgttttctttctccattttagaaacttattgcttatgggcacttgactggcaatgctccagatagtacaacaccaggcaaaaaattaattgatagaattattgaaacaatatgtggctgctttcagggccctcagacagatgaaggagttcagctgcagataataaaggtaattattatataaagtaaaattgttattaataatctgtatcttcaaaattcagatgcctttcaccttaaaacattaggaaagatcattttatgtgcattccagctataatacaggttattcgaggccgggctcagtggctcatgcctgtaatcccagcactttgggaggccaagttgggcggatcacttgaggtcaggagtttgagagcagcctggccaacatggtgaaacccccatctctactaaaaatactctactaaaaataccaaaaaaattagctgggcatgatggtgggcacctgtagttccagccactcaggaggctgaggcaggagaatcacttgaacctgggaggcggaggttgcagtgagccaagaccatgccactgtgctccagcctgggtgacagagtgaaactcagtctcaagaaaaaaacgaagaggtcatttggatgctttctagactccatattaggggattttaatgtt

SEQ ID NO: 16242 - DNA, 1492 bp, Homo sapiens
tacattcaaatactttcaaatttgtcattcacccagcaaccttataagtagtaatgattttatcatacaactatttctacacttgacagatgagggagcaagactcagagggactcactcacatgctcttctggttgcaaagttgatttgagtggggccaggagtgaaacccaaatcccctggctgaaaggaccgtgccattttcagcactaaccatgcttagtcatagatgttttcacgaatgtgatcttttttttccccaattttctgttgtttaatcacctgtaacctaaggccactctgtgataacaaatgactaggggaaaatgcttttgagtgtcatacttctcattgattaactctgtaaaaacaatgtaagttgcttgtccaggtaagtagaaagccttttctccactaatgattcaccttcttctctcttttcacagaggacagttatgggatggatgggaaggttaatcagccccgtctcactgcagacatcaactggcaaggcctagaggagctacacagtgtgaatgaaaacatctatgagtacagacaaaactacagacttagtctggtggactggactaattacttgaaggatttagatagagtatttgcactgctgaagagtcactatgagcaaaataaaacaaataagactcaaactgctcaaagtgacgggttcttggttgtctctgctgagcacgctgtgtcaatggagatggcctctgctgactcagatgaagacccaaggcataaggttgggaaaacacctcatttgaccttgccagctgaccttcaaaccctgcatttgaaccgaccaacattaagtccagagagtaaacttgaatggaataacgacattccagaagttaatcatttgaattctgaacactggagaaaaaccgaaaaatggacggggcatgaagagactaatcatctggaaaccgatttcagtggcgatggcatgacagagctagagctcgggcccagccccaggctgcagcccattcgcaggcacccgaaagaacttccccagtatggtggtcctggaaaggacatttttgaagatcaactatatcttcctgtgcattccgatggaatttcagttcatcagatgttcaccatggccaccgcagaacaccgaagtaattccagcatagcggggaagatgttgaccaaggtggagaagaatcacgaaaaggagaagtcacagcacctagaaggcagcgcctcctcttcactctcctctgattagatgaaactgttaccttaccctaaacacagtatttctttttaacttttttatttgtaaactaataaaggtaatcacagccaccaacattccaagctaccctgggtacctttgtgcagtagaagctagtgagcatgtgagcaagcggtgtgcacacggagactcatcgttataatttactatctgccaagagtagaaagaaaggctggggatatttgggttggcttggtt

SEQ ID NO: 16243 - DNA, 1100 bp, Homo sapiens
gcagtgagccgagatcacacccctgcactccagcctgggtgacagagcaagactccatctcaaaaaaaaaaaaagaaaagaaaagaaaattctcttgaccaggcacagtggctcacgcatgtaatcctagcactttgggaggccaagaggggctgatcacctgaggtcaggagttctagaccagcctggccaacatgatgaaaccctgtttctactaaaaatacaaaaattagccaggcgtggtagtgggcacctgtaatcccagctacttgggaggctgaggcaggagaatcgcttgaacctgggaggcagaggttgcagtgagccaagatcgtgccactgcactacagactgggcaatacagcaagattctgtctcaaaaaaagaaaattcctcttgaagtagccaaagaattcttggctaaaaataaataaataaataaatatcctcttgaaggaactagggagggaagtaactgaagagacattgtgtttgctgtgtttgacagagtctgcagaaggctacagatgtgaaagatgtgggaaggtatttacctacaaatattacagagataagcacctcaagtacaccccctgtgtggacaagggcgataggaaatttccctgttctctctgcaaacgatcctttgagaagcgggaccggcttcggatccacattcttcatgttcatgagaagcaccggcctcacaaggtgagtattaggaggacacatgacccaccatcacgttctctctcccttcccaagctcctgaacacggggagttgccttgtaggtgctagctgcagggctgtgatgcctgacggacaccctctctgaaggaggagaggatagtattacggaacaggcaggcgtgaataggcacagcgatgcacatgtgttaggatgcaggtacccacagagggaggaacatggaggaaggagtgtccacggccacctggacacgtggattatgaaagatgcacagaggtggccttgagccaagtatagaaggacaaatggggtgtctgatttatactggtggcagggttagttgggcaggaaagagtcgagctgttccagacaggagagagcctggcatg

SEQ ID NO: 16244 - DNA, 1183 bp, Homo sapiens
atgcaatgacagccttcagcagttcacacctaacagtcccagctcagctagctacgctgaccttagtcaggcattacctctgatcctcaaattccttgaatttgcctaatggggttaattacataaacttccatgaggctgttctgagtctcaaatgagaaattgtatatggaattgtttacagtgaaatcgtgtatgaacagaccatgtaaaatgagcagggaaaaatagaaacaacaaataaatatcaaactgggatgatggttacctttagggaattaaggagggaaacacctcataaaagcactttataatgcatttttaatgaaaaattgttttaacctgccttttgctaggatctgattctcttcctcaaactctggataaagactcccttcaacttccagaaggtaggcaggactccttgcatggatttctttccctgaactaatgcagagtcaactctcctcattctcttttcctgcctcggctttcccctaggtctatgcctcatgcagacggtgtttggtgaagtcccacattttggtgtgttctgcagtagttttatcgccaaaggagtcaggtttgggccctttcaaggtaaagtggtcaatgccagtgaagtgaagacctacggagacaattctgtgatgtgggaggtaaatctgtttctggtgggtctgctgctgaaaatggggcgggagactagtccggggaaatcttggcctttgcccttttgggagagtcctggtcagagagagaggacatccagggcagatatctgtggtttgtgttgcctgtaaaaggaaggaacggccagtgtttgctccatgaggatagcacctctgcatgaattctgtgttttgtgggtgccttaagtcattttagtctggaagattagcaatggaatatacatttaaagaatcaatatgttgtattatatttatagacaaaactaaatgctttagatattatagagtgctgaaactatgctaaagagaataaaaacaagttttaaaattcaatattattcacctataaaattagtcaaggattaaaaaaaaaataaccagatactcttcaagatctagtgatgatatattagggatatgctagtgggactgcagtttattacctgcaggagaaaatttgtcagaatgtatcagataccttaaaatgttca

SEQ ID NO: 16245 - DNA, 1245 bp, Homo sapiens
tgacagctgcggcggcgcgggaggcccatcctcggtcgtttaaagccacttaaggaataaaagcccccgagagagcaaaacgaccacccgaaacctcggaagcgtcgggggtgccgggcccaacgctcccacgtgtcactgccggggactcgcgaggcgaagcttcccagcgctcaaggcgctcccgcctcgtccccaggtatcaggaacagacacccaccaggtccaccagcgggtcagacgccgccttcgggcaggctgggatcttccgaactgggagcggagagtaaggggctcgaccccgggacgcgagtccggccttctggactccggttcagggtgtgtgtgcgcgcggaggggcttatctgggggccctgggtagcacacgtgttcggtttttttctccccgactccgcacgcctggagcggcaatactgcctgccctagaaggccagcggcgagtgctcgccactagggtcccagggagggtttggaaaactgatgagttaagtgagcgaccccaggggacagagggcgagtcgagagtcggccaatggctgcggtgggcggggagaagacgacgcggggatctgcgtgggccgggtcaattccctaccctcgacctgtcgatgccccgcggccccgcccgccctcttaagcctggctcagccctcagggcccgcccgaagtctaccgagcccgagtggcctaccgagcccgagtggccccgcagcgtccaggaggcgcccgctccgcggtggcgctcttggaggtggtgtcggaggtaggcacgggacaggacgcgcctggggcccggggcggtggtcttccagggccgttggggagggcggcagcactcgctggcgcagttcgttttggatggtcgttctgccctctcgggggctttgaatcccaagttgcagatccctgaggtcggaggaggctaggagaagggcgcctttggaggatcgggaggagacgggccgctgcctgtgtcgtggctgacctcttctcctgaccccgtgttctttaatttctgagtcatgaccctgcttggttttcttattgggctcattgatctcaagacccgccggccctgaaggggcttcattcttcagcctcggtgaacttgctgcctgtctattaaaacgccatcctttcccggcggtgcgggggcgggaggactggcagtcgccgaggctcttcgctcccacctggccagggctcgtccacgcggctcccgag

SEQ ID NO: 16246 - DNA, 2762 bp, Homo sapiens
aagcgttgtgtggagggaggaatggcgccctctgcctgttcacctccacatcgaatgtactcatccagatgcggcctctgtgatttgctttattgaaaacagtcaggaattttgatgtttttgtggtgggctttatgatgtttttttcaaaacctcaaagatgtttcacaactttttatctgttttcctacagaaatattgctgacactgctgaagccagttgcttcttcagctgaccgggctcacttgctcaaaacacttccagtctggagagctgtgtctatttgtttcaacccaactgacctgccagccggttctgctagagcagacaggcctggccctggttcccagggtggcgtccactcggctgtggcaggaggagctgcctcttctcttgacagtctgaagctcgcatccagacagtcgctcagtctgttcactgcattcaccttagtgcaacttagatctctcctgcaaaagtaaatgttgacaggcaaatttcatacccatgtcagattgaatgtatttaaatgtatgtatttaaggagaaccatgctcttgttctgttcctgttcggttccagacactggtttcttgctttgttttccctggctaacagtctagtgcaaaagattaagattttatctgggggaaagaaaagaattttttaaaaaattaaactaaagatgttttaagctaaagcctgaatttgggatggaagcaggacagacaccgtggacagcgctgtatttacagacacacccagtgcgtgaagaccaacaaagtcacagtcgtatctctagaaagctctaaagaccatgttggaaagagtctccagttactgaacagatgaaaaggagcctgtgagagggctgttaacattagcaaatattttttccttgttttttctttgttaaaaccaaactggttcacctgaatcatgaattgagaagaaataattttcatttctaaattaagtcccttttagtttgatcagacagcttgaatcagcatctcttcttccctgtcagcctgactcttcccttcccctctctcattccccatactccctattttcattccttttttaaaaaataatataagctacagaaaccaggtaagccctttatttccttaaatgttttgccagccacttaccaattgctaagtattgaatttcagaaaaaaaaaatgcatttactggcaaggagaagagcaaagttaaggcttgataccaatcgagctaaggatacctgctttggaagcatgtttattctgttccccagcaactctggcctccaaaatgggagaaaacgccagtgtgtttaaattgatagcagatatcacgacagatttaacctctgccatgtgttttttattttgttttttagcagtgctgactaagccgaagttttgtaaggtacataaaatccaatttatatgtaaacaagcaataatttaagttgagaacttatgtgttttaattgtataatttttgtgaggtatacatattgtggaattgactcaaaaatgaggtacttcagtattaaattagatatcttcatagcaatgtctcctaaaggtgttttgtaaaggatatcaatgccttgattagacctaatttgtagacttaagactttttattttctaaaccttgtgattctgcttataagtcatttatctaatctatatgatatgcagccgctgtaggaaccaattcttgatttttatatgtttatattctttcttaatgaaccttagaaagactacatgttactaagcaggccacttttatggttgtttttcttgcccactctggtaggggaaaaatcttttattaataggtgtcagtttcagacaactccaataccaagaaactgatgaccttttttgagctatttctccttaacccctaatacctttcttacctaaatttcagaatgatatctttttgatgtctaaaaagcaaagcattttataatatctcattagccaggctttttaggaacagagaagtttttccttgaaatttgattgtttgtttatttgtggcagggtgaaaaatgtacaaactacccctatttatacttatatctctctctatatgtacgcattatggaaatataggaagagatatagcccaaagatagatggtaagtagacagtctgaaaatgttgctccatactaaagaacctttctggaaatttgcatttcgctacttttttccacttgagaggggtctcaatacagggaggtggccaaggaacaacacttctcagtggccaccagttcatatatcccctcaaaaggctctacttttctccaccaaaccattgggttgcccaactgtgatggaaaaaacaagcagatgttggcccagaactccaggacctccccgtgggctgaggctcatgtggcatacaattcagtgtgaccagttttaatgttcagaaatatgtgaattagaatgacttttaacttcacacagcacaaaagagaaatggagtttaaactggatttgttttgttttgagtttcaagtcccttttcactacaacaccgtccaaaactatctacctatctcttcttttttatccatctgcccgctgtattttaatgtcaatcctaattcagacaaatccgcaacttcatgatactggtaatttataataattcgtgatcattgctgttttgaaggaaaagagatgataaattctcttacggtttcaatcaggtaatggattttgttttacatctagtta

SEQ ID NO: 16247 - DNA, 2421 bp, Homo sapiens
atccccaaggacttcgctgtcaaatgtgaaaagtttctttatttctacagaaggtatttctcttgaatactatttttaaattcttgtgactttatagttttctgtgctgtcacttttttctgcttttaatagtagttttcttttaatttgctactttcagttcattgtgttaaaaatgttaccaggttttgtgattggttaaatactggtaagtaaatttcacctgagtgaattggattttacattttcttttctgaaggtatctttacatataaagattataacttgcatttatttataaaagagagtaacatggattcttttctttttgcagaaaatggtgtgaatggaacattaacttcaaatgtagcagactctccccggaataaaaaagagaaatcttcataatgaattataaactaattgattaatgtccccaaagaaatctgctttctactatatctttcagcattagagatttttctgttcttgaaaatacagtctgtgctctttgatttttgctattgtacggtttcatgcatttttttaaagggcatttgaggggaggattattgctatgaatgaaaaaaatattttagcttagactaagctacctgccttcaaaatagtttagggaccaccaccatattttattttgtttttatttttgaacatttttctaatgatttggagagaaaactatttacaaaaattccacatatcagtgatacaatttcttgctgtcaccaattttttataatagcagagtggcctgttctaagaaggccatattttttaagttatctttcagggtaacatggaaatactataaagttggatgtcaaactttaatatgttttcagtgttctctaattttttggaatttttgtagactttacacctggaaaaaaagatttgtaaaatcaccggaacaattgtgtgctttattttataggtagtggttattagtattacatccccattttaaaaacaaaaacataataatcgttacaacacgtggagttttactaacatacatattaaatcaaagtatattcttaaaagtacttgtgaagtaaaatctttcttgtgcattttcaatacttgtaaactggaaatcagaaaatatttactatgaacaggaaaatctgacatatagccctttttgatatgtttattaataatgattcttaatggggctcataataagtttaatatgcacagcatcttagaaaagtttaacctgcaaacacttttaaaacataatgcctacttgatttatatctataaaaagactgacaggtaattatatttggaaaacatttaatgcactaactttaaagaaattgaaaattcaggtggataaatagtcttacaaaagacaatgtgctttatgttatacctatagctttggtcccatctttaattgagaaacatttatctgtataaaacatatttttggataaatatatatatatatatttgtatctctacagaaaggctctaaaaagcatttgaggaaaatatttggttcccttttctataatcatcctttaagattcttatagctacatttggtttattcatcatatttacagtatatatattgttcttttcagtgttcacatcttgttccccatttctcacttgtgtcaccagctgtttgtgccatttttagtgtaaaagttgcagacctattagatctgcagtttaagttgccatgctgctaggaaattgtcctttttctttctagctgttaacctacttcctggaaaaagtagtagctctctgtagcattatggagtttcagtggaaccaaatttttgccattaaaaactggcattatactgaactatacattgagaaatcaatcaaaataaaaatttttactttcacaagttgtatcctggatgtttctgtcattgttggtgtttaggctattttggtatataacctcattaaaatgtaccatatttaaaacacttcatagacattcagaataacccttttcaaaattgtgttctgcaaataaacagatttgttccacagaatattggtgaggactactggggggatagatggtcataaccaaataaatctgggaatcactggattaaactaacctaaaggtgtctctttattatgggaccgttcagtccttaatatgcaaacgtgtttcctggtgcaccaagaatgttggatataatatgcagtgtttcccaccttatttgcctgtagaattttctgttcactgaattactatagcactttgttttctgcagcatacactgtgtttaggcaaagaaaaaaaaaagcccttgacatgtcattaccaagggctaatatatacacagaagcacatatacacacaagtatgattataaattatgagccctacatcctgctctcaaatgtgctgag

SEQ ID NO: 16248 - DNA, 1791 bp, Homo sapiens
ataatacagctgcctaagcttaggtgaactgctttttgaatcttagtttgctccttcataaaattggattaatataataccaatttggcagagttttcaaaaaaaatgatgccacatcctgtgtttccaaacagccttacctttcaaaactctttttggaagctgtaaagataatcaagtgatacctgccattatgtaaaggaattttggaatccgtctttggggaaataaaagccataagagagaatgaaagctaatactttgtagtttaaggatttttttccttgatgtatctaattggaaggccgaaagagtcttgtcttttcttttttttgcctgcttcttctgagacatcaaaaaacatcttgatttctgcggagtagatgagatggagaaagatgagacaggcaacagaaatcttaagaggccacaggttaagatggggtactaagcagggagagcaccaaaggaagtaggccaaagtattaatagaagatcctagaacagattaaggcaaatcatttacctgttttccattgccttactatctttctggagccaattacaaactttcctgttttattttaggtctcacaagaatcttttcttatctaagttgcaacatggaacccagcaacaagaccttaataagaaagaaagaagagtaggaactcctcaaagtgagtactgttataacagttttagaaggggagaattgatgtgtcctcaaacaatccagccattgactttaccactatagcaaaaaaacacacacttcagaaaactgaagcacaaagtcttgacttcatagagttaattgagatagtgtttaatttagaaagttagctattttgactgtctagcttagggttcttttgctatggtggtacactgcttttctaccttcactgtgttcagcaacttcaagtatagtcatatgccacatcatgacatttcagtcaaagacagactgcattgcatataggatggtggtcctgtaataatgtaatggagcacatatggaaacttgataatgtggcacttgatattggcattgcatatcaagtaggggaaatgattgataattagcaatggtactgggaaccgtgggttttctatatgaatatatatatatatatgtatgtttgtgtaagtgtactcttaataatgttcacataaggacaaaatcacccaacgccccatttctcagaacatatcccccttgtaaagcaatccgtgactgtagttacttttcagaaacattaagtacagttgattcttgttattcacagtagttacgtttaataaagtctgagagcgttgacttagcaaattacaagtttctttttggtatgtagtcatttaacaaatgtttattgaccccacagtaatattttaggtactgaactgatactgagattttttttttttatactttaagttttagggtacatgttcacaacgtgcaggtttgttacatatgtatacatgtgccatgttggtgtgctgcacccattaactcgtcatttagcattaggtatatctcctaatgctatccctcccccctcccccctgagatttttaatatggatctaaacctaaatacttattgataaaaataatagacataatgaaattaggtttatttctccatgctcataaggtaccatcttggtgccaggcaaatgataggcctgcagtaaatattatagaataaatttgttcatacctgatggctgatgacatggcaaccattagcaaatatttgtaaatagagttctaaaatattta

SEQ ID NO: 16249 - DNA, 1145 bp, Homo sapiens
aagctgaataacgtatatggcaagtttttgaaagaacagaaatgcttaacttggagaccatggagttgataggctctttaaagagagtttatgtggcccccaaatttgtatatgaaattttagatactatacttttctgtggagtacgtctgtaagatttatatgaccccaaagattaataacccactgttgaagtgcttttaatcagtcaccccacacatgaaaaatttattaatgcatctcttggtttttgtcagttaatgacaagcagtgtagtgaggttttgtaggagtgaaggccgagtcaggcagtaatagatggtcataggaggctgtcagcctttgtctagcgattgaatagccatgtacttgtaagcagcacagttgccgataggtgtgctgcagacaaacaaaagcaaaagcacgtacagaagagaccaggttcgtatcttggatttaagtcacaaagcagaggaatagcaagaacaggggatcaggtttaaggtagctcaaacaaacttctgcatgggtttggttacggtcactgccaactttttggtactgagtcatacacgagatggttctcatgtcatgtttgtattcttcaggccaccttgaattctttctaatattgcattagacaattgaactggatttttttttcttcgattatagtaaagtacacatgatataaaatttaccatttgccattttaactatttttaagtgtacagtttggtagcattaaatatattcatattgtgctaccatcactaccatctatcaatagcactcttcctcttacaaaactgaaaccgtactccttaaacagtaagtccatttccatcctcccagcccccttgccaccatcattctactttctgtttatgagttggactattctaggcacctcatatcagaagtagcatagtatttttctttttctgtctaacctaatgtcctcaaggtttatccatgttctagaatgcgtcagaacttcctttttaaggctgaattatataagtataatatataatataattttgtttatccatttatcagttgatggacagttgggttgcatccacattttaactattgtgaataatgctgctatgaacatggatgtacaaatacctcttcagg

SEQ ID NO: 16250 - DNA, 1680 bp, Homo sapiens
tgtgagctttttgagctattgataacatttttgtttattaacgttagagagaagaagaaggaggttcctgctgtgccagaaacccttaagaaaaagcgaaggaatttcgcagagctgaagatcaagcgcctgagaaagaagtttgcccaaaagatggtaagtaaactttttgaggcactagcacataaggaggcgccttattgggattgaggatgaggtgaatgttcttggcaagatttacttcctaactgtactgagtaattgcttagctacctaatgttacaatctgaaggtagtggggttttttggtgggggatgtaattgcatactgtggcaagaaaagatttaaaggaaacatgttgtagttttctttttaatgattggcattgctaattgtgattgagctaaaaattatgaataactgattattggttttcagcttcgaaaggcaaggaggaagcttatctatgaaaaagcaaagcactatcacaaggaatataggcagatgtacagaactgaaattcgaatggcgaggatggcaagaaaagctggcaacttctatgtacctgcagaacccaaattggcgtttgtcatcagaatcagagggtaagttcagttttactgcattcgggtttgaatgggaaaaaaaaaaaaaaccttcacattacttctgggagccctgattctgaaacaccggagtaacaatattttaggggaagctagaacaaggagggtgctgatcactaatggtttagttgcaagccatgttccccaagctcctatcccttctcttaatagaatacagaaattcagtgtgtaacatgagaggattcctatctgtttaggtaggattcgatattcaaaactataatggttagtattaataaaaatttcgatgaaaggcaaatgcatttctggtccgttttcaccacagtatcaatggagtgagcccaaaggttcgaaaggtgttgcagcttcttcgccttcgtcaaatcttcaatggaacctttgtgaagctcaacaaggcttcgattaacatgctgaggattgtagagccatatattgcatgggggtaagtctcttttctcctttgatttctatttgataaattggttatgtagcaacatgaattttagatgttttaacagtggtcaccttatttatgtttgctttttcacttcaggtaccccaatctgaagtcagtaaatgaactaatctacaagcgtggttatggcaaaatcaataagaagcgaattgctttgacagataacgctttgattgctcgatctcttggtaggttctatttgggggaaaatttggtattagaccatgcgataatttcttaccctcttgtggccgtacatttctcactattgtgaatcttcatgtgttccctatgattcttgatttagcttaaaagaaaacgtaagacatggtttcattagcttgaaccttatctttgtaaagccatgcatttaccttgtttattcctggttatgttttcatctcacagcctattcaaaaagattttgaataattatttcaaaactttttgcaactttaataatcttaaataaccttaaaatatttaggtaaatacggcatcatctgcatggaggatttgattcatgagatctatactgttggaaaacgcttcaaagaggcaaataacttcctgtg

SEQ ID NO: 16251 - DNA, 1188 bp, Homo sapiens
tactgcatttttactcgtgtgcattctgggcgcatgttgatcgctggttcagtccaggcaactgacatgcttttattagtcatacagtattaatgcaggtgtcaggaaatgtcaaatataattccattttttatttttatttttttaagcttttggaaaagctccaggtcctcatgtattgtgcaataacaatgacttccttggcggttttggtacgttcattgccggcaatgggcgttgtaacaggaaaagttttcattaactcctgccattcaatgattaatgcatgatagggcctatgaaatgaacttactggttatagtgggaatataaataaagtgagggatccaacattactttaaaagtcaccccaactgtttatatttggattctatgcactgtgatcctaaggttaacagcatgaattaacatgcgtctttaaaggactgtaatgaaagatcattgcatatttattgaattgtttatatctactgtcaagttgttttgacatggaagattttcaagtaacattggcagagaggtacagtatgttatccctatggtgaaaataaattaatttgttgtatatagttcctcaatctctgaagtaaaggtatgagtaatatagggtatgaatggtttaatcaaggctttattttggaagtaagaaaaatggcagtgatgattaaattgctgcagtccataatttgggcttgttatttgtacattaaagattttttccaagtaagttacactctgttaacttcctgctagccatcagcatgagccctactgcctaaacactatttcatttatttatgtttggaaaccccgtaaacatttttgtttgcaatcttgtttcttttgttataagtcaagtttgaatgttacaatacttttattgaaacttttgttaagttttttcttgtaaattttctttacttgtgagtatcatcttgtcctttaatcctgtaccctaaaataagaaatacatttttgacagaggcttaatgttttaacaaaagagtgtggacatttttattttaaaatttaggcaaaagtcactatcaaatggttgcttatttgtctcacacagccatatagtttttcctggagggttttgttttgttgttgttgaaaagactttgcttacagctagatgaaactttctatagaaaaaaaaaattg

SEQ ID NO: 16252 - DNA, 1194 bp, Homo sapiens
tgcctgtaatcccagcactttgggaggctgaggtgggtggatcatgaggtcaggagtttgagaccagcctgaccaacatggtgaaaccccgtctctactaaaaatacaaaaattagccggtcgtggtgctgcacacctgtaatcccagctactcaggaggctgaggcaggaaaatcgcttgaacctgggaggtggaggttgcagtgagctgagatcccgccattgcacttcagcctgggtgacagagcgcgactctgtctcaaacaaacaaacaaaaagacaccaatcatattggattgccaccctaatgacctcttttaattacctctttaaagaacttatctctaaatacagccacattctgtggtacaaggggttaagacttcaacatatgaatttggaggacacaattcagccaataacatacataattcttttgttttacaggtcagtttgctgagaacgaaaccaatgaggtcaattttagagagataccttcacatgtgctatcgaaagtatgcatgtattttacgtacaaggttcgctacactaacagctccaccgagattcctgaattcccaattgcacctgaaattgcactggaactgctgatggctgcgaacttcttagattgttaaataaaataaattataataaactgttaactcttttcagtatttaatacctgtagttcagttagtaactttttcatatatagcatgttgcctgtatgcagttgaactatataaagttcattgcaaagcagattatcttgtttttttgcatagcaatcaaagttgaaatttgtttgctacatcaacaaattaaggacattttcacaaactgagaaataaacaaatatgccaattcgtaggtggttttgccttatcctttgaatgtgacttaaaatcagcaatgatgatatagtaaatactgaaatttaggtgtaaatcaatacgttctacagggaaataatgaggctaagtatttttatgtttttagtggttttttagaaacctaatcttatagccgccattagcattactagagttatgcaaataattgcattataaacatgtttataacttagccaaaacattgatttttataactctccaagtatgagttgaaatttcttatgtcttttgataaactgcagtattctttaagtgtactttgtccttttgtttattg

SEQ ID NO: 16253 - DNA, 1250 bp, Homo sapiens
tgcctgtaatcccagctactagggaggctgaggcaggagagtcgcttgaatctgggagacggaagttgcagtgagccaagatcgcgccattgcactccagcctgggcaacaagagcaagactccgtctcagaaaaaaaaaaaaaaaaaaaaaaaaagtaaagaaacaaggccggcccagagcagcttgagcagccgcagtctgcaccctctcccgcccgcccgccctccacggcacccccacccgccccggggtctctttcccccttcctcctcctcctcctccaccccaccttcctcctccgcccgcccgcggggccccccctcaccttcccgcctgcccctattgttccgcccccggcctcccgcccttccccttccagcccattccccttttcccctcagtcgcctcgcgccagcagtttttggctttcaccccccatcagtgaccaaagacttgaccactcaaagtccagctccccagaacactgctcgacatggaaaccagtgtgattgaaggtggattaaatatcactctcaccatccgactacttatgcatggaaaggaagttggcagtatcatcggaaagaaaggagaatcagttaagaagatgcgcgaggagagtggtgcacctatcaacatctcagaagggaattgtcctgagagaattatcacttttgctggacctgctaatgccgtcttcaaaggctttgctatgatcattgacaaactggaagaggacataagcagctctatgaccagtagcacagctgccactagacccccagtcaccctgaggctggtggtccctgctagtcagtgtggctctctcattggaaaaggtggttgcaagatcaaggaaatacgagagagtacaggggctcaggtctagatggcaggggatatgctacccaactcaactgagcaggccatcactattgctggcatcccacaatccatcattgagtgtgtcaaacagatctgtgtggtcatgttggagtcccccccgaagggcgtgaccatcccgtaccagctcaagccttccagctctccggtcatctttgcaggcggtcaggcctatacccttcaaggacagtttgccattccacagccagatttgaccatgctgcaccagttggcaatgcaacagtctcattttcccatgacgcatggcaacactggattcagtgcaggtttggatacatctgctcagactacttctcatgaacttaccattccaaacgatttgat

SEQ ID NO: 16254 - DNA, 1218 bp, Homo sapiens
gccttcttcaagaagggagatgtggtcattgtgctgaccgggtggcaccctggctccggcttcaccaacaccatgtgtgttgttcctgtgccgtgatggaccccagagcccctcctccagctcctgtcccacccccttcccccaacccatccattaggccagcaacgcttgtagagctcactgtgggctgtaatgtggcactggtgggctgggacaccagggaagaagatcaatgcctcgctgaaacatggctgtgtttacagcctgctccagtgggacagcccagagcctggctgcccatcatgtggccccacccaatcaagggaagaaggaggaatgctggactggaggccccaggagccagatggcaagagggtgacagcttcctttcttgtgtttactctgttcagttcctttagaaaatggatgcccagaggactcccaactctggcctggggtcaggaaacagccagcgagagttaggggccttagggcacagggcagttgctccactgaagcagactctggccctggcccttacttgcttcctcaaccccctgggcctccccagtccgcagctgtccccgccctccactcagctgtcctgcagaaaacactccaccctccaccttccattttcccctactactgcagagcctccaggcctgctgctatagagcctacctgtatgtcaataaacaacagttgaagcgcgtgcacacacacacacacacacacacacacagtacaaacatgagccgggcatggtggtggacacctgtaatcccagctactcgggaggctgaggcaggagaattgcttgaccccgggaggtggaggttgcagtgagctgagattgcgccattgcactccagcctgggcaacagaaccagactctgtctcaaaaataaattaaataaataaataaataaataaattcctcaccaatatttttttccattccttttttttcctcttcctgggatttcaattacatgtatattagaccacttcataaaatcttacaggtactgattttttgctcatttttttcaccctttttttctttttctgcttcaatttggataattactatgactctattttaatttcatttatcattctgtagtattcaatcttttattaaacccaatgaatagatgtttgatttcagactatctataatgtatgcaaattttgctctcagaatttccactt

SEQ ID NO: 16255 - DNA, 1173 bp, Homo sapiens
gttaatttttttcccctcagttatctttattcagtcttattggtcaaaacaaagaaacaaatagtccatcaactaaaataagctgtaatgaatttagaagatgaatgcatatattagatttccatttaaatcacttctgttataaatcatataaagaactttaaacttgttttatctaatactgagcactgtttttttgtcaagtatttttttaagaccacataattctttttgtctgctcaaggaaaggatagataaataattggcacacatttgtttctcactgaattttacagtagtaaattaatgttataatgtaccacatggagatgagttggtaagaaatcatctagttccagagcccagagattataaacagtaggtgaaatagatttatgacttacgaaatatgttgtgacaatatatttaaatgcatttttatattacttgcatattctcacattgatttgtgcaatagttcagttttaaaaaaaatcttcctatgcatcatgtattttatttttatttattttcacaagtatttgacagtatggtagaataaaagatgattgtaagattaaaaatgtaaaaattgcttatgtattattctgaattgtgttaggttgaaaaagatgattgtggtgactattatttcttgtccactatttgttttttgttttttcaccaataatgtcttcatatttgaacctattcaataaagacatgaagcataaaaatgctagttcgtattcactgatgtcttttagccatacatagaaagataggaacctaatgaaatataaataaaatatttgaagtcaaaaataacagatttttacaaataaaaagtagcttttcattggctgtattcttatgccatcagctttttaaaatgtattaccattttattgaagtgttttctgacatcaaagtattagaaatgtttttgttacaagttttttaaggcattatcttcatagactatttagcagtcacaaacatttgtgatgtcaaggttaataggaaacatggacgtttctagttaagagctatacagtttaatggcaaagttatttgtgatgaataatattttagaccacatttaaaattaaaaaggaatttagtgaaatttcagattagacatgtttgatttttttccttaggttagaggtg

SEQ ID NO: 16256 - DNA, 1774 bp, Homo sapiens
aagcgcatggtacgcaaaggaccagacaaaaagggcctgtgacatttcttcttccttttgtgttttttaggagaggcatgctgcggaggtgcgcaggaacaaggaactccaggttgaactgtctggctgaagcaagggagggtctggcacgccccaccaatagtaaatccccctgcctatattataatggatcatgcgatatcaggatggggaatgtatgacatggtttaaaaagaactcattataaaaaaaaaaaaacaaaaaaaatcaaaaattaaaaaaaatcaatgcggtctctttgcagaatgttttgcttgatgtttaaaaaataccttggatcttattttgtaaatacttacatttttgttaaaaaatacaagtattgcattatgcaagttatttcataatcttacatgtcctgtaacaggcttttgatgttgtgtctttccactcaaatgaatttgctaggtctgttctttttgaagctccccatgtctaactccattccaaaagaaaaatgaggtcagtagacagtctatggtgctagaaacccaccattgcctaatgacctagaaggctttgttgtctctgagcttgactaagaccatacctagatcacaggtattatgactccacatgaaccttcacatttgttcgctcataatctacttactgcctaaaaactacaaaaccaggctaagaaataccaccagtcatagcatttacttctgcttctcctggattatgtgctacaaatgtgctttggctttagaaagggatggatgagaagacagacctgagaccaatctgggtagaagcaaaaagttgaaccttttaaagtgctgaacacaaatccaaattcgaatggttcaagcagccgtgaaatcgctcttcataaagtgggcttaattctctagtttaagttcttttgatggaatgaattaattaatgtgtcaggtggcttatttgtggatgccatgattgatgatgttcattttaagctcttacctatagtacaagtacatgatgctactgaatatttttccacttggaaactgtgagctggttgttgcattaaaacacacatacaaacaaaatcaaaaacactgcggactttcactcaagctggtctttcttccccagtgtaaggcaatcctgcctactaacaacaccaacaacaaaacactccatctgtgaagctgacgcagttaagggggctaggcagggcatttgtgccaactaagaatcaccagatacccaccataagtacctatcgcagttttgaagtcgtttctccccaactcccaactcctgaaggttgctgcctgcatatttactcttcattagtgctattttcctgtatgtcattgtgagcaagctgtgattaataaagaattggagttctgtgaactaataaaggtttggtctgttctcttgcctcttcatgtgtctgaccctggagttcagattttaaaagggcagccactgaattagacaatctcacaagcaaagagataataaggagagtttgaaggaaaccagtgccctgctgagtcatttccctttgggaacagcaggccgcatctcttttctcttgccctctgatgggccaacactgtgggagaggtcttcaatctgctccctttaaaaacatacaggactgaacaagataccacaaaatgcagactgataattctgaggaagtgagcccttttcaaaacattgaaggttcctggcattatctcaagttctcccctgtggcccacagaacgcc

SEQ ID NO: 16257 - DNA, 2526 bp, Homo sapiens
tctgaatcctggtaattaaaagtttgggtgtattttctttacctccaaggaaagaactactagctacaaaaaatattttggaataagcattgttttggtataaggtacatattttggttgaagacaccagactgaagtaaacagctgtgcatccaatttattatagttttgtaagtaacaatatgtaatcaaacttctaggtgacttgagagtggaacctcctatatcattatttagcaccgtttgtgacagtaaccatttcagtgtattgtttattataccacttatatcaacttatttttcaccaggttaaaattttaatttctacaaaataacattctgaatcaagcacactgtatgttcagtaggttgaactatgaacactgtcatcaatgttcagttcaaaagcctgaaagtttagatctagaagctggtaaaaatgacaatatcaatcacattaggggaaccattgttgtcttcacttaatccatttagcactatttaaaataagcacaccaagttatatgactaatataacttgaaaattttttatactgaggggttggtgataactcttgaggatgtaatgcattaataaaaatcaactcatcattttctacttgttttcaatgtgttggaaactgtaaaatgatactgtagaacctgtctcctactttgaaaactgaatgtcagggctgagtgaatcaaagtgtctagacatatttgcatagaggccaaggtattctattctaataactgcttactcaacactaccaccttttccttatactgtatatgattatggcctacaatgttgtatttgttatttattaaattgtgattgttttattattgtttatgccaaatgttaactgccaagcttggagtgacctaaagcattttttaaaagcatggctagatttacttcagtataaattatcttatgaaaaccaaattttaaaagccacaggtgttgattgttataaaataacatgctgccattcttgattgctagagtttttgttagtactttggatgcaattaaaactatgtgctatcacatgtgaaaagcttaataaattccatctatcagtagtataggtctcaatatttattatgagaccagtggtctggaaacagcttgttgtaccgaatcaactggagtctatgcttaaaaaaaaaaaatttttttttaaccatccttaaattattgcttaatggtatcatattaacatattctaaataagggctttaaggcacaggctgttgaagcattttctcagaggagtggatctgtagaagtctgtctttctatagaaatattgtgcttactcaagtgttaaattattttttctatgaactagtctacttcttaaaattcaaacatattcttttgatcacattgtttcttgagcatcctgccctgctactaacttttcaacaaggcaaaatggagtaaagtggcaatttctttagatgagtgaaataccctcaagtctcttttctgcccaaaaagggaaaagtgatagaaatgggggtggcaagtggggtgagtggatgaaggtgggtattgggggtggctgtgaaagaaaataatggagaatcacttttctagacatctacctatacttaatctaagaaacaaagtaatctactgtaaagtactctgccccttgaaagaagtattaaaaagagtgaggatggatttagaaaaaaacatgaatttagaaatattcaaaatggtttttgtggcagattcaatattatgaattcacagatatttaaagaatgagaaacatagtaattagtagaaatgccagaaacagttcctggttcctcttgtgtttgacactaagaaaatagcaagagtgtgaaatctcagatacttatgaaatctcacagatgtaaggactcaagtgtagaagaaaatatccccttcttacaaaaagaaatgtcaatttatggagtttgtgggaaatagggcaagaattcttatgcttatgagagccaagtagtcagtggaagagagtagagctcaaaactggattatcaccttagcaacttagaatagtttgaaatagaaaaaaagtatttaatttggatctggatctgttaagatatgcacagtctattttttgtatagtattggaaaataaaaatgctataatttgggtatgggttcttttgtatacattacctgcccattgaggaaaggggcaagtccattatgcaacttctctccaaacccttcatattctggatatgatacttaaagagccatgagcagctacattctgcctatcagaaggcatttattaaatgactgcttgctgaagatgtgtccaaagagatcctacattaaggtcatttgtcagaatgatgtttgtgtttgtttagagttggctgacctccaactcctggggtcaaggaatcctactgccttagcttcccaaatagctaggactataggcatgcacccggccatgtgttttatttatagctcttaaagcccagatgaagaaatca

SEQ ID NO: 16258 - DNA, 1110 bp, Homo sapiens
tttataggatatacagtaactatttgggtcctatgaaaatagtccttaaagagcttacattcatgtgctactttaacatgaatggagaaaatccgtttatggaagtacagtgacaattgacccaatcactctgtccatcaaaccactcaggctagtttgtactagtagagttttgtttctatttttatttttattaattttattttttttaatacagattttcagtgaggggctttttcaaccccattggttctattttcttgtatttttccatttaatttgcttcataacttaaaccaagtctcttctagtcttaggtattatttctcgattttgtgctgatgggcatgtttataagaactggagaggtaatttattggaatgaactaactgacttcctccattcccctcttcctttttgacatgaattttactacttcacaaatgaagaatgatgttatgaagttaccgtggcgaagttgacaaataccactaaaatgattatgatttagaagtaactttcttctgctgctctaatctgataaatggttactatatgatattttctgacatggtatttggttttgggtatctgttactttggcactattcttgtttgcctctttatttttgccagtgtactatacctcagtcctatttgaaagacctaattgaaagaaaaatcatagaaataagtaaaatgatttgttttataatttatccaccatgtccagtttggttagcttgttatgcaatataagtgaaatatcaggtttttacccgtgtcccttttatcatgaaaattaacacaaaatgtgcattctcttttgtttcatacttagcgggatattgattgttttgaaattatgatcaatacttaatttatttttttctgtccttgaagtcactacaccttgatacagtctttctagtagtcaccatgattcaacagtctcaaaaatcttacaaataaaattctgagaagctttattattctataaattcttcagggtacaaagggtgacatattgaggtgaaattgtcagatttacttagcctggtgacatgaattagctgattgtggaactctcagcagcatttcacgtattg

SEQ ID NO: 16259 - DNA, 1164 bp, Homo sapiens
ttgacagatataatccctttggtgctccatctgatcaaagttgaaaagttgatgttttttaagagacaagctttatcattgtctctgatttcagtagaataatggtttattgttagacaatgatgtttctgcttggataaatcaaagataaattacagttacatggttagatgcatcttttgtcatctatattgtagtttctacataactgtaaacctgacagataagaatagtttcggtttgatttttgtttaaaacagatgagtacttcttaatgttctagacaaatgagtaaaatgtatttctggtagaaattagttgggcaaagatactatgaatgaaaaagtattttaaacgtaaaatgttctttgtgaatatgtaagtatagtataaagatttctttcatcccatttatccccttcctttaaataaactagtttacaattggtagatctgtctatatataaatatatattaaagaacaaagatatatatctaaaaatcacctaaatctgctttattagactacagttcacttattgcatagaaactggacttggctttacattcttaatgtacttttacttttcctcaagatatgaacttactctcttgaagctgaattttcttttactacttaaatcatttatgtatatctggtaaattatgaccaaatttttgttagattgcatacagtaaattgaaatacacacttggtacactacgggattgttgtgcttttgtttggttttagttggaaataaggtttgatgtagatggcttgttactgttaatttaaaatattctataattgtccattactttatgttgtgttgtgacagatttggctatatttttagtcaattgaaatatgatactttaaaagtttgtttttaggtaatccaaaggaaaagtgtttatactcttgaatatattagcctcagcctatataaaaatttctttgaagtaaacattttaccggaaacagaattgacagatttttctacttgctgactgcctaacttattttgtttcatgatctcgagggactgccttttcccatctagatcttttaaaaaaatagttttagtactaaggtatactactggacatttctatttttttaagtgtattctttttctgacttacagtaaaatttcagga

SEQ ID NO: 16260 - DNA, 1073 bp, Homo sapiens
actggctgtggcattttaattttataaaagaatggtttttatctgaagaactagatagaaaccccagtttttgtgccgttcagtcacccagatccttaaacttaactatggtacataatatccacacttagaactaacaggtgtttagtcactttaggacttaaaatggaaagtttttttttttttcctgctgtatctctgctttcaactgaagttaaagaattctagatagtttaaaatgtgttagggataagcacacttcaaaagatgttttctagccctaaattttatgacattgggtacttaaatttggagtacactagctattgagaacaatattttgggttgaggagagatggttgaggccattatttagtgggagcattggcattttgaacactgtaaacaaaagaacacttccgcctgctgtttgtaaaagctctttgggaagatcttttacgaagaccaactttttaaaatgtaaattacctacctaatataagtgtcctaagacatgtatgtaaacttccggaactgttttgtctgtgtatttagaaaatacacaagaatctttattcaaacctaaaaatataaacttgtgagcactaaactgcttctggctttgtgaattttattgactgacatttaattcagatttctttgcaagtgtactaatttagactaattggggtaaggggaacaccttaatgaactttgacttatgtataattcagatatctttgtacttaaggcttacaagtttgaattatggaatactataagggttttttgtttatttgtatgtttttatatgaaagtacataaatgacagactacctccaagtaatcctgctttaattaatagcagtgatttgtaatcagtgtatcttttaagattctctacaggttttagaaaatattaaaaattccctgtaatttacatttgtgcataatcttggaaatgggttgaaaagcaaaggtaaactgcttcatcccatgttgtatatttgtggactgattgactacaagtgatgtgatgttataaatttgaagtctttgaaactttattaatg

SEQ ID NO: 16261 - DNA, 3406 bp, Homo sapiens
tgtttaattactccaggctctgacttctgcccacaattacagagcatgaaagcagaattggcctttagtaagtgaaaaggaagtggctcctgcagcatataattgttataatttcgtatttatggaaagagaaaaggacttcagtccactcatgttgttaagcacttgtccctcactccactggagcccccttcctatgttttgggcacagatggctgggaccgagaggaaagaggaagagcggctgccagagtgtgaatatacccctcagggatatacagcggagtttcatgataaactacccatactttcccaaaaaaggttgaggagcaatacataactttgcagattacaaacccttgttttactttttaaaccttttttccatactctgcttattggaaatcgatggctgtgatgtgaccaacacctgtgatgatagcaaagcccctcctttcacagtctcctgactgttcggggaacctccttggtcattggtagaaagctttagaaaagacttagctttttagggaagaactaaaaaatctccaaaacatactagtcccatgacttcgataactgaaaatgtcctgggtgtaaactaacccaggaatgtggatcatacatgttttttttaaaaaaaatccctgaatcaatattttcctacaacacaccctaaaattcctatttttgtaattaatggttggacagtgatcagccatttaaacataggctttctggaataaccagacactagaatagtttccaaagtgttttgcgtatcaaaatcctatatacttagaagaagaactcaggataagaaaaaatcgctaggtcccaaagggttcatgactatcatcagatgcaactgcgagtggcctacggtcattttttcaaatgagaagactggagagagagaacaacagtaatcacaaaacctctgttgcccttagtccatgacaatgtttaaggaaactttaaaaaattaagccatcttctgaattgttttctacaccaaatctaaaatattaaaatgaaattattaaatatttaaaatggggtatttagtggaaatgcaatcagtagaaaacattgctttttagtgcctgctaaacaagtaaaggagaaagaatgaagagaaaacagcagtccttcctgtgtgacactcgtgtggaaatgacaggcattcacatgtcattgagtgctaactcaaaagctaggtggcaatgctgtccaatgtttagagatcttttgaaatataattttaccaccattcagaggtaagtacttgcttaacagaagtctttaatgttagtgaatgaatgtataaaattataaactatgcattttcaaagagtagcatgtattttgtatcgaatccaagtaaatttttttcatagctacctaccacaactgcaaattattcaaaataaacttggatacatatccttatggggatatgggaagcccatctatattctcctacttgatgtttttaaagattgaaactttattctgaaacatcaggctctaaaaaattccatcattaagatgaataaatgggaaatggtttatttgttacttcgtaagcataaatgggaaatgttggctgttagaaaatgtgcccagttctttaaaggtggatgttctagtaacactggattaacaagcaaacaaaactgcatgaagtgaacgaatatttcattggataaagttagcataggttttatctgctgggtttaattctcaatcccagaaaaaaatattcttcaaggggtatcagttatagtttcaaagaacaaaatatgaaaatattgtccagcaaagcaaatcattgatcttttttcaaaattacttatattttggaaagtctatatagaatatccacaaatttcttcagccctcttgttgatttcatattttcatgaaactttttcccctaataatttgtcttcgctctttaatcagtgctttactacattactcagcctgaaaaaatatcttttccttcatctgacaatgtggaaataaagaactccatttctgtcattctggttctcttcagtgtccattgagaaagtttctcaactgtttgtaaaatacggggggaaaaaaacacgcatttctaaacctggtacttaaggttatactggattgtttgctacctaattagaagttattggggaaggggcattgtgtctttttatatgatttttagccaaatccagatgttctgatacacatttctgaatacctgtctgactgtaaatacagcctgtggaggttcaggttgataaacctttcacctgactgctccacagccatgctccttgccagcttctggcacattgtacatagatttgttgaatgtttaaatgatgttgtttttctaaatgctgttctctaaaacaattttttgaatttcttttgctttccattgttttggactttgtgtgttcgttttttaaaaaaaaaaatgtttcctaaatatttaacaccaggaaaaatatttttaaatacactggtgctaattgaaacagaaggaaattttcagatcgaagatgtacaatgttaaatgttcataccagttaaactgcactttcccaaggggacagctggcatctacttgaaatgggcatcaagagaccaccaaatgtttacagtttctgtggcccgtttaagtgtaaaatgcagaagtggctctgtccccccagagttaaggatttgctacactggtcctctggaagcatttaagtagaagaaaaggcttatagtcagaatcactttagtaatcgtcttctggtccttggacttttctgttctgtaatgcttgtaacaatgaatatggtgttgccaatctagtctgatatcattgttgacctgtacttactttgtggatggttctacctggggttgcactggcacaaacagagccagaacactggactttcaaaagaccattttgacttctacagtgtccacacacatgaatttaaatgcacttgtaactggttaattaccatgaagtaagtctaacttccacttaataaaagtttttgtgtatctgcttctattcggagaccaatttatttaattaaggataactataccaagaaagtctcgctggggcttggggttttacctagagttgtaaaaatagttcaaaaccaaggagatgtcttcatcatcaaggccatttttagaaacatgtggaaggcatgtgtcctcaggttcagccctgctaatgacaatttcaacccattcccttagcaatgattgtccaaatatgttagctgctgaccctgtgctgctgactgttgtcccaagcaagtaggcaatgtggcaaacagagggaaaataatacctattttgaagctaagccagcctggaattgtcatcctcaggc

SEQ ID NO: 16262 - DNA, 1213 bp, Homo sapiens
acactatttcatttgatctttgtaagaacccagtgtagaataggaatatttaaaatcaacattacccacctccaaggccaacccagagtagtcttgaacctgagtcagcctcagtattgcttgcaaggaagagggaaggggctcattaaaggcctggctcaaaccttagtcttccagactgactagggacgtaagaagacccagggacccaccatgttctcaaaccatctattcagtccaggcctttcagcatagacataaagagcccacccgttactcagtcatgttgccaagtgcaaactgatttatccccagatgaatccctttactgtagcagatccctaatccctaaatttcagccaatttggtagttaattataggagtttattagctaaatgtatgttctgagtaaaagttttgactctttggggaaaatttattttgctgctagcatacaacatttgctatgtatataaacttaagtcaatgccagaaattttaaaaccagctcaaatttataatctgtaatgatcaaatcaaaacatactgtaaactcagagttggaaacgcctggtaatatggttaagtcatgtttaaatatgaatgcaatttaaatgacattggcaatgcctgagatttctttcattgtgaatgattaaaaggcagtccaatatatgaatggatttcatcttacctttctcccgttaatttactaggtgtaacatcttgagtgtaaagtcattcacaggcagttgggttgtggagctagaaggagcctcaaaaaaaaactttttggccagactcctacatcatgaacagggtttttgatgaataatatttattattatgtttctaaagtaatacagtgttggagaatgaaacagtttagtcctttcctcttctgatggaaaagaatcatagcgccgttgccatgacaataacaggatgtagaaagacccatgaagaaagaaagaagaaagctatggttccgaaagcaggtaaccacagattttgaaaggaggcagagatggtgattaaactgtagtccttgttttttaaaatgttctttcatgttaggcaccaccacatagttaataactaccaacttctaaagagaagatccccttgatttatttatatcatgaaaatactaaaaatcaattctcaagtctaattaactattacattatcttgctaggtccttttccctaa

SEQ ID NO: 16263 - DNA, 2149 bp, Homo sapiens
ttattttgttatattttggaactaaatgaagtgccaaattaaccagacattcgtttgatgccatctctgtggaaccaagttctctgtgtgtgttcgtttggctgggaggagggggaggactgggcagactgctcccacagcaggctggcagtggaactggagccctggccaccgcagggagctcagaggccaatctacgcaaaaggcatgcaaaacaatggattctggtcccaaaatatttctaagtaaggcatgatgtagccttttgattttttttttatcctttgacaccccagccttcagaaaaggtttttcatctctctccaaagaagtcatttcatagtgactgacaggacattctccagagagcgacaaagcagagtggccagcaggcagtggtgttaagccttgggccttcccagcagatgtgtgctgcattggtgggtgggaggcagtgtgacagcctggagaaaacacacaggtagcaagggagtcaggggggaggtacaagagggctgtggacacctggctcttgctcatcttcttggtgctgatcagctggtggtcaccatccctaagtacctcccagggagctgccattttctcctctgggagcagctgcctgaagcaaggagagaatgacctgaagggaagtacctccggccaagagtgcagggctgctgtgcctagcctgagcgggccatctctagcagatatggacttctctccaccacactagctgaaaagttttctcccttggttggcaaaagccagtgtcaggaaaaaagctgtgggtttctgaccaagaatgtgtgcgcttagctgcaaagtgcctgtcagcagctccaggcaccaacaaggtgcccttttattagacaattcctgcccgaacataaccatattgcagatgaaaattttcaatagagaatgacacaattcttgacctttctaaaaacttttcaaagagatagtcacatgtgtatatgttgcaaaagatttttgaaactgaaatgtcctccattaaatctcaagagcactcgagttttaagtctgctgtttctggtgtcacactaagacacacttttgaaagcagccctgggttctgaattagttggcactgctgaatccatgttcccccttcatcagactccaaagtgcagcattcacttgcaaaggttgagagaaaagtggccagaattgtacatataacagagaataccttgagaatagtagcaaaatactgtaaataatattcatttcctcagggaaaaataaagggcatgcaaaaataggtctggagactcctgaaactaggaagaattttgttatcactaaagtcttttatagtcagaacaatttttttttcaaatgaacatggtatcatttcaagacaaatttatgtgaactgggcagtactgacatttgtgaggcataggggagtgccctgggaaaacggtttggagctgacctgtagcctaaggctaacatttgaaccacaggtgcaatgcctgggggtgggggagggggacggggtgggggtggtattcctagactcacgtaaggctttttctgaatgtaattgtgaatacaaagccttgctggtcctttttatcattacccaatggatgactgtttattagctatcagcagaattccgtaggcgaaagcaagccgtgaacgatgtacattttgctttaatagcatgttagcgaacaaacttccatggacttttgtggacaaggtgctgctttttctcatgaccctgtagaattgctatcgaccacatcttctgtagcactgacctgtgtgaactcagggaagaatttgtgcatacaaatgagtggaaacagagcaggattcatgaatatgaatgagaatgtgaatcattttggagaatgccctgggcacacgggtcaactggaaatttcatttctctaagaaagtagccctaccagcggcacggactgttcctgttcctcatacctgtggggattcctccatattggaactgtttcatgtatcttttttgcattgtaactagccaaacctgaagtcagtaaataaaatgagattagcactttttttaggtaccagttgtatcactgagtaatgcacaccaatagagcaagaaagtataaaatgtatttaa

SEQ ID NO: 16264 - DNA, 1240 bp, Homo sapiens
tttgagttattaaacattgccatgcatccacaagagctgtattgtggcctgtagagaaacatagcatagtaatcaagagtgcaggctttgggcccacagctctgacctgaggcaaattccctacctctctggccctcagtttcctaatttgtaaagtgtgtatatgtgtggaggtggcaatgactactttgtagggttataatttggattaaattagataaaatatataaaacatttagcatagtttctagcataaaacaagagctaaataaatgataatgattactatattatttaatattattgctgtggtgttttttatactcttgagctaaaaaattttgaagaatcacacagactgtaactcatgcccttgtaattggaccctatttttgaagaatgctggttacctttgtagtttggtaagtgcagcaatcagtgacttatttactgataagctctgctttcctcttgctcaggagctgatactaatgcaggcaatgtgttatgtttcccacgacacccttgaataaaatgccatttcctcaggaacagctagaaataccgatgctaatttttcctatgctcaggaaaagcaagagctctcctgctgcagtgggctggaaggagctctccagaaatattatgtcatcctaatttgcactgccaagggatgagctcatcggggcggggtctcatgaggctgcagctgtgccagttcctcacttgtatgatgtgcgtcctccaagctcgcctctccctcgttacccgctccatccaccccctgcctgcctgcgccaaacaagagccactgcatgatgaattatttaaaacccgaaggcgaactcttgcaaaatataaccaggcatcagaaggcacaaaaaaagcaaactgtgcgttttggttattttgtattatttttaaaaacgaaaaaaaaaaacaaaaacaaaaaccagttgcagaactgctgttgtcactgagaagagacttctgttgtttcttttgcatctccttctttgtctgagagcagaatctttcccctcttccacttaaaacaacaacttgatctatgactgaaccgatgctgggtctgagccgatcgtaagtctggccctgagccacatggctatagcaagggagaaatgtgtgcgatttcccacattcttttcattataatatgtattgtgagtatctttatttaatctcttgctattctacctggcagtataggttgtggtta

SEQ ID NO: 16265 - DNA, 1129 bp, Homo sapiens
aacttagctgcataattgccacagccctaccaaccaaaactgcagaatttctccctgtgcttgggaattccgtgaaatttctctatcttgactatctataaagcttaatatagccaacgataacattgcagaagtagggactgccatcaaaaatacaatgtgacatggctttaaaattccataggagcccaaaaagaagtaaaactatttagctcctgaattatgaatttggaaatttgaaatgtttatatcaaatatattgagacactgatacctatatttacagcgaaactaaggaaaaagaatgctgcaggaggttgtaggaatagaagaaatgggtgtcctcttaaagcacacagtttttattctaaacttaaacattttaaaagttgatcattcaaattgtaaatgtttttcttaattattgaccacagattttttaaagtacagtttttaatgcatacaagtgtcatttctgtttgttttgtattactttcattttctcatagcaatttactactacaagggaataagtaaaaatttaggtacttatgagctttgaggatcagtaaaaaataaagatatatctgtttgtcttctagtttaaaccacataattagctacttgaatgtttaatattggttagttcatgtgtgtctcctcattacttctggcctccccaatggtaaaagggatggtccattagttaagcacattattttgagcaaagatcacccgttccctggctctgtgcataaataaaagcgtatttgtgccagttgagtgcccttgtgaattgtgatgaagatgtcatgcactaatttgcagccagattagattatgacaaacttagcagggatgacacgattttttgaatggatatttgaaatttttcatgatttgaaagtccctgagccctttattttcatgaatgattatactctgcaacaagggagactatatttaatgatgtgattagcagtttgtgacatatttcattttgtgttctcatgtaattgagttattttcaaatagtaccttggggagatgaattaactattttagtgccctaggatttagtttaatgaagtacttctctcaatgttacttcaatgttctagaacagtgc

SEQ ID NO: 16266 - DNA, 1178 bp, Homo sapiens
catgaactacagagtgtggttaagaccagtattattagccaaaaagaaagttagattttatacattagctctcttctattaaacatgataatcagactgaaatattgaagagtttacttgaattttcttagttgtgggggataaaacaatgatgttttacattttaaaaaattagaggtattacacttttcaaatctttgtttttgtatacctgggaggcatttttttgtgtgtttgtgatgtttcttatttgcattattacagatgcattgattgtatattattttgtgaagttattttatttctatgttgcatttttcttattaaaattatacaatctttcagatgaacaggaaggacagtgtctgtaatctctcctcaccgccatctgcagtagtcgtacaaaggtgatgttttatgtgagtaagaatttctgtgtttcatttcacaggtggggagcattaagcgggaaatgaccttcacatttcagtcagaggacttaaaacgtgactgtggtaaaaaaatgtctcatcaacacgtgttttccttggccatggaggaagatgtgaaaacagcagacaccaaaaaagccagccggatccttgaccatgaaaaagaaaacactcgctccatctgtctccttgagcaaaaaagaaaagttgtttcctccaacattgatgttcctccagcaaggtaagggaacattaaatctcacatgtgtctgccccaggaagttggtggagagcatgcataatctctgccagtgtacagactctcttcagtatatagacatatgaaaggttttctgccaagaaattttttctattgcttgtgtgaaatagagcaggtggccttactcttcataactgactttgaggctgctgtagttggaactattgtagctctagaaaagaaatgttttattcaattttaataaatgaataataaagagcaaaggaataaatgcaaaaaattaggatgaaacatcatatagaggactgagcatacattaagtaggactgtagccacttcaaagcaagtgtacacagatctttggtcagaggttggtaaactatggctgcaggccaaattcagcccctgatctgtttttctgtggcctgtaacataagaatggttttactttttttttttttccaaatagagatagggtctggttc

SEQ ID NO: 16267 - DNA, 1824 bp, Homo sapiens
ataatagaatattagcagaaaggatagctaaagaaattcaggttatacctttgcaacgagacgacgaagattaattaaggcagcctcatagtcaatcccagttgcttttccccagatttggtgactcatcaatggatatgtgttttggatgtatgatatgcttggtttaaattctctttgtccaggtcaaaaatttggaacttgtttcttattttactatgtctaggtttgcaagaattgacataatgtttgtttcactgatttaaaaaattttgcatgtaagaatgtactttaggaaacatacccaggaagtacagttgataaatataacatcaactgaaatagtcaattagcaattttgtgtttctaaatatctatggtcccctgaaattttgacttagtatataggtgcagagacacccacttagaaagttaactgtttggaaaaacatttctctttagtttcaaaaaccatatataattaaatttgtaaggatatactgagtaccctaggccaacttttttttctttgcagagaaccttttttgttttattcttcagtgttcatatagcacctggcccattacatatctaggcaactaaaaacaaacattgtaagaatgaatatttttaatgtagtaattcctagttacaatagatacataaagtaatgaactcagcattctgtacttttgcttcaggtttgaagtaaaaattatctagttaaattttttttatttcacgttaccatgccatttcacattaccataccatcagatagcatggcttattgtgggcatttctgcagtgaatacattttccaaaacagttaaattgtctgtttggatttgctttaaagtcttgtgtaagagagaagaaactatttctataataaaaagcactctcatcagatatctgacataattagatacaatataacattttactaagttcagtattcatgttttaaaggtgtttatactgatttgattgtgctggcaaatatactgtattgttaatattgaactgtttatttttctcttagtcttcttatttaattaacttcattgccgctggattctgttcagcctttaaaaatatttcttagtggtcattgctctgcagaactcaaaaagaaaattgtacttgttcatagacatttttaaagggttaatttattgttcagccttatcccttggcacgtaaacagactactagacttattgtaggttcgtttgagctttgtgttgtaaaattaaaaatgcttctgtaaagttttcaaggtagggagtgattttattattgtgtatatctaatatattaagtatgtgtgatactaaggtttgactgctataattatttgtactgttgatcacatgtacttaaaacatctgatactgtattctaagacaggttgtttttgcaattaaatttattttaataagacgatcatgaataaaactttaaattgatatttttattattattaccattatcattattattatttttagattcagggtctcgctctgttgcccagggtctgtctctgactgtgctgtggtgcagtcatagctcactgtatccttaaattcctgggctcaagtgatcctcctctttcagtctcctgagtagctgggactataagttcatgccaccatgccctactaatgttttaattttatttttgtaaagatgggatcttcctatgttttccaggccccttggcctcccaaagtgctgggattacagatgtgagccaccgagccaggccatgatatttacattattaaagttaatagttcaaactacttttagaggctt

SEQ ID NO: 16268 - DNA, 1200 bp, Homo sapiens
agcctcaggatacagattactttttcagctggaagaatgttatatttatttctcagtaggagaaattagttgtctttgtgcttgcagatgggaaaaaaaagagtttgatttgtgaagcatgttgaactgaccagatctgtggtggccaactccaggggataaatttcctgtatatggagaatacctggagcattgctgggccctgacctattatatagtcacacacggtaacaacagatggttgccagaattctacaacagagagtttctaatgatcagtatttgtgaaaagcttactttttagaaactagtggtttagagccctcaaaattacattctactctatgtctctacttttgtgttttgacttaatgactttattgtgttatgtgaatttagtaagtccctaatagctttgcctgtcttattgtactgtcttaagttagctagaaatgttaataattatacatttgtttatacccaataacttcaaagggtcagaatggacaaaagaaataccagatcaatctaaagagtcattcaggacctatccatgtgctgcttataaataaagagtcgagttcatctaagcccgtggtttttcctgttcccccacctgatgacctcacacagccttcctcccagtccttgactccagtgactccacagaaatccagcatggcaactcaaaatctgcctgagcaacatgtctctgaaagaagccaggctctgcagcagacatcagctacagatatatcttcaggtgggttcagagcctttcttttgtaaattagagagggagaaatataaaaacaggttggctctcttatccaaagtgcttgtgaccagaaatgtcccaagcacttttgacattttggaatatttgcatatacataataacatatcttggggataggacccaagtctaaacacagtattcatttgtttcatacacaccttattcacatagcctgaatataattttatacaatagttttaatttttgcatgaaacaaaatattgactgtggcttgactgcagcctatcacaaggtcaggtgtggaattttccatttgtggcatatgtagatttcagcttttacctgaagtttacttggtaaggttcttttatctctcttagtaagtctaggataaattagtgaaatatgttccaactacctttaagaaaatatgttccaac

SEQ ID NO: 16269 - DNA, 2333 bp, Homo sapiens
gtctctgccaacaactcttttgtggaattctaatttataggaaacattttagtatgagcttcagtgtcacaaagaaaaccagatctctctctcttttttttttattttttttagtgatagagtctcactctgtcacccaggctggagggcagtggtacagtcttggctaattgcagcctccaactcctggactcaagtgatcctcccacctcagcctccagagtaagtaggaccacaggcatgcacaagcatgcctggctaatttttaaattttttttttttaagaaatagggtcttgctatgttgcccaggctggtctcaagctcctgccctaaagtaggcctcctgcctttgcctctcaaagtgctgggatttcaggcatgggtcatcaagcccagctgacccagagctctttactaacttatctgtctcttatttgcactcatggatattcacagtaagcattgtttgacatatattaaaacccatgaaatatgtctacttcaacctgtgtgaaaatatagttaacattgcaaactttagaatgtattaaaaattttaccttgccatagagactgaattagtcacagctctcagtgatgttagatggaaacttatatctcaaatgataggattgtgatgctttttttgtaacaagtgattctgcttaatattttgttattccagttcataaaaagtagattacgttttcctataaggataatttttgcagtgattatattgctaactctcattgcatgatacctttaataaaatgaacaatataagagttaagggcaatgggataaagctacttaatgtgtctcctccactgatcaaaaatattccatatagtcttggtgaggaattccccaggatataaatggctatttacactgtaatgaattataccatatatgatattcactcagtaatgttaataatgaactggctaataattgacaagatgcagtgcctgccagtttatgacattaacttggtttgaaactaacatatgacatagtaccagtgcagtcagagctgcccttaggcatgatgaacatgtggcccgtttttgcctggtgttttggcagcaaagcaggaagcaattttgtgtgggtcattgttctgtcaatttgtggaaaaaattacttcagtctcatataaatatagaatgggtccataaacccttcaactcatttccatggcaaaactcacttttctttttatacatgtccttcagtctcttaattttgtcaggtggagcttgatcttaattttaacctattatcttttatttttgtttgtttttggtgaaggataagagtggtgtttcttttgccctttctggtacaaacagagggacactaagcattaacttaataatcacatttaagacttgaacacatgctacccttttgtcatcttctgacataagtttacctgagtttccttgatttggaagatttgtttcttttatctctcttcctctggatgtagtttttttttgttttttttttgtttttggacggagtcttagtctgtcactgaggctggagtacagtggcacgatcttggctcactgcaacctccatctcccgggttcaaatgattctcctgcctcagcctcttgagtggctgggattacaggcacatgccaccacacccggctaatttttgtatttttagtagagatgggttttgcaatgttggccaggctggtctcaaactcctgacctcaagtgatctgcctgcctcggcctctcaaattgctggaattacagttgtgagccaccacacctggcttgaatgtagattttaataattgaatttattctgccgtgttgatagaataactgaatatcagtaaattgtgtaacagtggtggatactgttgcataagatgagctcctgaagagtgaagctaattctttggtcaatgttcttttcccctcagtgtctagtttaaggcttttagaagattgatctgtagcaattatttaatgaattgaatatttaaaaaattttttatttgctgtctttggtaattatctctctgcttgaaattaaatgcactataagttaatataacaagtaaaatacattgtcttttgaaaatagtttctttttaaaggaatactaattaattgtaacttgtaaaaccaaaagttctaatggtttttaaaaaccagtgttgagtggaaaagtgtttctttagtttggaaagacctgtgaagtatcctagtcagggaaagaacctgttttctggaagaatgtaagttgctatatgtggaggggcatgtaggacaggggttctaattactgtctgtgag

SEQ ID NO: 16270 - DNA, 1143 bp, Homo sapiens
tccagtaaatcattcctgtttgcttgaaaagtgtagtgtccaaaacagaatgtagttatttgattctgacctagagcaagaaaatcacctcctcatcaggataccatatttctgttattgcaacttgaagtcacctcattttagtggcagcagtctcactttaaatactgggtgtgatcagctaatgacttaatggggaatgtaagggatcattttagataaaaggccaagatgaaaaatggacatgtgaaaatagtttttttttttttttactacgacttgccacatattttcaagttgaatgtcttctgttaatttctctttattttgtttgccagtgaatatagaacctcttttttaaaaagtgtttttgaccatcagaggggagtatacctatttgtgtctgctgctctcctaccttcctcctactctgtcaatgtgatagtttgaagctgcgtatttgccttgttctagggcaagagtgctgacttcactaacttcgatcctcgtggcctccttcctgaatccttggattactggacctacccaggctcactgaccacccctcctcttctggaatgtgtgacctggattgtgctcaaggaacccatcagcgtcagcagcgagcaggtttgttttgtaatgacaggtctgtttacgggtggagcatttagtcaaggcagaagaccttggcctccagagtgagagagaactgagatttaatccttctcctgctacttcttgctatggaaatagtgcctttgatggtgcctagcaaataaacagcgttcagtaaatctttgttgttattaactataaacttagttcgtttagtctctaaaattgaatagtcattgtaaggattcaatgagaaagatgtctgtcacctaataaatgcctttttttttttttgccagttatgaggaaactaaggcttagaaaagtgagagttcatattcaaggttacgcaggtatcagtgagttaccagcctactactcactcacataagggctttctgctattttatttatatcagaatgcatttctgaatcctgacagatgagagtcatcccttggagaacatgtatctattaaaactcactccaggttgctttagaggcttagagcaggtattcttacat

SEQ ID NO: 16271 - DNA, 1152 bp, Homo sapiens
ttctcatgaggatgaactgaagtgaggttcacagtatacttagcatagtgcccaaccttaataaatgacaaaccctacaacctctttttagcacatctttttttttttttttttttttttttttttttttttttgagacagagtcttgctctgtcgcccaggctggagtgcagtggcgtgatcttggctcactacaagctccacctcccgggttcacgccattctcctgcctcagcctctcgagtagctgggactacaggcgcccgacaccacgcccggctaattttttgtatttttagtagagacagggtttcaccatgttagccaggatgatctcgatctcctgacctcgtgatccgcctgcttcggcctcccaaaatgctgggattacaggtgtgagccaccacgcccaacctttagcacatcttttgaaccaattcagtgttatttaatttcttcaagtgtctactactttcatgattgaagatagtttagcatttcatattaaagtacatttaatttcattacagtttgtgaaagagacagacaatgaagtaagaatgcgactattgcagttcgtcactggaacctgccgtttacctctaggaggatttgctgagctcatgggtaaatgtaatttcactgtaatttctctgtacgtaattttgtgataataatggcctttggacatacaatagacttgattgaacctaaagattactcttctgtgctgtaggtagggcttcatttagaagaaagaaaaatgagtggctaatatcaaagcacttgtaagacaaaaatgaatgtgtcctcatatagctgaggtggccattgctttgctccctatggtgactgtgaagggagcgacattctgtagagagagttttcttcccaatgatctaattcttattgctggatctctgcaacaattttcttcttcaggcagaagcagcttacattgtgaatttctttattttgtatcattcatatgactgtgcaacatgttctattatttaagcagttgtcagaagaaaaaagtttaaaggaccagataaactttgtcttattttcttggtgtaggaagtaatgggcctcaaaagttttgcattgaaaaagttggcaaagacacttggttaccaagaagccatacat

SEQ ID NO: 16272 - DNA, 1108 bp, Homo sapiens
gtttttgtttctgttcagttttaatcgcttggatctaccaccatataagagttatgaacaactaaaggaaaaacttctttttgcaatagaagagacagagggatttggacaagaatgaatgtggcttcttattttggaggagctcttgcatttaaataccccagccaagaaaaattgcacagatagtgtatataagctgttcattctgtacagtgaattttccgaacctctcaaagtatgttttccgttcttccacagaaatatgcaaaacagttcatccttttctactttatttattgttcccttgaaatgactgaccaggaaaaagatcatccttaaattttgaagcaagtgagagactttattaaaaatacatatatatctatataaacatatatgatagtggctctagttttatagagctccaagtgtattaaacatgacagccattcattcataaagatctggatttgctttaccttgttaatattatctaggggaaaaagtgcaaattgctccatgttcttctctcccttatgtaacatctcctgagggtgtttagttgcatggctgttcagaaaggtattaagggcttaggccaaatcttactttgagtatgttaaaaaaaaaaaaatgctgctggcttttctgaagacaggtgcttgaacttgtcagtttgttttaaataaatacaatagttgaaaatttttctctgttacatcagtaatattgttaaagtaatggatagaaccataacttacacatgaaagtcatatactagatccaatactatttagtttattatcgaaattggaaggattcattgagcagcatagaagtttgtttacatgttactttgagatgctaggtatttgtggaattaaaaagaatcaggctcttttgtactttgtttttaaatctgtgatgcttttcaaatttaattcataataaattgatgcaatttcatacttaggaacatacaaaaggtaatgtaaactctgccacttttttgtgttcaaaattttggtttttatgaagccagatggattgaagagttacataagcatttgaatgctctaatataaggctaatgattttctgttagtgt

SEQ ID NO: 16273 - DNA, 1149 bp, Homo sapiens
gaaatatggtcccccactcaccttctccccttcttcccttcccattcctgttctgtgctggactaaccgaaagaaattaggagtgcaagactctctgtgcccaaaacacagttcatgaggaaacagacaagagggaggctcagagacaggtttatattgctacttcattttggtgactcccccacccccaccaccagtaaatggcccagggaatagctcacaggcccaatacaattctgtctgttagatcagttaagcaacacaattctatctgttagatcagtttagttgtttgtcttccagggaaagcagcttaccagtgttttttttgtttgtttgtcccgccccccccatgtacttcccaagtagttgaaaatgaaaaggttaacaaaaccttttcccctgatgacttctgttaactacctagctcttcctaccctgacaactaaataggatggtatgtgtcaactgtatttattgccatgcagctttgcttttggtaaatatgaccctgactggtaagttgcatctggactgggaaatctccagatacacgacagaaagccacagctttgggcatacctgagtggaaaactcttgtaactgtatgtcctttaaggaggaccgtgagctgtcacctggggagataccatttcatagattgctgttagaagaccgtcttctgagaggaggttcaaaattgtcctgctggtgagctgtgtggttcctgtcctatagccttctgagtagactggtgccaaatacagcctattgtagacttattaagtctgaatgtttggttgaacctaagatgatgtggtggatgttgcagaagtaaaaatcttcctctgttgaaataatacacaactaaaagttctcctgtaacactcagttggccttaaaagccaagctttaggtcaactgaggatttgatctaagtccaaaagtgacatctcctatattccaaaatttctctcctcaattctcaaccaagaacaaaatcagagataatagtagttgtatttactggtattcatggtaaatcctttacataaattattctcttgatccttacaattccatgaaattggtggggttgtctttaatgatgcttattttatacatgaggaaagtgagtatgagagaagc

SEQ ID NO: 16274 - DNA, 1427 bp, Homo sapiens
caggaaaattcagttgctaataaagtcacttttattttgtttttcacaaggctccaaaagaagcacttgctcagtgtgtcttggcagagattccccagcaggtggtgggctacttcaatacatacaaactccttcctcccaagaacccagccacgaaacaacagaagcagtgaccacttcaacagaattcttttgtgttatgtggagcaatgccatctctcaccccaaatcgtgtatctgtcattctacgtactttttacccccagcatttatgatgtaaatctctttctctatggattatatctgtttaaagcattctttctaggttattttggggggacagtgccaagtccatctttgcccagtcaattcagtgattgatagcaatttacattaattgcagtaaagctctttggattagaaattagtgtggggaaagcttattctgttgttgtttttgtttactttcatatgatgaaaatgctgtgtttaagtgtttgtcaataggaagaatggaaaactgttgggatgatgtggtttgcaggttgctgtgcctgattcacagtgtatgttgtataagccaatgtccatacctgattatgagagcttcttaaattatatgatatcaaatttgttcctgtaactctgtatacagtgcttttctgcaaggtaaaaataacctgtctatgcatctgatttttgctacagtttagacactgtggtttacaaaacagcatgcactcaacttgggactttatgaaaagtactgaatgagcaggaaaaggcacatactcagttttttaaatgtacaatcaacaagtaaaaataacctcatgtaagtaagccatttttatttgcctttctagatattttattttattgtggaaaactgtaaacatggtcagatttggctttttttttcattaactgagcaagactttcaggatattgtagatgcacagatggtaggttgtcctgaattctacattattagattactttaattgagatttgttaaaacggttaggactgttttgtccaggaaagataagaggaccaaacatataaggtgaaattcagaattccgtttccttctaactaatgaaaaactgcttactaaaaaaaaattttatactttccttgctaaggtcccatatattgatttgtacagatccacttagtcattttctcctttttttaagaaccattttcatctgatttttaaactcacgataccagttatctgttaatcaaaattgcattttacaatttaataatgtgatatttcctatgtctacagcataccttattaggtataaaacctactgcaacttagaaaaaggaaagaaaaaagaaaacttttccaactgctgcattaagatagggtggattttatgtgctttttttttttaagagttgaatttctt

SEQ ID NO: 16275 - DNA, 1417 bp, Homo sapiens
tatttttcctataaactgtcatatctgcctggatgacatatctgtttacctgtaaccaattatactttgtccagaagttacttttccttcatcaaaaggttttgtttgtttcctgcatgcctgacactgttgtcaattgtagaaatcacagtattcctttcatttcatccagccttgttaaagttttgggaggagtttgaatttacactgtgtttccagtccctaaaagatctttcacatatatcatgcagtttcctaccataagcgctaataactttaattaatctgccagtgttctttctccaactaaggccagtttagtgacaatgtaatgcatttcctcattgaacctgactatagttcaatacatactttttttaaaaattgatgaatgttgtttgcttgtttgtttgtttgtttcctcagtgcaaaacctccttatctctttcagctaaaggtggggagatttctatctaatagtaatatttgaaggcaatcaggattttgcatcagaagagaaagccattaagaatggatttttgggccgggcgctgtggctcacgcctgtaatcccagcactttgggaggcggaggcgggcagatcaagaggtcaggagatagagatggtgaaaccctgtctctactaaaaatacataaaattagccgggcgtggtggcgggcgcctgtagtcccagctactcagaaggctgaggcaggagaatggcgtgaacccgggaggcagagcttgcagtgagccgagatctcgccgctgcactccatcctgggcaacagagtgagactccgtctcgaaaaaaaaaaaacaatggatttttgtaagttaggttcaacatttttttggtcttataaaaagacttgttaagtcagaacgagaggagtaagggcctctcccattcaaatttcacctcttggcgaaagatgctctgttttttggcccttctcaagagaagtccttgtagaggtagtgactttgacaactagtttctactaagctatagaaacccacaggcttaatccataatacattccccacccttcatcctgctcttctgcaaatcattcgtcaacatgtattgttgcttattattcactaagatcttatttgtgatgtagtgaaaatatagatacaacaaaatgacaggtaaattaaattggagagcagaaacatacacacatatacagaatcgcaaatacacagccacactgcaactatcaccatgaatcatgaacactgctaccatcaccaacaaccagtaatcctaaattggagtaatgaaagggaataaatctagaaagatatctcatttccaaaactgtgtgaaagtgattagatgttttaaaataataggtttgttttaattaatatagctactacactgactctcataattagttgata

SEQ ID NO: 16276 - DNA, 1391 bp, Homo sapiens
attctacaacaagaggaccctaacattttctggaggtggaatcaatgttgtatgattctaatgagatacgtgattgtcaagagcctagtgtgctatctaaggtctagcagtcacttcactagtgggcagagacaagttctaattgtattacagcacaaacaaaactgactagtttttaaattgcacaattttttttttttaaagcaagaatcattttctgggtatgtaagtgtaaatgtagatgcaaatttggctgcacctctttatcatgcctgtattggcctataggtctgcactttagtgttttttaattgttttatttctgtgtatttacgaacagagaaataacccaaatattatttctgcttagtgtctttatttataaagcccatgagtagtttgtatgcatctttcctacttgtaaagatgagtaaaagtatgcagttttaaatttataatattattggatgttctttgctttggtagtctttccagaaaggataaacagtggtttttgttttgttttgttttattgtttaagtgggaccacttagcttcccgtttccttactagttaaagaacagacattaattttcagttgaatgtatttttgcaggcatcatattgttacagggccatttacacctattcacaaagcttaaatcctaccttgtgggactgaagtgctcttaatataactgtttattttcactgtgtaatatgcaaagcaaaagggaaattatttggtggatggtagctcaaaattggaactcttgttctaattcagttacattggctttaccctccttagatttttcatcaaagggctgtcccattgcaatcttactaaaacattttgttaaaataaactcttttcctttttatattaataattaggcttttaaataaagatgttattcctttaaaatggtgggcttaccatcattgaagatgtcactcaggtggccttgtttgatcaaaacgccttttttaaaaaccaagctttaaaaacatgtttataatttcatgaagtacatatatattgttcccatagtcttcagctttaaaactataaatatgcccaaattttgttatttgccctactttaagtaggtttattgtgtttgttttttcagtacttgtttttctctgataagactcaggaattctgaaatgtgaaattgtctcaattctttctcttgtagcatgaatcaaatgtatttattaatagcacttatgactatagaatataatttggcatatgattcatattacatatgtattcgttttatttttaaaatagtttataaacttaatgatttttttttacaaatgaggttatagatattaatgcaaattttctggtaggtatctctttttttgctatgatg

SEQ ID NO: 16277 - DNA, 1178 bp, Homo sapiens
ggaggttgcagtgaggccagatcgcaccactccactccactctgggcgacagagcaagactctgatccagacaaagcaaaacagatatttagagacagagtagcatattgaattatcagcaccagaatgccattctagggttatctggcttcaaagctcagcgaccacactgctaattaagaatgcttatgaagaatgtttaatgatatgaggaagacttacaaaactgtttttacaaagttatcaatgtgtggattttatttacatgaaagaaaaaatagtcacaaatgttacctttcaatggtagtataatagaatattaaaatttacttttatttcattctaaattttctacattctgcatgtattctctttataatcattttgtaaactcagaatactgttgtaaagatgtcagctccttcccgaggaaataccactagttagacttaatacacacatttttttatgttgaattgaaattttacttggtaatgaatcattccctttaatctactcttctagattactgatctctcattacccaactatctgatggcatcttcggttggactgcttcctacccagcttctgaattcttacttgggtaccaccctgcggacaatggaagatgtcattgcagaacagagtgttagtggatattttgttttttgtttacaggtgagtttaaggccaagggttgtctctttttttctctctgtttctttttgtatggcattgctgatttgacagatttcattgaaaataatcagagggtttttccattttagatttttttcttggttctttcattactactacatattttgacaacattaaaattttttaattgtgtggatatatgcaagtgtagaactgaattgatacagaaaaatcctcttaaagaggcaaaaaagaatgacaaaaatagggttatttttgcagtgattattttcagagtcatcacaaatcaaatactgtattttgattttgtgtgaagtgtatctgaaaataatttcagtaagattgggcagagttgagtgcttatcttatttatattcaaattattgaaactcacctatttgtattttttagtgttatgttgagagtgtaaatttctttctagtacaatttgatgtgaaacaaaagatttgttttaaaaagtattacctcgtaaa

SEQ ID NO: 16278 - DNA, 1167 bp, Homo sapiens
cctgcccgtcgcccggctctcccctcgttgcagcctcgctctccctagagctccttctcccctcccagtggtttccctccgcagctgtgggcctccgctggcccacgcggacgccccgcgacccccgcagcctggcgggcagcgcgtcacgggagcggaccagaacacagcccgctccgccccatcgcccgcggccccgccccctctggccgacaaggggcgggcaccaccggagtgggctccgtgggtgctggggcaggagtttcctcactccccgcctggccgtcgctcctccgctgactccgcgcccttctacgggccgtctcccaccctctgagcggacgcagggagtcgatgccgggcgaaccgggcgccatgaagggcagctgcctaacgggcgccgcggcggaggggctggccggctgagggcccgcgctgggccgaggcatgcggagcccgggcgggatcctgctccaggcgctgccccggctgctgcagcacgccgccctcccgggcctcgccgagctgccggcccgctgggccctgccgcggggtgcgggcggggacggcccggcggaccgccttccccgcgggggcggggcgagcgcggcggcggcagcagcggcggcctcgggcgccctgctcggcgcctatctggagcgccacggtccgcccgaggcttcggagctgccggagccgggcggggccttggcgggcggccccgggagtggcggcggcggcgtggtggtcggcgtggctgaggtgagaaactggcgctgctgctgcctcggcagcacctgttggtgccggagcctcgtgctggtctgcgtgttggccgccctgtgcttcgcttccctggccctggtccgccgctaccttcaccacctcctgctgtgggtggagagccttgactcgctgctgggggtcctgctcttcgtcgtgggcttcatcgtggtctctttcccctgcggctggggctacatcgtgctcaacgtggccgctggctacctgtacggcttcgtgctgggcatgggtctgatgatggtgggcgtcctcatcggcaccttcatcgcccatgtggtctgcaagcggctcctcaccgcctgggtggccgccaggatccagagcagcgagaagctgagcgcggttattcgcgtagtggaggga

SEQ ID NO: 16279 - DNA, 1989 bp, Homo sapiens
gtgcttttttgtttacttcataacatttatagttactacaagtagcagtatggtctatcagttgcagtcaacagatacacctactcttataaggactttgtgtattcggtctgggggtatatttcataacaatcacatgtaagctgatacaagttccctaagcagatattttttaaagtttctaatattttgtttttatattgctttttattttaggttggcaccccagattttgcaaggcgatttcgagcaacctatgtttcttgggcaattgcttatctcctaggattgatctgccttatccgagcttgttattggggagccataagagtcagttatccagaacacagttttgcataagcttgtttatgattcagtaatgcaggtgagagtgtctagcagttcttggtaagctactctggacatctttaaattatttatcctaatggattccattctggtttatgtataatcgtttcaagactttgggagtcttttatgaacaaatgctcattgcactatattatatgcaaattgttttgctgctaggttttcaaaatttgaataataaagccttttcatgttcttttacatctcttatagatatttttggatttgttaccaaacattacatttactctcacccttttattatttttaaataagttatttcattacttgctgatacatgagtattcctaagtgtttataaatatttctataatagtttcacatttatatttacattttaattaaacagtatcaaaattgcttgcttaaaacctaagcaatatgcattttgcttgaactgcttactgtaactttaacctaagattatagtgaccttattcaggaaaaaaaaaaaaatttagtgtaacttcaaagacttgacattcttgtcagaggaaaaaaaatttctagatactgtttgcttgttttttgttgtttgtagaaagataaaatattttggtagtaatttaaaatacaagaacgaatatttatttgtccacagttggagatgttggataaatgtcttttctcaaagatcacaggacttttgtctttcatttttgcctttttatttaccatttataaaagatctggtctggattatggaatttaatgtttatcagctctatgtattcctttatagaggcttgaggaagtatttcacataacatgttttataatacttaaccatttatccaaagatatatttacattgggttgtgcccctttcccttagatcatggtaaatttttcttattgaggtaattatgtactacttatatttgaaggaagcttatgacattttacagtagctaaaatgttgagattagaggtacttttactattcttctcaaaggtaactgatcagataattacccaaattattcaagaaaatagatcagaaataaagaacaacataattttctaagaattcattgaaatttatggaatcagctctcgcactgcccatctttgcagttttgaaaaagaaattgcttaatcacaaatgttctacagtctttaaatgtagtagaattagacagtgagatcatctgagtaaattgattggtgattccagagataagactaatattttaaattatttatgatactgattagtataaaaacgtactcatcacagaatttgaagcaaaatacatgtacacttcaaagagtaaatgacaaatgtataaatgctgtagctcaggattatatgtacctttaaaaatacactaataaagattattgttcaaaaattaccttgttttattccattaaaaataatgtcacttccagagttgccttgaaatcttgctgtaaagttttcatgtttaggaatgtacctgtttctttatataatattcatttatgttttttgtactattttcaaatggttttatttttaaaatatagtttttaaatccatttgtaatacacttgatgttaggtataaaataatcttacttcttttcctaatgg

SEQ ID NO: 16280 - DNA, 1214 bp, Homo sapiens
ctttctttctccctcccctcccctcccccagccatgcctcccagcgcgcttcccttcccccgcctcctggtcctgcaccctcccctcccctccccccgcttcctgccttgtgacacatcccgggccctcccggaggcggcagcagcagcagctgcagcggcagcagcggcagcagaggcagcagcagtagccaccactccgccgaggccgcaaccccggctcggcctccccaggccccgccgctgccgcagtcatggctgctgatggggtggacgaacgctcgcctctgctgtcagcatcccactccggaaatgtcactcccaccgccccaccgtacttgcaagaaagcagccccagaggtaaggccagcgtagatccctctactttgcaaggaagtagatttgcaaggaaacgcccagaaggataaagacctgggagctctagcttggaggtggaggtgagcctctcgcttgggctgaggaaggatgctgactgtgccttcccaggcaagcccgcctgcctgatagcttctccgcagggtttttctggtggtggtggtgatggtggtggtggtggtggtggtgatggtggtggtggtggtggtggtgatggtgtgtgtgtgtatttcaccacttcttacccagggctacagtatgtgacatgaatttcccaagctctgcttagctgttttcagaacagcccctaagcgcagctaggaggtggtgcaaatctttcacaatcattcacaaatctttttccgttgctgagaaaccaggagtattgctcaccttggcatctgtccttgaaagggctttagcttgaacaatatgcttctgctaccattcacccaacagtgctctgttcactcagtgaattgccatatccaaaatgaatacagttaatcaatattcctaatatgtctgaaattcctgcccctcctttttactcctactttcaaggagtatgtgttagatttaattgtgaatgagaaggaaggaccttacttctcatagaagggaagatgggatatttttaacacatatctgggtgagattgaaattaacttgtaaaaagtaacccaaattaataatacatatatttctatttttttctcaagaagaataaaaaaagattaaatgcaatgggatctggagaaatatggaatctatttaccatactattcgatttatttaaaaatcgatcgttgttctaag

SEQ ID NO: 16281 - DNA, 1188 bp, Homo sapiens
gaatctggaagccgccgcgactgggggaagggcgcgtggcgggtcgattctggggaatctcaaggcgtgacttatctggatcaccctagacttcccctagtagcaagtggcctcttctctcttcacctaccccggcggccctttaattccccaaccttcagaggcttccccttctgaggcctgcggcgtgccccctaccccgcgccgccgccggggtgcaggtgtctgaaaatacctagaagccgccgtcttggtccgctcccaaacccacgatgcctcccttttctatacctgccccagttaccgatacttgtccctaatgggtgtattttgaatggacccgcctcagtttaggaggttcagaaaggataccggaaagatttaaaactggctacagtcaggtttttttccttctcttatctcgccaaacaaccgaaacatattcaagattttgttaatgaagttttttttttttttggtctcagctttatctgggatcttctctctctgtagctgcctgttacgtgatgactctttcttccataattactttttctgtacccttcgcccgttaccatccccttattggttcctgtttctcatctccttttactcctgcgtgtctgacttaatgattttaatggcttttcagccaaaattcagggcatgaagaatgctgttcccaagaatgacaagaagaggaggaagcaactcaccgaagatgtggccaagttggaaaaagaaatggaacagaaacatagagaggaactggagcaattgaagctgactactaaggagaataaggtatgtgaaataaatgtttgtcgttgcctacaccatttgaaaacagctgtccacttctgttaaatgttaaactgcttttttttttttttttgagacggtgtctcgctttgcaaaacacgctcaatcttggctcactgcaagctccgcctcccgggttcaggccattctcctgcctcagcctcccgagtagctggtactacgggcgcccgccactacgcccggctaattttttgtatttttagtagagacagggtttcaccatgttagccaagacggtgtcgatctcctgaccttgtgatccacccgcctcggcctcccaaagtgctgggattacaggcgtgagccaccgtgcccggccctgttaaactgtttattatctaaaat

SEQ ID NO: 16282 - DNA, 1166 bp, Homo sapiens
tgtaaatttagtgattaggtcttttatttctcagggctgatgtgaaaagccttttccttggttagaactgatacttatgcaagtaatgtaagtgcttccaaaataacaagtggaggcactgtttgacgctatctctggggaaggaatttcaattcatctgtacttttactcgaattctcttcgtatatttcccagagtcttacagtaaacctgattatacaggaactacattttttttgtctttcatggtattcctttggatgcaggtttgggcttcaaaacacatgtcaagatagtgaatatggtggcaatttttggggtcaacgcttggggtagagtgaggtaggtttgttatatagggagggtatctgggcctccaacagaagaagaaaagcagaaatggactgctttgttcttggatggaaatgtggtagaaagttggggtgaattaagtttggacctgggagttagattagattctggaggataatggtagagaaggagaatgttcataacttgggcatttttgtcaggaattgtgggaactataaaagggattttgtaacatgagttacaaaaattattaagtgctgtattctgacctaatctctacagaagaatttcagaagtactgtgaagatattgtaaacacagctgcatggggaggtcagcttgaggtaagtttgtagttattcatagtgattgtgggttgttaaattatttctaaatcccttctgtagtttttagatgtttctcagctgatcccaatttctctttgaagattccttttctttatatatttgctcttctcaactgacaaagaaatagggagttaacatgattaggtctgtgattaaagtatgtatgttgagggattgaaacactattacattttaaatagctcagtgttagatctgtgtgttagaaatacatatgtgtaagtcttttcatcgtgatagtagtattggcaatacatttgattttctggacttaggaaaatgaaaattttactgaagtaaagtaaaatttagcctagtagctcagctgatcaaagtcactattggaaaaatatcttttttacatcagaaatggaaaaaaaaaattatgtgaaattataggccaaatcctaccacaacatatatattaaaatcgtattttgaattcct

SEQ ID NO: 16283 - DNA, 1301 bp, Homo sapiens
tgctttccttgaaggaacaagcattttgtggcctttaccttgtgcaattttagggagtagcagtgtaaaaggtccaagaccacatttacttgaaattcttcctcttttctgatttgtcttaccagatatttcccttcttgcctcattctctaggatttgaataaaacctttgccacttattttattagccttattaatgtcacctttccttcaactcaaatatttgagaaattttatgttacatatatgaatgaagttgaaagctactgtttggaagctaagacttgtatagagtagttttgtatatgaatggttgttctagctcagatttcaggttactcacaacagtattctttctaagaggatatatacaaatgtctctcataatttatgtaaggaaatattatgaaaatgagacttttttagtttgatgtgtgtttcccaaactagagataaaactagtaagatttagtatcgtttataacatttgaatttttgctccatgagtacaactaatttttataagtaaatattgggtttatatgaaaaatggggtgtcagtcttttcacacgcccagcaggtaacaatgtgggaagctggcagggtcattgatagcaagtaagtacttcctgaaggctttccagttcaaaagattacaagccattctgcctgccaaacaaattatattctgaagatgcctgttttgtaacccttgatgtgaattttttggtgtctgaaatttacaaaagaatgaaattgaaattgtaaaacactaaatgctttgggtttattttgaagtaatctgttactttaaaatgtcaacattaggaagccataaaacaagatattatgaaacccagtattataaatgttatctacatctaaagtattttaaaataacttattggcagctttattctttttttccttacaagatttagaatctttttggttatatgtctatttttcaattttgttatatttttaatttaagtggccaatgtggttatgaacaagatttgtatggtcagcttctgttctttcctaaaacttcagataaatatcattttagctataacctaaaaaagtgtttaaataaaatgacagatgttaatttaaaagcagcatatgctaatttactttttcatatgatgatggtctaatggaagttacatatgctttcttttgtcctaactctgaaaagtatatgtcagagttctggaatatgtctttagccaagaattttattcacttaaatttgtttacaacttgtataaagcaaaaaagaatgtgtgtaact

SEQ ID NO: 16284 - DNA, 1133 bp, Homo sapiens
tgctcccagaatcctttgacctcactctgctttctagtctgcttgtgacactggacagtcctttcttacagagctattatatgttctaggctacgaagggttaaataatcccaaaaatgaggtatgtcatacccacacgtctttatctctagaagctgtgatgtatgtgaaacagcactgttattcttaacactagtgtgtaaaataaggattagtacagtacgtctcattactttttaattcagggcaccctgagtgaaaacaaatacaaaaaaaaatccctaactctgagctctatctctgattcctcttcctccttcccctcttcctcctcttcctctcctcctgttttgctacattctcctcagtggcaaaaagtttcactctacctctgacagcatgtatattgcaccagtagctaacaaaaactggtctagtcaaaccaaatgggcacaaaagaaccaggataccaaaagttaagctcatacagctgcaaaccatatcacttcttggtaacaatgcagacctcataaacctaaagaagagaaagaaaagaaaacttttgttactttccttttttgcttgtcacttatatacaggctatgtgagaatataatttgtaggtataacacattaagaaaaagttatcttcattggatagaattgaatggtggtcgctgataggaatagggcgtcctctagctcttatctctgtctcttactcttttctctttctctttttctctgtcatgagactgtgtgtgacagggccacctgtcttttttttttcttaaattttttttttttttatgtgtaggtgcatgtcttggggatttaaaaatttcaaggctggtttacttatgcaaagcatgcctacgtctggaatacttagggaaagaaagcgactccatgttgtccgaattcctcaagggacagaaaaaaaattggagactgttgaaatgcagatttgaagtaatttttttaaaatattattttgggttctgcgacattgtgaaaaattaaagttgttgtgcaatacttaattcagacatgtaccacaagttaatggtagactaacactggggggtggggtctaggcatcatgcttttgtcagcatactcttgagctttta

SEQ ID NO: 16285 - DNA, 1320 bp, Homo sapiens
acagaaacttactgcctgccagccaagagcctttggtctctcattttgtaagagaataaagcttttccccccttgaacattctattgtctcatgaattctgatgagaatggattcctttccaaatataaaatcagacaaatgtgaaagcatctagaacagtctctggtccaaaggagatgaaccacagtacgtgttgtttcttttgtatagatgattcgtcaatctcactgctaactccaaacaacttaatttcaaagaaggaactcccgacactgacatggtaataaaacaggtagccattctttagttacttggcaatttcttgctgatttcctagccaagacctgtagggaaacaggtgctagaggagtatggtaaaccagcctctttcccctgtgactgctgattttggcaaaggccacagtaaatcagtaaccatcagggtgagggcatctcagacccacatgcaggtttattttaagcttcttggctggcaccactgagactgctggatcatctccatgttgtcaaagctaacctccaatacccctaagggtcttatcacctgcccccaagaacatcaggccaatctgatcaagcattgctcattttcaaatccatcctagggcaaatggatgactaaatgttaaggttcatattcaggaaatgtcattgcatttttgtttatcacagaaagcatttgtgtaaacaggtgattttgcacattgctttcttagtaccatactatttttgaagccccttcctctctccttccctaccttctcgacaacgttcctgggttgtttcagtgctgctttccaacactttccaatgttgaagtatcaacaagtgctctggtggctaaaacagtctggggtcaacgcagtaaacccaaggacctgttctggccctggccagttggccatgtgataacaaacagcacttttgaagcaagcccagtgggtggctaaatggagctccatctagaaacaggaacaaagccaggccagaggagaatcaaggttgagatactaaagaatctcctccagttgtaccagcagttggtacctctgcagaagggtagtttatttataatatacctctcactgaaccatacaactttacaaccagaggacaaaacttatacctgtaaatgagattatttcaaagctatcactttaggaaggctttattctgatttcaaaaacaccttggcattcaatacttatgtcaaaattcttttgactatatttagtggtggcaaataccagtttttttgagagtgggtgttatttttagaaatatccaggtcattcaga

SEQ ID NO: 16286 - DNA, 1161 bp, Homo sapiens
gatagggaagggagaagatcaagctgttttctattaagcctcatccactcaaagtaaatatggtccaatcggtaaatcagataacatgtagcaagttgtgcaatttggttatatttgtctaggaattgaagttttagtcatgtgtttcaagcttattttagaattaaactctgttccttgtacaatgtggacacttaataaatggtgaatgattagccaaacgcaagcaattgaggcttttatagctgtccaagttctgcagaagtcattgtttagaagaaaatttgtcaggggacattgtctgcaggcactcagaatagtccagcatttggcatagcgacgtaggctttcctacaatacagcttctaacaaaactaggctgtcctgaacccctggtaatagaattgttcacctttataccaagaaggttgggaaagcaccaaaatctgcatgtggtgtgtacccaggccgacttcgaggggttcgtgctgtaagacctaaagttcttatgagattgtccaaaacaaagaaacatgtcagcagggcctatggtggttccatgtgtgctaaacgtgttcgtgacagggtcaagcgtgctttccttatcaaggagcagaaaatcgttgtgaaagtattgaaggcataagcacagagtcggaaagctaaataaatacgaaacttttttgagtaataaaaatgaaaaaaaaggagaaaatttgccaagaagaaagagtcctttaaatggcaacaaattcacctgtaccccacctgtgaagacctctaggatccgaggtccctgttgttgctgtttcttctctcttctgaggtcataccctcctctttcttaaacggtactttcctttgaagtgaaaaagaactgggaaaggagtcctgagagaaaagggctgagcatgaacactacaaccttacataacagacatttttatctcacgacttaaacctaatactgttttccctttagtggctatatttatttttgagagcacagtatttaaaaatggcatgccgtgctgaattgctctccaccagtccagtccgccatgggactttgtgatatcatcggagtggttggctatgtttatgtttgatggccacgggctaatgaagcagtgcagtgtcttttatggatagacagtggga

SEQ ID NO: 16287 - DNA, 1172 bp, Homo sapiens
ttagattttaattaattagttaattttttttttttagatggagtctcactctgttgcccaggctggaatgcagtggtacaatcttggctcactgcaacctccgcctcctgagttcaagcgattctcctgcctcaatctcccaagtagctgggataacaggcacttgctaccacgccaggctaatttttatatttttagtagagacagtgtttcaccatgttggccaggctggtctcaaactcctgacctcaagtaattcacccgcctcggcctcccaaagtgttgggattacaggcatgagccaccatgcccagcagatattaatttatttttaaatatctagttctagtttatatatataaccagtatgtcctgttttaaattagaatcttttatgtaaaaatacagaaaatacagaaaattaggtttgagttctgatttaaatatatatttgtttcttttagggtgttgcaattaataacacctttctcccgtcacaaaatgatcttagaatatgcagtttaaatctgcctagtgaagaaagtactagagaaatcaataacagagataattgcagtggaaaatattgttttgaagcacctacactggcaacattagatccacctcatacaggtaagactgctttttattgataaggtttatgcttgaccaatagtattacagtattctttaaatgatgttttaagaatgaatatgttatattagaaaattgttgatgtaataccactacattgttggtagttcaggttttttgttgtcataatttatctttagtgattggattaataactgtgtgattaaagtgctttatagtagatgtatgcttaagactgttgattataaacttggtcaaatgtgatcttttcctcaagaaccaagattgtgtttaaagataggatttatacattttttttctaaaaagcatgttaataggactaaaattggagagttgaacttgaaagtagttacttgttaattcattagagtctggagtacttcaaatcagagttgaattattatgatacatacttgcatgaaaaccaagcatttaacaaatgctccatccctctattgttgaactgagttaaaataatgattatggttctttttgtatatgtaagagaacactatttgttaggtaactaaaaaaa

SEQ ID NO: 16288 - DNA, 1224 bp, Homo sapiens
taaccggatgagggggagataaaactgaaacaagttggtcattgaggaaatatgggggtaacattttaaataaatttttgttaaagtgagttttattttgctgttatgtatgtttgtacttacatttttctgttattttaaatcctttcccccacaccttaccatgtgttagaatttgccaataactagattgcttcaccaatggactctgctcaactaactgctaacctgagaacaataagattttttagactcattgaattcaagcaaatgtttaactgtataatagaaaattaaatgttttaagcatgcagtaaaaatgttcttttcataacatttcttcctgaacagtttttgtgactataaataaatattaaaaaatctacgtacacacacattatacttttttaacaggttattgagccacatgatatatcagtggcactcaacacccgaaaattgtggagcatgcaccttcatgttcaagcaaagttgctccaagaaatagttcgctctttctctggcacaacctgccagcccattcaacatatgttacggcgtatttgtgttcaattgtgtgaccttgcctcaccaactgcacttctgattatgagaactgtgttggatttgattgtagaagacttgcaaaggtattttcattttgcattaaaaattttttcctcaaattatttttgacacatatattttttcccttacaatttggaaactagggtttggaatgcccagataacatatatacatgtaaatatacacatatacctacatatgcacacatatgaatatatgaatacttgtagacttttaaaattagaaagctttatttcatcatttcatgtgcaagatatcttgaaggtcttgatttgggattttcaaatggtgaatcctaaagaagtactctgatttaagaaaatatattattagaaacctgaatttataaaatttttgcagtcattgtaaaattccagagaatttgtcattatacccaaggaattaaatgttttatgcaaaatttgtgtaagttgatgtgtattgagaaataaatactagttaaacaatgccttaaggtcaagaactttgtttactaaatgtatcgattttatttcagcacttcagaagataaagaaaaacagtatactagccaaaccaccaggttgcttgctcttcttgatgctctggcttcacacaaagcttgtaaattagcta

SEQ ID NO: 16289 - DNA, 1150 bp, Homo sapiens
aatgctatgttcctttaagtattttcatatttttaatcatttattaagagaaaattgtgaaaagttaatttggccttatagagagattcaggatagatgtagcctatagatgtgtcattttaataagttgggatacatgtttagtttttccttatattcctgttcagtgaacagattttcataattctcacttgttaaagtgctgcaaaaattgcattttcagtactctaaattactacattagaagagagcatttctccattgtctttattttctgttatatatgtgttgtaaaagtacactacattagaagggagcttttccgttgtctttattttctgttatacatgtgttgttaaagtacatgcattcttagactaactctcagatgctttgctcttttggagctgaagaattgtttgatggtgatgtcatatatctgatagattagtttcagtggttctcatttcacttttatacgtaatttcttaactatattaagatagttgcaggcagtgtacctcaggttgactctgtacatctgaatagtgagtcactagtattttgcttcaagccttctgaaaatataaccatagttacctaagcacacagtgaatagtcacatggtagtacttgtgattagagcatgtaaaacaatgtaattgaaaagtcagcttccatattttgtaggggaaatagaacaccctactttttatctagtgtgaaatatttaatcgaatttttgttgatttatattatgttacctgtgctgaattaggtttggtacttgtgttttgtttgacatattagtaagttgcttttgcttctttctgtcaacttattttttaaataaaattgatctggaaaaattgttaatgggatgttttaaataatgaatttttcatccagcatcagttgaaaaggaaaagaaagcttcattatggaaatgacaatattgaatatgacagataagtttatttgcttctgttttaactgcagttaatagtactagacaactttaagtggaaagcatttagtttatttcttcacttatttgtagagtgaacaaatgattcacaattctacaagtaattccacttaggtaacttacagttgttaggtttgacaataaagatctactatgagagga

SEQ ID NO: 16290 - DNA, 1751 bp, Homo sapiens
ttaaaattaggcctaaataatctcaaataagtacccagaagtctggtttgactttgatttatgaaatcagtgcatgatttcttcccatgtataggaggaagtaaattacataaacaccttcagaaaagggggacagttgtcaccagtgtgcaatggaggcattatgacaccaccgaagagcactgaaaaaccaccaggaaaacactaaagaagataactaagcaaacaagttggaattcaccaagattgggtagaactggtatcactgaactactaaagttttacagaaagtagtgctgtgattgattgccctagccaattcacaagttacactgccattctgattttaaaacttacaattggcactaaagaatacatttaattatttcctatgttagctgttaaagaaacagcaggacttgtttacaaagatgtcttcattcccaaggttactggatagaagccaaccacagtctataccatagcaatgtttttcctttaatccagtgttactgtgtttatcttgataaactaggaattttgtcactggagttttggactggataagtgctaccttaaagggtatactaagtgatacagtactttgaatctagttgttagattctcaaaattcctacactcttgactagtgcaatttggttcttgaaaattaaatttaaacttgtttacaaaggtttagttttgtaataaggtgactaatttatctatagctgctatagcaagctattataaaacttgaatttctacaaatggtgaaatttaatgttttttaaactagtttatttgccttgccataacacattttttaactaataaggcttagatgaacatggtgttcaacctgtgctctaaacagtgggagtaccaaagaaattataaacaagataaatgctgtggctccttcctaactggggctttcttgacatgtaggttgcttggtaataacctttttgtatatcacaatttgggtgaaaaacttaagtaccctttcaaactatttatatgaggaagtcactttactactctaagatatccctaaggaatttttttttttaatttagtgtgactaaggctttatttatgtttgtgaaactgttaaggtcctttctaaattcctccattgtgagataaggacagtgtcaaagtgataaagcttaacacttgacctaaacttctattttcttaaggaagaagagtattaaatatatactgactcctagaaatctatttattaaaaaaagacatgaaaacttgctgtacataggctagctatttctaaatattttaaattagcttttctaaaaaaaaaatccagcctcataaagtagattagaaaactagattgctagtttattttgttatcagatatgtgaatctcttctccctttgaagaaactatacatttattgttacggtatgaagtcttctgtatagtttgtttttaaactaatatttgtttcagtattttgtctgaaaagaaaacaccactaattgtgtacatatgtattatataaacttaaccttttaatactgtttatttttagcccattgtttaaaaaataaaagttaaaaaaatttaactgcttaaaagtaaagttttgccattgcttggagaaacttttttttccttctctgcgctgccagctgtaacacttcttctggattgcttgcattcaactctgtctggccgatggctttgatcttccaaaacagaaaagtgatgttattag

SEQ ID NO: 16291 - DNA, 1530 bp, Homo sapiens
ttaagaaaaacgagcaaggaagagtatcttcattattctcattttctctgagttggaaacaaaaacatgaaggactccaactagaagacagatatttacatttaaatagattagtgggaaaactttaagagtttccacatattagttttcattttttgagtcaagagactgctccttgtactgggagacactagtagtatatgtttgtaatgttactttaaaattatctttttattttataaggcccataaatactggttaaactctgttaaaagtgggccttctatcttggatggtttcactgccatcagccatgctgatatattagaaatggcatccctatctacttactttaatgcttaaaattatacataaaatgctttatttagaaaacctacatgatacagtggtgtcagccttgccatgtatcagtttcacttgaaatttgagaccaattaaatttcaactgtttagggtggagaaagaggtactggaaaacatgcagatgaggatatcttttatgtgcaacagtatcctttgcatgggaggagagttactcttgaaaggcaggcagcttaagtggacaatgttttgtatatagttgagaattttacgacacttttaaaaattgtgtaattgttaaatgtccagttttgctctgttttgcctgaagttttagtatttgttttctaggtggacctctgaaaaccaaaccagtacctggggaggttagatgtgtgtttcaggcttggagtgtatgagtggttttgcttgtattttcctccagagattttgaactttaataattgcgtgtgttttttttttttttaagtggctttgtttttttttctcaagtaaaattgtgaacatatttcctttataggggcagggcatgagttagggagactgaagagtattgtagactgtacatgtgccttcttaatgtgtttctcgacacattttttttcagtaacttgaaaattcaaaagggacatttggttaggttactgtacatcaatctatgcataaatggcagcttgttttcttgagccacggtctaaattttgtttttatagaaattttttatactgattggttcatagatggtcagttttgtacacagactgaacaatacagcactttgccaaaaatgagtgtagcattgtttaaacattgtgtgttaacacctgttctttgtaattgggttgtggtgcattttgcactacctggagttacagttttcaatctgtcagtaaataaagtgtcctttaacttcacacttgtcagattcttttatctttatactcattaatattaaaaggaggtacaacttactgtttagtttttttgtccaaaagatgtatttaatacacattttatatatgtttttaaaagcttgtatatattaaggctgggcgcagtggctcatgcctgtaatcccagcaatttggaaggccaaggcaggcacatcgcttgaggccagaagttcgagatcagcctggccaacatggcaaaaccctgtctctacta

SEQ ID NO: 16292 - DNA, 2005 bp, Homo sapiens
gtagacagaggcacttgtctcgtgcagagggattaaattagacctgtgagattatatttggaaaaattcatgtctgtaactaacccattagtgcagtatttaatttgttactattccttcccgccaattctgtccactcctcacctcgcatcagctataaatttggaagtacttgtccaggcactcaagtgacttcatatttctctctgcccatgggaaaagagataggctttatatttccacagagtgaaaaatcctctgtcatggagcctgtcctgccaagtggcaagagtgtggggactgtctggtgatgatgtctttcatggcatctgagtgaagagtgacaggttggctcaacttttttctttttttttttttaattgccttgtattgtaagtattcttccctgcagtccaagtgacttttcattttttgttttaacttcaggcaaaatctttaaccactctggcctctgtttcccccaccaacggggagcagtgacatttacctccctcacagagtcactgtgaggattctatactgatttgaagtggagctgttcagaactgaaccttgtaggaaattccaagggcctttctactgaatctggtgatggggtggggccgtggcactttctctgccacagctgttcttcacagtgttggtgctaatgaggccagggtgcagggttcgattcacacgtaggccagttaacttagagaaaatctatttccttacctctagccagtcacttcctttttccgcagttgtgatgggttttgctgagccatccactctgactgatttcctctgaagtaaacatatttacaatccaaagcaattctactgacagaagtgttgccttcataatcaaacagcttgtttttccatctcctctgcaaccctaattaaatgagtacaggtctacaaaatgttttcaaggagaaaagcagcatatccttaagtgaagtattatatttttcaataaccctgtagtggcttgatgcagggaaccctgggggactttcagcgaagagctgtgctcttttctgactagattagagcgtttggagtggaagacgtcaaatgtgtagtgagatggaggttttacattgttcttctactggctgtgatgaagtgccagaatgtctctttagaacaagagttagattccccctttctccttattgccccttccgttttgacttcccctttatttatttgttgtctaattaggggccaagtctgtaaagttttgtcaaagtgagttagaagttgttttctcttactatttgtgtttaccagagttgggagataagatagtttccatgaaggtgtgtatgttttatacgatgtttgttatagggccatgcattggtaacttgaaaatagaccagcttaatgtcttcaggatgtaaaactctgaatacacggcgtctctttttcatacattgcatgtaagttgttagtacctcacaagctacagaagttcagccatgagattttgtttggcaacatgaacagatttgtgtataactgcaatggcctttttttccagatttccttattgactttttgtttgccttacctggggctagttttttatgctttgtacctagaaaacaaaaaattacattcgttgggctttttttcaaggttgggattaccacaccacctggaatatcatactgtggtttctgcctaaaattggcacatgtaagtattgaagaaaatggttatataattcagttgaaactcttggttattagatgttaggcatctcctgtatgtaagacacaaggccaaccacaacacagaacgatgttgacctgttaagtattctctgaaacatggccaaaatgcattttatgagcttttttttttgctattgtaaatattagtggtttacaatgcgctttagacatatttctttaaaatgcaagcagtgagaaataagacctctctgaattagtagctctaaactgttaacatagaatgttacttg

SEQ ID NO: 16293 - DNA, 2648 bp, Homo sapiens
ttccatcaaagatgagggagacttaaggaatggatggctaatcaagacaccaactaaatcttttgcagtttatgctgccactgctacggagaaatcagaatggatgaatcatataaataaatgtgttactgatttactctccaaaagtgggaagacacccagtaatgaacatgctgctgtctgggttcctgactctgaggcaactgtatgtatgcgttgtcagaaagcaaaattcacacctgttaatcgtcgccaccattgccgcaaatgtggttttgttgtctgtgggccctgctctgaaaagagatttcttcttcccagccagtcctctaagcctgtgcggatttgtgacttctgctatgacctgctttctgctggggacatggccacatgccagcctgctagatcagactcttacagccagtcattgaagtctcctttaaatgatatgtctgatgatgatgacgatgatgatagcagtgactaaggacacatttgggagtatttaatcaggtgtggctatctgagaaatcaactttgggggaaatgtaagattctgagctctctctctgttttgttctagccatgaatttgcctgagaaacttgtaacctatgtgcctcaatatattccatagaaagtaggtccccctgccttctcccactcctcacactcttctacagggataggcttttgcaaatatatcagataaattttttgtttcttgtttatttttaggttattttcttggaaggttgggaaaagatgtttgttttaacaggtcatgtactacgttgttgttttcatttctgttataagtaaaactaaaagcacagaatggtgggaaaggggctataatgtggttcattaataatgttagcagcttttttctaaccatcctgtctaatggttaagacaccagtaacaaaaacacatgatttggaaatactttggctttttcatatacctagtggtgccttatcataatagcactgttacatgaaataagcccctaccttcttactttctggtttgttgaaaaaatacactggtgctctttgaagtgataaaatgagtgtttatgaatgggtgtaattaggaaatacttctcatctgacagctacaaataactaagtttggaggtattttcactctatatgaataaatatttttccataaaatagttgtgattatatttttgttttatataggtcccaaattataattgtcaaatatatattttaaattaataaaagttgtcattcttaggaatttggtttgaaatttatcagttatacagaattgtcatactgcattagcttctacctttagtaagacatattttttaggtataaattcttatgctttaacattatttctggattgaaaatcttataaaacccttgaaaataaacagtctcttttttacaaagcctgtgttagagcacagatttacctaggcttgaagatttggaagaaataatatgtaagaatggcctcaaggcagaccactttaagtttggctagacttcatatcgtggaagtattgtctatttcagtgtgaaactatcttgaatttgcaaatatagtgttatattttataaagttttgtaaaatcccaaacaatatttctatttttgtaaaacaattgtatgtataatctgtatttgaaatcattttgcaatctatggaaatagagtagcaattgctatttctaaattgtgaactttaagtcaatctagatttattttgagaagtaattgttcactctttacttttgaggcagccattaggttgaaagtatatatttatcatataaaacttgatgcgttttgcactactctttccatttatatgctgcaaacaactacagtctttgaaatatggaaaatcagcagtctaaagtttgttttaaattctaaatttaaaaaatcttcaaatctgaatataccgcaaatgtcatgagaagtttgattcagtaacttgtgatggaggattctttggtatcttactgtttggttaaggcactaattttacttacctattagattttgaaagtatctgagatatacaaatctccctgtaggaaatgtgaaagaaaagcacaacaaaactagggttttttgttcatttgcttgcttttatgattttttttggtttgttttaatatcaggtggatttttgtttctaagcaatatatacataaaatcaaccaacatatctgaaaaggatcatgaaacctgagaaatgctaatggagatttgctggtacataggaatctagcaaattcaggaaccaaggggaaatgttgtgagataacatttacattgtcaacctttattgactttgtttttacaataaaaaatattttacaacttactttctgttctctgtatattgtgacttgaggatttaccccctctgctaagataataaagatattatgcatattttgcctaataattcaacaactgtgagtgcctgctatgtgccaggcattgttctaggcagtaggttagagcagtgaacaaaactcccttttggatttaccgcacgaaggctcagaaaacattcttccaagtgttgaagatatggcttaatgttactgggaagtgccttaatataatttggctttgctgtccaattact

SEQ ID NO: 16294 - DNA, 1192 bp, Homo sapiens
gataaagaagaaaggaacacgggcatatgcctgccagtgtagctggagaactattgaagaagtgactgaccttcagacagatcatcagcttcgctgggtttgtggtaaacattaagaatgcagactgcacattcggacagatgcatccatgagagtggtctccatgaatcatcatcatgtttagacaatagtccctagcaataccattccctgtgggaaaaggcagtgaattttattgatacaactacatacatttttgaagaccaaatggactaaggaagatcatgtattataacactttggaattattcctgatacatggatgtttcacttagtaacaggcatctacattctttactaatctgtcttctgtttaatagaggtttgattatggagttccatacaaatatctagtttttcattagcaactgcaatattgattgctaatacgtttagcaaatcattccccaacttgtagcagttaaagtggataaagccggccagggcaaagagatcatttaggggtgtctacaacacttcttccagtcagatcttttgttgccaaagatcataatttggacatggcagaaaccaggtgatcagtggctgactgaagggtgttcagaagtagttacaggtattttgcaaaaacactgcctcatagctgatcttacctcatcaactcaaagcaatgttatgcacaatattaaatacatgttaccagttttagcttatttttccctcttttgttcatttaactatcaaaagttattttctattttgattacccaataatatataaaaagagtttgatgcacccaaaatcacaaaaatcctaatacatacaggttattgttggattttccaagtactttctatcctttaatgcctaaaactccatcaagggaagtaaacagcaagtaatataatttttcaggcagcctgtggacttctctggtaggatcaggttgacatatcgtttattaggtgagtaagtgaaaagacaagtaaagcataactgaaccaacaggtaacctgttgggctccttcctgacatcactgagatctgaggagccctacaatagcagcacattcaggaaatcaggtccctcaaaatttctagctcccaaccccattgagagattttgggagctttccaatctgccacaaactccctgctacatatgtacta

SEQ ID NO: 16295 - DNA, 1688 bp, Homo sapiens
ccacccagactttggggcgctattgcgttgaaccccgcgccaccgcgtgtgctccttcagtactagttctgtgtttgagagcctcgccttcatttatgaatgaggccactagggggagtgcacgtatcagggaagaacctgttccccggcaagcctagggcggtctggaaagggacagtcaccaatctccagagcccagggtgacggtgtgctctgattcctttggccaggttctgaagacagcccacccaagcatgcaggcaacaacgaaagccattcttccaggagaaggaatcggcattccaagtcaaaagtcaccaatggcgttggaaagaaatgaaaaaccctggttaatcaaagatgttccagagtgcctagaactgagagggaaatggaactcatttggaactccccgtgaggaggtcgaggcgcacagggcaagcaggaagaggcgagggcacttgggggtcattatttgagatcgtaagtcttgtttcccacagacctggccgcgtcaggcagatcatcgcctggggggcctttgccaacgtggggtctcttctaacttcagcacttgacatgcggtcaccggtggcagcgcggtgtgttgaagggaaacggtagctattcattcacagttgccaagagcagctccgcgcctgctggatcgtggatgcagcgtaaacatcttccttcagacgaggcattaaccccatggttaatggactggtcaccagtttttattttatttttatgaatctacctttccattgattgatttaagttcaggccacttttctgtcttttatttggttactgttgttatttgtttttaagttaggatgctttttaacagcctttagaagccgctgctgaaattgatactgggggaagggttccccttccttctagagcagaaaagggagagaggtgttgtattcctgtttggtaacctcagtctcctgtaagacctcctaccacatggcgagtatacaccaatcaggagagggtagctgcctgcataggagcctcgcttccgattattcccttcccaatattattcatccagacttagccacagtgcacaaaagcaaacctgctagagaggcagtgaacaccacagcttctccccagctaggtgccttttacatcgggtttgttctccttccatggtgtgttgctgacattgtcactgagtcccatgtgaggtgctggtgagtattacctttcatctgtgccatgctctagaaccttgaccttgatagttcaccacctctgatggatccctgttttaaataaaaacgattcactttaaagcctatcaaaggtctgtctgtaaaatgctcattttcttgcatcttactggtatcttctattgattgtaagcagtctgtgtttttcaagtgactttaggataatatatatgtgttttacatagtgagaagaaaaaagaaaagatgtgtattttaaagggcttacagacatatatgtcctacttcttagactacccaagtgaccaacaggaatgaacaacatagtcattgttttttcctgtggtaatggtttccaagttggacttttttttcctctaacaagaggccagtacccagttgattagcttacagatatcaactcactgaaagtaatcttttgttccctcatttcacacagcacaaaggttcgttctg

SEQ ID NO: 16296 - DNA, 2429 bp, Homo sapiens
cttgacaataaagctaatgtctgcaacccttgaatctcttctaaagtaatcttccttttggttgtttcagctgtcattgctggtggagttattggctttctctttgcaatttttcttatcctgctgttggtgtatcgcatgagaaagaaggatgaaggaagctatgaccttggagaacgcaaaccatccagtgctgcttatcagaaggcacctactaaggagttttatgcgtaaaactccaacttagtgtctctatttatgagatcactgaacttttcaaaataaagcttttgcatagaataatgaagatctttgttttttgttttcattaaagagccattctggcactttaatgataaaatcccattgtatttaaaacatttcatgtatttctttagaacaacataaaattaaaatttaacatctgcagtgttctgtgaatagcagtggcaaaatattatgttatgaaaaccctcgatgttcatggaattggtttaaacttttatgcgcaaatacaaaatgattgtctttttcctatgactcaaagatgaaagctgtttcatttgtgtcagcatgtctcagattgaccttaccaagttggtcttactttgttaatttatctgttgtccccttcctctcctctgccctcccttcttgtgcccttaaaaccaaaccctatgccttttgtagctgtcatggtgcaatttgtctttggaaaattcagataatggtaatttagtgtatatgtgattttcaaatatgtaaactttaacttccactttgtataaatttttaagtgtcagactatccattttacacttgctttatttttcattacctgtagctttgggcagatttgcaacagcaaattaatgtgtaaaattggattattactacaaaaccgtttagtcatatctatctaatcagatcttcttttgggaggatttgatgtaagttactgacaagcctcagcaaacccaaagatgttaacagtattttaagaagttgctgcagattcctttggccactgtatttgttaatttcttgcaatttgaaggtacgagtagaggtttaaagaaaaatcagtttttgttcttaaaaatgcatttaagttgtaaacgtctttttaagcctttgaagtgcctctgattctatgtaacttgttgcagactggtgttaatgagtatatgtaacagtttaaaaaaaaagttggtattttataagcacagacaattctaatggtaacttttgtagtcttatgaatagacataaattgtaatttgggaacataaaaactactgaataaatcatgtggcctaatattgaaaatgtcactgttataaattttgtacatttttgatcaaatgtacatctcccctttgctaacggccgtctgctctcaaggatgacgtgggtttgatttctaagtgtttcacagtgtctgtaaatcaagaccaaagagcctgtcgatgagactgtttattaccagattcacttctgaattggccagaggaaatctgaatgtattatcctgtgtgtgtctaggtagagatattggaaggctgccaggggatttcgaagtttgcaacctttataggataactgatggcaatattaagacagacgcctgcttttgcaaataacttacaagactgtaaattccaaagatctgaatggggctttcctgatgttggtatctaaggcttaggcctatagattgatttacctttggaattgtgctccaaatgtctactgaagcttaaccgaagaactaataaatggactacagtagctcacgttacagggaaggagggtaggcagggaggctctgtgtgttaaaatgagggtctcactgctttaggattgaagtggctggaaagagtgatgcctggggaaggagatggagttatgagggtactgtggctggtactttctgtactaaacatttcctttttctattttaccactaattttgttttaaactgtgagccgtccaagtcagaagaagacagcaaaaaaagcaacttttccaacatacaatttacttttaataaagtatgaatatttcattttgagaacattccctggaattgccacataattcattaaaaacatttttttaagcaacacttggaacagtgtttactttaaatccttaatggccttaattaattctcagattcctgccccatcacttacagaaccaattcactttagagtgactaaaaggaaacgatagcctagctttctaaagccacgctgtgtccctcaattacagagggtaggaatgggtatacctctaactgtgcaaagcagagtgaaattcaattcatagaataacaactgctgggaatatccgtgccaggaaaagaaaaatttctggcaaatattttgtcactgctgtaaagcaaaatatttgtgaaagtgcc

SEQ ID NO: 16297 - DNA, 1227 bp, Homo sapiens
aaagctgtagcaagggtgtgctaggtgggggatttggagcaaaaccgtcgagtaggcatgatactggtatggagtgggcctgcaaaatcagacagaaatggcttgagaagccgcagggggagcatgcctgtctctcagtgatagagtatgggagggacctccctagcttggaaaatgagaattgaaggggttatgaacaaataggatgcctagttgaggatgttcccaaagttttgtccaatcttatcattagtagattttataagccacagagacaaaccagaaacggaataatgttactttggatgctttatttttttgttctaggtgtggctttgtacatgcagaagaatgctatatgctgcacattttgcctttaaagtcttacgactttccccattttagtctaatgggaagatacagatgtgcaagtctgcttttttgttttttgttattatttttttttttttgctctgtgttatggacattttcagacatgcacagaagtggagaggatggtccttggaccccatgtgtccatcacctagctgcatcacttatcagctatggtcaacctggtttcatctgtatctctctcttttcacctgtattgtttattgaaaatccaagacactatgccaatgcaaccgtgactactttgggagattggtagtctcttttgatggtgatagtgatggggtgcactatcataatcacatcaggtctgctttttgcttttaatgttaactaatgaagttccagagatgggccttagaaatgtgttttaagaattaacaaggagtctcaaaaagaaatgagagggatgcttcctttcccttgcatctacaaaacaagagagagactgttctgttgtaaaactctttcaaaaattctgatatggtaaggtacttgagacccttcaccagaatgtcaatctttttttctgtgtaacatggaaacttgtgtgaccattagcattgttatcagcttgtactggtctcataactctggttttggaagaataatttggaaattgttgctgtgttctgtgaaaataacctccccaaaataattagtaactggttgttctacttggtaatttgacaccctgttaataacgcaattatttctgtgttcttaaacagtataaatagttgtaagtttgcatgcatgatggaaaaataaaaacctgtatctctgttatatttctgattttcaaaaaagaat

SEQ ID NO: 16298 - DNA, 1196 bp, Homo sapiens
cccgaaccgaccaccgccaaccttccctgacacgcctttgccccacccgaccccgcccgcccccacgtgacgcccacgccccgcccactggcgcccacgtgacccacggtcgtccccgcgcgcggcgtggatcgcggcccaagccgccattgttccgccgagggaggacagcggggcctggcgctggcgccgagacgccgcttagcggccgccactggagacactccctcccgcctcccgggtctcctggcggcggcggagtgaggctgacagcggggaacctgggagacccctccgccctccccgcggtggcagcggccgatccccggctccggcgcgagggacggccgcgatgcgctcggcctgaggttacccggcccggcccttcctcgcttccctcgactattccactgcgtctccgcgccccggcgtcatcctgcgagtccctctgacgggagggaagatggctgcacggagctggcaggacgagctggcccagcaggccgaggagggctcggcccggctgcgggaaatgctctcggtcggcctaggctttctgcgcaccgagctgggcctcgacctggggctggagccgaaacggtaccccggctgggtgatcctggtgggcactggcgcgctcgggctgctgctgctgtttctgctgggctacggctgggccgcggcttgcgccggcgcccgcaaaaagcggaggagcccgccccgcaagcgggaggaggcggcggccgtgccggccgcggcccccgacgacctggccttgctgaagaatctccggagcgaggaacagaagaagaagaaccggaagaaactgtccgagaagcccaaagtgagtatgggatgagcggcagtagagaacgggcgaagggcgggcgtggagaccctcgagcttgggggaggccgcgccccagccgggaaggaaaagagtgcttagtcgaaagccgagaggcagcactcccaagtggaggaggaggtgataggtggtcatgttatttggggaatggggggaactcaggaagtataggacgagtggggaagcccagtttcgaggaaggaagttaggaggtctgggggtccgttcagataggcgcccagaggtcaagccatctttgggaaccgtcaccgctagaataagcacagcatccttccttgaggcctgcagagtaggctgcatgtggagc

SEQ ID NO: 16299 - DNA, 1258 bp, Homo sapiens
tgtgtacatacatacactctacatatataatgatacctgggctccaccacaaagattcagattttaattggtctgggctgaggctccagggtctattgttaataaatttttcagttaattttaatgtgcagccaggttttagaatcattgcttgatacataatgtaatatatataaataaggaaagaacatgtaactaaggaaatgtcttcatattcttagtgggtgagtattcagaatatgtgtcattttcctctttgctctgttgtactttctttgagcaagttattctgctgtgaacaactttgttagtatatatgttatgttcaagcctcctgtttttaaattaaggcaatccttggtgatcaaaggatagtaggggaagtgagtaataaatataagtcaagcaatcatagaaatgtgaaaatatcccagttttaagaagtcatgtacctgttttttaatattcattttcttttctttaagtttcttcaggattgaatgaaaacctcactgtcaatggaggaggctggaatgaaaagtctgtaaaactctcctcacagatcagtgcaggtgaggagaagtggaactccgtttcacctgcttctgcaggaaagaggaaaactgagccatctgcctggagtcaagacactggagatgctaatacaaatggaaaagactggggaaggagttggagtgaccgttcaatattttctggcattggtaagaagtgttagaaaaatttaactttatttaaaattactaatcttgtacatttttaatttttcagaaatagaaaaaaaaactatgaatagaaaaataagtactgctctgcagaaataatagtaataattaactcatctcacatcctttttgtagagcaaggtgggaattaaataagtaaataacatcatttactctttacatagtgctttcacatactttatcacatttgattatcaacatagctaactggtgtaattatatattcttagtgatgtgatacatgtaatgtgtgggtagactttttgattaatttcaacaattctgttgagtctaaataaaaatagtaaatggaagtacagttgataacatccacttatattttacagtctgcatggtgcctatttataattaaattttcctccggattttaatataaagaccagtagttgagaagtttatttctgttgagagctatcaagttaaaagcagcttaatttgtgtgtgtgtgtgtttgtgtgtgtgtgtgtgtgtat

SEQ ID NO: 16300 - DNA, 1152 bp, Homo sapiens
taaaaagggggagaaaaataagaggttgaatattgtcatgacttggtgaatttgaagaaactaattttgaaaagctcataaggataggagaggtgtagtataaaatgacaggtagggattgtaactttggtactactgttaagaattaattccaaaccctagacaataaatcaattacaaaaatgttataataatcaggggagaaaacaaccaggtcctagaccaagttaaaaatggatagagaaaagaaattcaggagattgataacaaaggaagcacagagagtggaatcaaatggctaataaattttctggaatttcttagaaattccatttaaccatatgatatgcttagcagaaattgaataaagattgttaccttcatgttatttttttttctggctcttaaaatgtgcttgggagacagaacaataacttaaaattacagcttagttgaacataaggaatttttagtttttgccttttaatttatggcaaaaatgatagacgcctaattcacactgttaaattttagatggtctgtcttctgctgatcccaactctgattggaatgcaccagcagaagagtggggcaattgggtagacgaagaaagagcttcacttctaaagtcccaggaaccaattcctgatgatcaaaaggtgagtataagagattcctgggtgtttatttgttaatgaaagagacaggctgggcacagtggctcacgcctatgattccagcactttgggaggtactgtgggaggattgcttgagcccaggagttcaaggccagcctgggcaacatagcgagaccccatctctatttataaaaataaaataaagcaactgaaggagaattctgggtcacagaggctgacaccaattgagagcctcagggagacaataatagcatcagaaacagcaaacccaagttttgataggactggaggagagatagtggataatagcaacacgtggtatcaggaatggttttgctagggttggggtgttgtattttaatgatagggagattttggtatagggtcagcagtctttttttctttttttttttttttcggagacagattcttgttgtgctgcccaggctggagtgcagtggcatgatctcagctcactgcaacctctacctcc

SEQ ID NO: 16301 - DNA, 1165 bp, Homo sapiens
acagtgaaaccttgtctctactaaaaacacaaaaaaaatagctgggcgtggtggcacacgcctgtagtcccagctactcaggaggctgaggcaggagaatcgtttgaacccgggaggcggaggttgcagtgagccaagattgtgccactgcactccatcctgggcaacagagtgagactccacctcaaaaaaaagttaatgaaaaattattcatttctatttgaaattcagtagacattttataatttcataccttcatttttatctcaacatatattcataaatgttgtaggtgatgattgatttggctgtatcactagagggcaggtatgagttacattgtttatctggaaaccatattagtattgaattgctgctaaaccacctcttggtattactgtgatatttaaactttatttgaaaatttcaccaaaaaacctgagatgattttttcctaaaatagcctatcaagactcttccacctgctacttctaccgagccatctgtaatcttatcaaaaagtgattctgacaagagctcttcccaagtgccgccaatactacaagagacagataaatccaagtcaaataccaagcaaaatagtgtgcctccttcacagagtaagtaatcctcattttttgttcctttgtactgtttacatttttcatgtgttaaggttctgatcttaaaagtctaatggaggccaggcgcagtggctcacgcctgtaatcccagcactttgggaggccgaggcgggcagatcacgaggtcaggacatcaagaccatcctggctaacatggtgaaaccccgtctctactaaaaatacaaaaaattagccaggtgtggcggcgggtgcctgtagtcccagctactcgggaggctgaggcaggagaatggcgtgaacccgggaggcagagcttgcagtgagccaaaatcgtgccactgcactccagcctgggcaacagagcgagactccgtctcaaaaaaaaaaacgtctaatggattaataagagtagccctttcttcctttgaaaatgctaaattctgccgggtgcggtggctcacgcctgtaatcccagcactttgagaggctgaggcgggcggatcactaggtcaggagatcgagaccatcctggctaacatggtgaaaccccgtctctacta

SEQ ID NO: 16302 - DNA, 2647 bp, Homo sapiens
catagaataacttaaaatatataacgagggcttgaaaacttaaacataaaatttgagtattttaaaacattgtttcatagttactacttttatattattgagacgtaacagtatttaccatcctcctaatttttttcttcgttttcccccttttcttttttagccaagtctgaaactagctgggaatctcccaaacaaataaaaaagaagaaaaaagccagacgagaaacgtgaaattttttttcctgaattggacatgtgtttgcaaacacttgtcttgaagattatgctgtttatgcaataatttgtgaacatgtacagagttttatataaatttaaaccaatttttaaaacaaaactgcggacaccaccataaaaatggaatcaaaagaaagttaatttatgaaattaagaggtcagcagaatatactcagtgatggaagacacttgggaaagtctttttaatagaacaagaacgatcttaatttaagaatattatcctggtttaacaacagtgccctgtttacaacagattgtgccctatctcatctgcagccgaggaataaaggattctgattagaaagagggttgcctacagattagtaagcaattccttggatcttatgcacagaacttgtaccatttgaatctgttttatgcttaaatcaaagtgctttgatcaaatgcataacctgccatatctttacatatttgttggtagcaatttgtattaaagaaatcacaagtgcaaataaaaagtcatttatcatttgtttaactaaactgtcatggtttagtttacaatttttaaaaagttcttaaaatactgaaaatgcagttgacacttgtgtatggcttatgaagttatttttgatagtcttacattacttgaattgttcaaagtacagtatattttaaattaagaaaagtgaactatatgtatttgttttatacatttaaggcttagactcataaataatgctattgtttatgatttgaaaactttcaggcaaaatccaatttacatttttcccttccctagcaattacttttttccagcttcaactcttcttagttactaatactttgttgactttaaaaatgaaatcattcacaaacttttggtatatgatggagaatgaaaaactagagtcagacagctttaattgacattgtcaacacctccagttatcaggaatacatttttttactgccttaacctgtagtgcgtagaatatgcatcaatttcttgaaggagattcatgtttttataagaattttcatgtaattattgcaattgtggtcaaataaggaacgtttcctgcttgaaattatattgatttaaatgatgtgtgagatgtttcaccattttcaggcactgtgtaattctattgtaataaactggcaggtatctttgtaactataaatagtgcatgctcagccatgtacactgtaaatagcctttaccaaacgtgtttgacaaggaccataattaacatcacttagtgaattgtgataaagaaaaaaaagccatgatttattcgatgtgattggcttgtttttatgtggcgccaagaacgaacctgtttaacagctgtaaccaatggtactgatctatccatccaatgttgtcattatatttgactgtggttcaacagtattgcgttgtcagactaggaaagctaaacgaacaaaatggttttagttttgctgaagactggccttattaatggacagctttcctaacaagagattattaacttttatcaggtgttaacatctgtttcaggaacatggcagtatgtttacatgtcagaagttttgtttaattctatggtatttctaaattgacttgtttaaataaattcagcaaatggatagcattgttttttatttgcttcaatatgggggtagataatagctaaagagccaaggatgaatttcttcaaatgactttattctgttagctttacataggtgttggaggattcctaaggtgtcagcattttgtaaaggtaccacaaaggagaagttgatagggaatctaattttagaatgtgccaaatggtctgtgctcaacaatataattgaactctctcaactctacctcaccatttctttatctcaaaattctgttggctttgtcaaacgttggattttatttctgcagcctagtatctccccattctaccacctatgccagatgttaaagacagcagatgttttgaggagaatggcattgtggagatgcagagatgcgttgctaagttgaggtggatccagtatagagatacctctatttcttctttatggctcaagagctaggacttggattttgttttaagagatggcagctggccgggtgcagtggctcacgtctgtaatcccagcactttgggaggccgaggcaggtggatcacgaggtcaggagttcaagaccagcctggccaagagggtgaaaccccatctttactaaaaatacaaaaaaaaaaattagctgggtgtggtggtgggctcctgtaatcccagctactcaggaggctaaggcagagaatcatttgaacccaggagacggagtttgcaaagccaagatcgtgccactgcactccagcctgggcaacagaaggagactccgtctcaaaaaaaa

SEQ ID NO: 16303 - DNA, 1576 bp, Homo sapiens
agttctgttatttcacttttgccatgagcctctctgagcttgtttgttgctgaaatgctactttttaaaatttagatgttagattgaaaactgtagttttcaacatatgctttgctggaacactgtgatagattaactgtagaattcttcctgtacgattggggatataatgggcttcactaaccttccctaggcattgaaacttcccccaaatctgatggacctagaagtctgcttttgtacctgctgggccccaaagttgggcatttttctctctgttccctctcttttgaaaatgtaaaataaaaccaaaaatagacaactttttcttcagccattccagcatagagaacaaaaccttatggaaacaggaatgtcaattgtgtaatcattgttctaattaggtaaatagaagtccttatgtatgtgttacaagaatttcccccacaacatcctttatgactgaagttcaatgacagtttgtgtttggtggtaaaggattttctccatggcctgaattaagaccattagaaagcaccaggccgtgggagcagtgaccatctgctgactgttcttgtggatcttgtgtccagggacatggggtgacatgcctcgtatgtgttagagggtggaatggatgtgtttggcgctgcatgggatctggtgcccctcttctcctggattcacatccccacccagggcccgcttttactaagtgttctgccctagattggttcaaggaggtcatccaactgactttatcaagtggaattgggatatatttgatatacttctgcctaacaacatggaaaagggttttcttttccctgcaagctacatcctactgctttgaacttccaagtatgtctagtcaccttttaaaatgtaaacattttcagaaaaatgaggattgccttccttgtatgcgctttttaccttgactacctgaattgcaagggatttttatatattcatatgttacaaagtcagcaactctcctgttggttcattattgaatgtgctgtaaattaagttgtttgcaattaaaacaaggtttgcccacatccaagatgaccttgtgattttgtgctgattgtgtctgaggacctttccctccacatatggtctggcagatgcacccagttcagcctaaggagtaggcttttttttgggggggggaggtcgggtgggggggatttttaatcttttaattttcaagatggttaaaatattgaaatgtttaagtggataactatattattcataaaatgactgagtgaaaactaatacactatgagatgaaaagtacttgtcagggattttcaagcttttgctcaagtaattactatgaaataacaatttctagaaatgaagaacaatccgtggagaataaattaccattggtgtgggggaaaaaagccaaacagaagtagaaaaaggtgtagccggcatacaaatgttatctacagtgtatttttagattttttatacttgaccaggtctcttatgtcctttttctggaaaactgtttttaactactaaagtgattataaatgaaaaagtggccagtaaagtg

SEQ ID NO: 16304 - DNA, 1204 bp, Homo sapiens
ttctgtaccatggaacatcgctataatgaatctattctagaaaaagttcaaagcaggtaatacctactgttcatttccatggtcattataaaactctcaaggcaccctgtgatcatgttacttaaataacccaattttcaatagactaagataatttactaagataaattagtaaaatggagtttcctccaaagtaccccctctcagtcaatgcatattgtgtatagaattactagatataagccaattaggttttgcagaataattttctaagaatgacaattttgattttatattgcttgttataatattaaataacaggaataaattttaatgaattgctttttatcagtaatttattatatgcacagagaaatacaaatcagcagggctctctgtatgcagctgattgggaatttgttttaaggcattaagctacaagctataaaaatgagagaagagcgattttaaaatatttacttggtatatccaattgatgcttaaaatataaaatttgacttcttttaggttccacaaatcaacaagacttttcttcagggaaaagtgaagatttgggaacagttcaggagaagtccaccaaaagccttgttataggtcctcttgattttcgtttggatagcagtgcggtgcataggattttgaaaatgattgtgtgtgccttggaacatgaatatgaaccatatagcaggctaaaatcaggtttgtttctggattaattttgaatcttttgccatttgttttgagaataattatataatccaatttgtgttgtcttgctaactttacgtttttagtgtaatttgcctgtttgcaaggactttgatatatgtagctgtttatttaaagaataaacttgtgtgtagaagttggagagatcaagatttgaaaattattgcacaagtactttatttgccagtatttgtcagtattttattgttatacctttttgatactttttctagtggatacttgtgaatatgatttttttttttcacattaatggattctaaggagccagatacaaaattgggctctaaacacacaaatttaacattgaagaaaacttaggcactgctggtttagaaaaagttgctgtacaactaattttttctacatggtagatagctatagttgtcatagtttcataaaatacgaattcctttttaaagcagtaaagcaactc

SEQ ID NO: 16305 - DNA, 1154 bp, Homo sapiens
gttatttctactctcccctctcacaggccctggtaaccacaaatctactttttgtctctatgtttttgcctcttctggcaatttcatataagtggaattctaaaatatatgttttctttgtcaggcttatttcacttaatataatgttttcgagattcatcagtgctgtagcatgtatcagtacttcatttctttttatggataaatacttttccattgtttggaaataccacattttgtttattcatcaactcatggaaatttatattgatttcactttttggctgttacgaattatgctgatatgagcatttgaatacaagtttttgtgtgggcataagttttcggtgcccacatttcctcaaaaagacatatagttgcagtatgacccagttatgccatagtattttccaaagtgggtgtaccagtttacattcctaccagcaatgtatcagggtttgcattcctccacatcctttccaacgcttgttactgtttgtctgttatgtcatagctatcctacatggtgtaaagtgacaaatagcttattgttttttatgaggacttatgtaacagtttaaaaatcttgtcttttaggtgctgtacttctttgcagtatacaaggactagcagttaatattgacccaatcttatatacgtggctcatctatcagcctcagaaacgaacaagtagacatatgcaacaggtaagagatttttaaataattttttctgttaacaaatatttttcttattcatttagtagaattatatatgtcttttgatggattcttttttaacaaatgtactagatttcctttgtctccccaccttacccctttcaaacaattccgttcccttatttttgtatgagaaattgcatgtcagtataaagtttctttgattattaaaggggctttctgtacaatggcttacaaaacagaaactagtttaggagtcctatttcaccagtcttcattctttcatagtgtctacatgtccattctcatggtgtgcaatacataagaattgctcagtaaatgaatgttggcttgtttgttttgttttgagacacagtttcactctgcctcccaggctgaagtgcagtggcgtgatctcggcccactccctggttcaagtgattctctcgggac

SEQ ID NO: 16306 - DNA, 1178 bp, Homo sapiens
tgagcatgcattttataatcagaagatgttaataggctaatttaaatttgttagatttttaccatttttaagattatgtttaaaaacctgtatgagagaacatatttggagacaggaacaaaaatatggcttggaacagaaacagtatgtggctataagggttaatggcaggggggtgggggcggtggtgggcatagaattgagaaggaaaaaagcagaatttgttcaatgcacacaagcaatgagagtaaggtgtggtatgcccaaaatggaaaagaggctattcagagtggtcagggagcttagaggagcgtaaaggagagtgaaacttggagtccaggtagcctgaactgtgctttttctgtggctgagggtgagtgatcaaggtgtgaagtctactagtaggaatagacctcagttgatcctcaaagatggtgagtattgagagagtgtttatctctaacttagcctttgtgtttctcttcacagaatttcttcaggttgaattacctagaagtttgtcactgacttgtgttcctgaactatgacacatgaatatgtgggctaagaaatagttcctcttgataaataaacaattaacaaatactttggacagtaagtctttctcagttcttaatgataatgcagggcacttactagcataagaattggtttgggatttaactgtttatgaagctaacttgatttccgtgttttgttaaaatttcattgttctagcacatctttaactgtgatagtttgtccgtttcattgcagttacttggtcttgggctatggattaaaaagtgttcttcatgagcctgtaagactactgtactgtgggctctaagaagagatagaatcctaataaaatctatccttggccttcattgccactatttggtagctgtgccaccaccacatagttgaaataggtaattcaaatgtagggtttcttactcagtattgctttattaataacaagctaacagtatgtaatagaatttggatatatatctaatccagaaaaggttacttaactagaattgagtaatgtctcctaatgacaagcagagtatggtactttttcagaggtcttcttaggactttaattcatgtttattgcgagcaaagtgatactggagaactttaaaaaatgacacttattcaaagctaat

SEQ ID NO: 16307 - DNA, 1137 bp, Homo sapiens
cagtagtgtggatgatggcagtgccacccgaagtcatgctggcggttcatccagtggcttgcctgaaggtaaatctagtgccaccaagtggtccaaagaagcaacagcagggaaaaaatcaaaaagtggtaaactgaggaaaaagggtaacatgaagataaatgagacgagagaggacatggatgcacagttgttagaacaacaaagcacgaactcaagtgaatttgaggctccatccctcagtgacagtatgccttctgtagcagattctcactctagtcatttttctgaatttagttgttctgacctagaaagcatgaaaacttcttgtagtcatggttccagtgattatcacacccgctttgctactgttaacattcttcctgaggtagaaaatgaccgtctggaaaattccccacatcagtgtagcatttctgtggttacccaaactgcttcctgttcagaagtttcacagttgaatcatattgctgaagaacatggtaacaatggaataaaacctaatgttgatttatattttggcgatgcactaaaagaaacaaataacaaccactcacatcagacaatggaattaaaagttgcaattcagactgaaatttaggcccataaatgctgcagaataattaccactgtacaaccgtgtttggagctggttgaactacatgtgactacttaagtttcaggttaccagcaaaagccgggtttcattatcataatgcagatacattttctgtgttcagcaaggcattgtgtgtcatgtggatcttagttaccaaactatgaagtgaaggctttaaaagtgcattattttaaggataataaatttgaagagcaaagcatgttttgtgtgtttgccacaaaacattgcttgaagcacatacttagatagaaattggtcttaatttatataatcaatataaaatactaatgcaattctacagcattcaaatgaagaaaacttgaggctttagggataagtggttagtgatattttattgaaaccactaaagagataagtttaaaagaactgcataggttactctcagtatatgatactctgtaacatttctatttatatcggcataaatttcattttttttcttcatatgcaatgtggtt

SEQ ID NO: 16308 - DNA, 3729 bp, Homo sapiens
acacctctatgtaatcccagcacttcaggaggccaaggcaggtggatcacttgaggtcaggagtttgagaccagcctggtcaacagggtgaaaccccagctctaaaaatataaagattagccaggcttggtggcacatgcctgtaatcccagctactggggaggctgaggcaggaaagttgcttgaatccggaggcggaggttgcagcgagccaagattgtgccgttgcattccagcctgggcgacaaagtgagactccatctcaaaaagaaaaaaaatgtatctgtgatacatagtatataataactactttggcttctttctaattcgctcactcaacttctccacctcatgtttcgatggaagtctaccacttcagcagatgtccattgatgactatttgtatttgccatctttttctgtgctttaaacttaagagttctcattttctgtctagcctgctgttcatgtacaaggtcaggaacctttgactgcttccatgttggcatctgcccctcctcaagagcaaaagcaaatgttgggtgagtacttctgtcccaccttgtcagttcagaaagactagaaaatataggaatcacttaggcactaggtcaatcaattgacagctagggcagtggaattgatctgaattggcatgaatgattatgatagtacagttggtctgcctaattaaaaccactggaaagccaataagaaaatgtattgttagtaataaatagggtagtagggcattactcaccatgggccctcactacatttttgagagaaggaatttgaagcaaatgagaagaaaacttgtgactttgcctgaacaccgatttaacaacctaatggtaacattgcttaattggcaagctgataatatcaagagttaattgccttgtggcagattttattctgtcttcccatgaagacataatgaaattgtggattatgggttattatatacgtgagacagaagtatggttcttaaaccccagtttaatgtggtaattcaatgcagttaaaaacttttttttattgaagggagtttttgaatgtttctgttcctaggtgaacggctgtttcctcttattcaagccatgcaccctactcttgctggtaaaatcactggcatgttgttggagattgataattcagaacttcttcatatgctcgagtctccagagtcactccgttctaaggtgatttaaatttatttaccaagttgcctcttacacagttattacgtggctttttatggggacttaattgtacagaacacttacatcgtgttatatataagccatgtacagttgtaaagtctgcataataacctgtggcgctatttatccccattttatagataggtaaactgaaacaggctgaataatttgccaaatgctcacacagctcttaagtggcagagcctggcttcaaatcccatcagctccaacagccatactctcaactgctgctgctttctctagtggagaaagagaaatatttttcgagtgtggggaggacaaggaaagagtagtgcaggggagcgattcataattctagaatagtggtgtaatagaactcaaaattgaatggatatagttgtttagtgtaacaatttatactttcatttgagggaagaaacttatctttgttgggaattggtatgttaccattatgaaactctttatttccattcctttcctgaaccagtttatctgttttccccttttttaggttgatgaagctgtagctgtactacaagcccaccaagctaaagaggctgcccagaaagcagttaacagtgccaccggtgttccaactgtttaaagtgagcttttccctctggtttgttgttttaagcttgttttcttcatcttttataaagtttgttgagcatattttgaaatgtacatagcaaaagatcattttacagttcatttaaatgtattgctaatttttcaaggaaaagtggaactaactatagaggaattaaaggaattttacccgttaactgttggatttttaaaatcccaggactttcaggtggtgtttttttttttttttttttttgagatggagtttcgttctgtcgcccaacctggagtgcattgacgcgatctcggctcactgcaacctccacctcccaggttcaagcaattctcctgcctcggcctcccgagcagctgggattaacaggcccatgcctgccaccgtgcccagctaatttttgtatttttactagacttggggttttgccatgttggccaggctggtctggaacttctgacctcaagtgatccgcccacctcggcctcccaaagtcttgaaattacaggcgtgagccactgcgccctgccagattttgtatagtaatatatatataaaatgacctgtcacaggttggctttcatagttttacctttcctttttgggtggtgcccttgggtctctactactgtctttcatcactcccaagaaattgagtagtgcagccaggatcaggaccagggattggcaaatgttttttgtaaagggccagataggaaatattttgggctttgaggactgtgttatctctgaaatgatcttgttccagtgttaccatgtcaagacaaccatagatagtatgtatacaaatgaacaggtatggctgtgttccagtaaaactatggataaaaacaaccacattgcatttggctaagggctttaatttgctactgacaagtgatagtcctggtcttaatttgtttttttaacatttacagattgatcagggaccatgaaaagaaacttgtgcttcaccgaagaaaaatatctaaacatcgaaaaacttaaatattatggaaaaaaaacattgcaaaatataaaataaataaaaaaaggaaaggaaactttgaaccttatgtaccgagcaaatgccaggtctagcaaacataatgctagtcctagattacttattgatttaaaaacaaaaaaacacaaaaaaatagtaaaatataaaaacaaattaatgttttatagaccctgggaaaaagaattttcagcaaagtacaaaaatttaaagcattcctttctttaattttgtaattctttactgtggaatagctcagaatgtcagttctgttttaagtaacagaattgataactgagcaaggaaacgtaatttggattataaaattcttgctttaataaaaattccttaaacagtgcacggatttgctttttttcaaagtctttataattgccatgcataaataggtaatatcttaatggtgctgagccgacataagaatcttttatgaaaaatgtactgttaagttcagggggtctattggttttatgtaaaaggcacaagacaattcctgtagtgcattttatgagttaaggtttccatacggattattgaaacaatttgttacatgtatttgttacatgatcttaatatttcatgtacaagactgacacccatccacttttgaagataagccagtttatggggtttttttttttgcgggtagaggttgggtctccctattttgtccaggctggtctcgaattcctgggctcaagcataagcataaggcttattcctgcataagccaccatgcctggcctgccagttgatgattatattgaggtttctaggctatgagattattagcttaaacccttacatgatataaaacaatgatagctactcttgaagaggatgtagataagata

SEQ ID NO: 16309 - DNA, 1099 bp, Homo sapiens
tgtctttctctctgtctcctctccctctctgcctcggctgccaggcggggaagggccccctctccagtggacacgtaacccacgtgaccttacctatcattggagatgactcacactctttaccctgccccttgtgttttgtttccaataaataacagtgcagccagacattcagggccactactggtctccgcgtcttggtggtagtggtcccccgtgcccagctgtcttttttttttaaatctctgtgtctcgtgtctttatttctgcactctctcgtcgctgcatacagggagaagcccaccgaccctgtggggctggtcgctacatataagtactcgtccttgtatgaattaatgtttttacttattgatgctctgagtctgggaaaatggcaagtgttaagactcagctttaaaaagttttgtcactttttagtcttttatgcaaacctcagatcgaagaagacagcataaacacttttcactcagtaagttttcccagttaatgtatattcacatctttaaaatgcagcattccaaaatatgcccggtgctatccgcccagctgctcctagaccaccatttagtactatgagaccagcttcttcacaggttccacgagtcatgtcaacacagcgtgttggtgagtcttaatccttcctttaaaaattgatcaccaatttgaaagagcaagataaaaatacaaaatgttcttattttttagctaacacatcaacacagacaatgggtccacgtcctgcagctgcagccgctgcagctactcctgctgtccgcaccgttccacagtataaatatgctgcaggagttcgcaatcctcagcaacatcttaatgcacagccacaagttacaatgcaacaggtatggatttaatgatttcttaataaaaatcacatttcttgggtgaaatcaaaggtgtgaagacagctgggcacagtggctcacacctataaccccagcactttgggaggttgaggcaggcagattgcttgagaccaggagtttgggaccagcctgggcaacatacaggaccctgtctccacaaagaaaactagctgggtgtggtggcataagcctgt

SEQ ID NO: 16310 - DNA, 1181 bp, Homo sapiens
cagcttgaattgttagaatagtcaaaatttaattgggaaatgcttccagtggtgcccaaaagtcaatttagtaggcctgggatgtatttatttagataattaaatttcaatattgaaaatccaatcaaattcagtatctaaaatctttaaaagtttctgtgcagccttcacttctgtcagttctctgacctggctagggtaatgcatatgtgtagtttgcccttaataattgggtattaaggaaaaattgtgaactcaatgggtaaatacaagatgattaagcattaacagggtttagttatttgattcagtgatttataattgtctaaattgtaacgctctttttttgctcctcattctaccattacgttaactttttttttcttttttttaataggttatgatggagggtggtcgcagcaaagggtttggttttgtatgtttctcctccccagaagaagccactaaagcagttacagaaatgaacggtagaattgtggccacaaagccattgtatgtagctttagctcagcgcaaagaagagcgccaggctcacctcactaaccagtatatgcagagaatggcaagtgtacgagctgttcccaaccctgtaatcaacccctaccagccagcacctccttcaggttacttcatggcagctatcccacaggtaggttttagaaggcaaccagaaccatgaaggttttcgtatttggtcatttctagtgttttttgtgcccctcgccccgcaaatgtgaaacattaagaaaggggaattatgattgagtaggaaaaaatgcttgagtgtgaagtcctggtaaatgttttgaaaaagtacatataatttattgcattatttgcttttttcttcaactgataaactcatgtgctttttttccctgcagactcagaaccgtgctgcatactatcctcctagccaaattgctcaactaagaccaagtcctcgctggactgctcagggtgccagacctcatcgtaagtcttttttcttttaattaaggttggggattgagttaaaaataacacattgggtaaatcagctcttctatgtcaatgttaggttaactattgcatttcacataatttgtggttatggatgttcatttttatagcatttaaaagcagtgctaagatagtaatgtctacagtggtttgatttc

SEQ ID NO: 16311 - DNA, 1751 bp, Homo sapiens
cagatacttggtaagttgaggcaggaggatcacttgagcccaggagttgagttaaagtgagcttattcattgtgctgctacacttcagcctgggcaatggaatgatatactgtctctatagaaaagggaaaaaatcaaattattgggtaaaaaatgcaactcttttgtgctagagctgagaataaaactttttacagccgtttaaagtgtacctccttaaatggaaggaggaatccttcaggggagggaaggtgtttaccttcttaataataaaaggtctttcaatggaaaagtatacctacctggggcatagaaggctgggagggaggagtcaagttacggagctttgaaatttttttcatggctttgtatgttgaaatttgaaatgtataacgtgaatgttgtatggaatatctttgatttatgtaaaaaaattttttagggcctgccttaagtgtgaaagtaatgactgatgaaagtggaaaatccaaaggatttggatttgtaagctttgaaaggcatgaagatgcacagaaagtaagtggtctgtattcagcaggaagaagggggtacaaagttgagttgctcttgtgttgaagtctatgtgcatactaatagctatttgacatgttcttatattttcagttatttgcattttatgcattaggtttgagagtataaattggtaacctatattgtcccaaaaccttgagattttgggatgggtttgtctttagcttttgtgacttaacaaatttgtcttaactgttaaggaaatgaactgtaagttgaaagttttgtgattttttttttttctttttttttggggggaaggctgtggatgagatgaacggaaaggagctcaatggaaaacaaatttatgttggtcgagctcagaaaaaggtggaacggcagacggaacttaagcgcaaatttgaacagatgaaacaagataggatcaccagataccaggttcatttttaattgaacaaccaaaataagacagggatgaggaaacctattttacgttgatttcagttacttccaggtagctggagggtttgagaggggaataggagaagaaatatggggtaaaataatagacccgatgtacttaggtaccaccatggttttctttttctatagttttcttttcttctttttagggtgttaatctttatgtgaaaaatcttgatgatggtattgatgatgaacgtctccggaaagagttttctccatttggtacaatcactagtgcaaaggtaagaaaacatatggttcatttatttgaggtctagtaaaaattcatacatgtagatatatgtatataaattttgtattattatagccactagagaggtgtttgcttcgttacttctaaaacttaaattcacatttgaactggttgtcatagcctaatggttaacttaaaaatggcaagcactgaactctttgctaaggaaggctgatatcctcacatgatatgcactattccaacaactagtcattttgctaaagcaagcaatttattagggacttataattgttactatagttctgatctgtttattcatttctacaattcattctgggtagtcaagccccagttccctcccctgccccctagcagtaagaatagagatcatattttcttttatttgaaatcagagattaagaaacaaagcagtagtattctagtacaaattctgaaatcttgatttaagaagttctcttctagatgtttttgtcta

SEQ ID NO: 16312 - DNA, 1133 bp, Homo sapiens
gccactgcctagcccagtgatccttgttctgaattactactgttatattcagaaaaaattaagttttagtgtcattttgttgaaaatgctgcagttatgtcaggctgttgtgtgttagagtacacgattgggaagtttaaatttttattctaggagatggcaaagaaagcgcaagcgccactttaaaatgacgatgaaagctttttaatttgatagaggtctttttattggcatggtacacatgcacttccactcatttgtattgatgggagtgatccctttaaccctaggttagctagagaagagaagtgtgtattaaaagaagtggttttttttttgtgattgtagttagaggcttattcatatatttcatggtgtcatatcttaaattatggccctatttctattttgtagtgtgctttttattagggattctgaatattctcattaacagtaacaaaaccaaccatcaggcttacttaatctgaactttataaaatagaatctaatgttatagtccttgtatatcttattagatttgttggacgatttaagtctcgtaaagaacgagaagctgaacttggagctagggcaaaagaattcaccaatgtttacatcaagaattttggagaagacatggatgatgagcgccttaaggatctctttggcaagtttggtaatgtgtcttaattaaatttttacacacaaagctctgaattagtgctcagtgttaattttagctattactttatactaaaaaagtcaataaaattagacttacatggtactttaaaatatttgtggttatttgaattaagctgctggccatctattacactacaaagtagtataatgcaaataaatagaattctatccaggttaaaggttaatagcattagattagcacagtaaggtatgactaagtaattagaacagattttaaaatattttactacattaagaggctggagatatatatgtgtgtgtgtgtgtgtgtgtgtgtgtgtgtgtgtgtaattagagatcccatgtcatcagaagcatatatttgacacagccagcctacagtggaatgcagtctcatagaacaataaagctggtcagtctaagtaacatcatgtttgagcagttta

SEQ ID NO: 16313 - DNA, 1510 bp, Homo sapiens
ttagttattagcaatgaaatgaccaattttagcaagtagttgggaagaagttaaaatatttaaatctataaactacttccagcttgtagataaatctgttgcgtaatgtcttttatactgcttattaaacagattgtatgtgaaggaatttggattttgataactaggaaaaaaagtgctttagatttaatggcaattaaggcgagagattgcgtcaagaatttattaattattagcaatatggaattcttttatatgtgagaaatttcgggggcttctggtatttgtctttgctttatacaacttaggtcccacactagtgtgtgatacttgaaaggtctagccatcttgaagcttaaagaggaagcgttcaactgtgagaccatgtgtcctcccactccagtcaccatagtttatataatcttaagtagccagcaaaaattttgaagtaatattgactctgaaaatgtccttcctgcagcggagcgtgctttggacaccatgaattttgatgttataaagggcaagccagtacgcatcatgtggtctcagcgtgatccatcacttcgcaaaagtggagtaggcaacatattcattaaaaatctggacaaatccattgataataaagcactgtatgatacattttctgcttttggtaacatcctttcatgtaaggtaagccaaaaatgtccgatacacatgtttacattgttgagctacatttagtttagtgcttgaaataggaactgtgcagtaatggatatctttatttcacaaatatccaggttagatggctaacagattgtctctcaacactgaacaaatgttaaatcaatagcaaataaagaaaaatgggtatatgtttttccctaggtggtttgtgatgaaaatggttccaagggctatggatttgtacactttgagacgcaggaagcagctgaaagagctattgaaaaaatgaatggaatgctcctaaatgatcgcaaagtgtaagttataaatatctagctaatcatattttgaatcttatttttaataattccaaatccattcattttaagttaatatttgtcagggagaagttagatgcacataagataaaagaataaaaacattttaaagatgaataacaaaaattcatgtagttgtactggagtgaaaattaataagctaatcttgatttttacaattgaattttctacacagtaagtgtaacatacaaataacaggtttaatataattaacattcatgccaaaaggaaaacagaagataagtaaacagaaaaatgtagctttttcaaaatgagtgcattagtgaaaaatcaggaattcagacaaacctaatattcataattcttgaggtactggttaaattaacccattttataggtgaggaaactcaaagtaatttgcttttatgtactgtaaaatgagagacatacattactcacaagtccgggcgcggtggctcatgcctgtaaatcccagcactttgggaggccgaggtggg

SEQ ID NO: 16314 - DNA, 1121 bp, Homo sapiens
aaaatctaaaaaaatcttttaaaaaaccccaaaaaaatttacaaaaaatccgcgtctcccccgccggagacttttattttttttcttcctcttttataaaataacccggtgaagcagccgagaccgacccgcccgcccgcggccccgcagcagctccaagaaggaaccaagagaccgaggccttcccgctgcccggacccgacaccgccaccctcgctccccgccggcagccggcagccagcggcagtggatcgaccccgttctgcggccgttgagtagttttcaattccggttgatttttgtccctctgcgcttgctccccgctcccctccccccggctccggcccccagccccggcactcgctctcctcctctcacggaaaggtcgcggcctgtggccctgcgggcagccgtgccgagatgaaccccagtgcccccagctaccccatggcctcgctctacgtgggggacctccaccccgacgtgaccgaggcgatgctctacgagaagttcagcccggccgggcccatcctctccatccgggtctgcagggacatgatcacccgccgctccttgggctacgcgtatgtgaacttccagcagccggcggacggtgagcgccgggctccgcggtcggccgggcgggcgggcggccatgaggctcgggcggcggcggcgggcggggtaggccggcgggcccggggaggggggcgggagggcatgtcaccccgcgacggccggcgggaaggcgccggggtccctggagccgcgtttcccgagccggcggggacccgcgctgccggcagccacacgcccggctacttcctcctttgcgaccattttctcggcctcagacgctctcaaactttagggtgatgacgcgccgggagggtgggtgagattcggttcctccgcggcgctcccgccagtggccccgggattctggggcgttgaacgctgagctccttccgtgggtaagaggtggaggcgctcccaccacccggagctcctgccggcgccccagcctggggaggaagtgcagttctgtgctcgaaaaataccacgtgttgaaccctgtaacctcgcaggcccgaggcctgcttctgctcctgctcctggcc

SEQ ID NO: 16315 - DNA, 2576 bp, Homo sapiens
ttgtggacatcggatacccaaggagacgaagctgaagcaggagaaggaggggaaaattaaccggccttccaacttttgtctgcctcattctaaaatttacacagtagaccatttgtcatccatgctgtcccacaaatagttttttgtttacgatttatgacaggtttatgttacttctatttgaatttctatatttcccatgtggtttttatgtttaatattaggggagtagagccagttaacatttagggagttatctgttttcatcttgaggtggccaatatggggatgtggaatttttatacaagttataagtgtttggcatagtacttttggtacattgtggcttcaaaagggccagtgtaaaactgcttccatgtctaagcaaagaaaactgcctacatactggtttgtcctggcggggaataaaagggatcattggttccagtcacaggtgtagtaattgtgggtactttaaggtttggagcacttacaaggctgtggtagaatcataccccatggataccacatattaaaccatgtatatctgtggaatactcaatgtgtacacctttgactacagctgcagaagtgttcctttagacaaagttgtgacccattttactctggataagggcagaaacggttcacattccattatttgtaaagttacctgctgttagctttcattatttttgctacactcattttatttgtatttaaatgttttaggcaacctaagaacaaatgtaaaagtaaagatgcaggaaaaatgaattgcttggtattcattacttcatgtatatcaagcacagcagtaaaacaaaaacccatgtatttaacttttttttaggatttttgcttttgtgatttttttttttttgatacttgcctaacatgcatgtgctgtaaaaatagttaacagggaaataacttgagatgatggctagctttgtttaatgtcttatgaaattttcatgaacaatccaagcataattgttaagaacacgtgtattaaattcatgtaagtggaataaaagttttatgaatggacttttcaactactttctctacagcttttcatgtaaattagtcttggttctgaaacttctctaaaggaaattgtacattttttgaaatttattccttattccctcttggcagctaatgggctcttaccaagtttaaacacaaaatttatcataacaaaaatactactaatataactactgtttccatgtcccatgatcccctctcttcctccccaccctgaaaaaaatgagttcctattttttctgggagagggggggattgattagaaaaaaatgtagtgtgttccatttaaaattttggcatatggcattttctaacttaggaagccacaatgttcttggcccatcatgacattgggtagcattaactgtaagttttgtgcttccaaatcactttttggtttttaagaatttcttgatactcttatagcctgccttcaattttgatcctttattctttctatttgtcaggtgcacaagattaccttcctgttttagccttctgtcttgtcaccaaccattcttacttggtggccatgtacttggaaaaaggccgcatgatctttctggctccactcagtgtctaaggcaccctgcttcctttgcttgcatcccacagactatttccctcatcctatttactgcagcaaatctctccttagttgatgagactgtgtttatctccctttaaaaccctacctatcctgaatggtctgtcattgtctgcctttaaaatccttcctctttcttcctcctctattctctaaataatgatggggctaagttatacccaaagctcactttacaaaatatttcctcagtactttgcagaaaacaccaaacaaaaatgccattttaaaaaaggtgtattttttcttttagaatgtaagctcctcaagagcagggacaatgttttctgtatgttctattgtgcctagtacactgtaaatgctcaataaatattgatgatgggaggcagtgagtcttgatgataagggtgagaaactgaaatcccaaacactgttttgttgcttgttttattatgacctcagattaaattgggaaatattggcccttttgaataattgtcccaaatattacattcaaataaaagtgcaatggagaccttggggtctttatttccaggagaaaagataccttctgcatctagggcaacaatccttttccctcgcagctctttcttttacctcacttactgatttctcctgacccccaagccaaggaggtaaaataattatatatatatatatatatatatatatatatatataaagtaattatattttatagctagactgaagaggtgggaatttttttgttgttttttttttttttggagacaagagtcttgctctgtcacccaggcttgagtgcagtggtgcgatctcggctgagtgcaacctccgcctgctgggttcaagcgattctcctgcctcagcctcccaagtagctgggattacaggtgcccgccaccacacctggctaatttttgtgtttttagta

SEQ ID NO: 16316 - DNA, 2389 bp, Homo sapiens
cctctaaaaacaatgtacaccaatgttcctgagcacctctttacaattagtttacttatagtacttagcagaggttcttttttttctcccccaacctatccccttagcaaagcttctgagtattaaaatatagggcaaaatgtagatgtagatatgtgctatataaatttgtttataaatttgttggttgaaagttatcactttacacattacatttggttggattttttccccctaaatagtggagttggtggtgggtgtgttgtgtgtttcagaattctttctttttaaaataaattcttcagagttctgtatataaagtcgagttgacaagtttaccagatattatcttcatagtgtttcttcttagttatttgaaatgcatgtaagttgcatttgtgcaatggtaacattcattgaaaattttgcttatgttttataggtgaattcatgacacctttgactcttctactgtctcagaccttaggtaacatacctgcagctgcttttctaacaaactgttgatcagcaaaaataaaggggctacagaaacactcatttttatgctgttccctcttgggcttcatgcaaagacaattctgtgtaaatgtacagttgactctgatttggaaatatgaaaatcagtccatccttgttataaaaaatttttttacaattgtaattatattgatgttcatattgtgtaaaataactcatttaataaaatagtactttgatttacgacatcacaggataaatggttttagaaattctgttctaactttccacattatttgccttataaaaatctaatgaattcatcagctagaattgcaagtgcaattcttatatccctttctctgctcagtggcaggttcctcagttaaactagagcagactgattcattaaaattgtgcatacgattttatgggcagctgatgatctaggtgaaaaatgacttatctgctgccttagtatattgcggttatgtgtcattgtacccctctgatcatttcctgtgtttgagttggaatatttaaaattgcagtatgacctggctctaactgccagtcaggtgtaccctgtagataactgatagcttcctaaaagcggttggattgtcagtgagcccttgtgaaaggttaggttctaatgtatatgccgtaatgaaataatcattaagcctattgtttaatgcaaaatatggaacaaatgtgaactggtaaaggtcgatcttgatactatattctttgaaaattcttgaagttctttaatttgaaattgaaacattaatttttgaggtttttggaagttactatttggccatttttacaaatggattttgcattaacaggaagattggaatgacttgtggctggattaattcccagaaccctctccctcctttcttttctaagtgagttgttgattttaggagtttgctttgtgctgttacctaaaatcagagactggtgtacagtatgacttccatctgaacttgaaaagtattaaaatgggtcaatattcacattcttttagatctcaggatgggaaaatgggtttgttcagatggatatggtaaatcttacccaattaaggaaggctaattttagagttcttctaatttgcttgtgtcaactcttaacttgtaaaactgctgttaactcggtttaaatttttaaattaatataatagaaagaacactaaaatacttactggtaactgcttagagccatttatctgatcctgtggattacagaatgcattccctcttctgctgtagcttatcattgctttgttttgtagctctgcatattttgcccaccttgtcttccctgtaagtttaagacgtttccaaggaaaagcttcagggctgatagtttcttagcaattcctattcttatgcccttactttaaaatagtccttttattttgtgtattttatttcctaagtttcagatgtaatatctgttgtttcctaacatgtcgattaccagaacgttagaattttacctaatttcttgtggatattgcagaagttctggttaaatcacaacttaaaagtttttaaaagtgctttgagcatatgtatatgtttagtgacaaatcatataaaaccattcacaagttttggttttttttttttcgtttgttttagtgactaattcaggatgaaagtttttttgttcttgtatttaacccttttttataagcagctgaagacaccatatttaacactatatctcagtgatagggaaatagctgcattgatcttacatgagcataatcatccttatacttcatgaggggattattagtacaatccccattttactgtgtttgagttaaaaaccaaacatccctgtaatttaatttgaagattcttta

SEQ ID NO: 16317 - DNA, 1589 bp, Homo sapiens
atttgcattattttgctccttaatgcaaaataactttttaagataacctgtgtgagttttgaacctaagaccgtatcttttgtttggcagccttttttccactaatagacactttatggaattagctgcaagaaaggctcttagaaaccatttagtccaacagcctcatgttacagatgaaaatactgaggctctgtgacagaaagtcacctttttttcctctactaactctagacttactcctttggggaaaaaaaacaaaaacaaaaacctgtcttgaggtatgaatgatccctttcctttttagtacaagaaaatatatttaaaatccagttcaaaataatatctccttttaggttattaacataacaatagggctttgtgtatatactgccagagttaagagttaaatattaacctgttaaattcctgttcaggtttacttttggacatcaagcccatcactgccagccagtgaagaaggattccagcctatgccctcaatcacaataagaccaccagatgaccaacatcttcctactgcaaatacttgcatttctcgactttacgtcccactctattcctctaaacagattctcaaacagaaattgttactcgccattaagaccaagaattttggttttgtgtagagtataaaaagtgtgtattgctgtgtaatattactagcaaattttgtagatttttttccatttgtctataaaagtttatggaagttaatgctgtcatacccccctggtggtaccttaaagagataaaatgcagacattccttgctgagtttatagcttaaaggcctaaggagcactagcaacatttggctatattggtttgctagtcaccaacttctgggtctaaccccagccaaagatgacagcagaacaacataatttacactgtgatttatctttttgctgagggggaaaaaatgtaaatgttctgaaaattcactgctgcctttgtggaaactgtttcagcaaaggttcttgtatagagggaatagggaatttcaaaataaaaaattaagtatgttctgtgttttcattttaactttttttatggtgtttaatttgtggttggctgcaactgtgtatcatgtatatggaacttgtaaaaaagttctcgacattcagatcttaagagatgaaatcacttttacctataaaaaccacttttattgcggtttgactgcattgagctctaggatattaaatgatatcactaatattttgcatgtaatttgctcatttgagtgagggcactttttttgtacatatgatggggccaatgcacaatacttttatcacaatcaactttttctttgtatccctatttcaatgagcagtcagtctcaagaggttactgcacttcagttctaactagacatttgtactaaggtatttcagttatgtaaactcagcctgggcactttctgataactgtaaaatgttttataagatcatgattattgaagatacattttggaaaattttaaatgttcgtgagcagcttaactacttttgtatctagccttttttaagtatcttgttacatttacttttttaaataaag

SEQ ID NO: 16318 - DNA, 1153 bp, Homo sapiens
ataaatcatggctgggcacttcctaaatttggtaaaagacatagatttccagattcaagagtcagtgaactcaacagaataaactgaaagaaaactatgtccagatacattataatcaaacttctgtaaaataaagaaatgttattgaaagcagccaaagaatggttctttacctatagggaaacagtgatttgaaagagtggatttctcactataaagtatgaaagccaaaagtcaacaaactcatcaaagtgatgacagaattctgtatccagtgaaaagaattttcaggcaataaagtgaaagaagcttatccgagtttcattaaatgactttattttaacaacagagacgttaaagacctaataatacacaagctttgtgtgtcacattctgaaagggcaaattaaaagttcatttacctttaatattgttatacacatatatttaaatatttatgttgctcttcctacctgacttcatttgaatgatttgagagaaccatttcatatgttttgttttttcagtgaatcttggggcttactctctgatattctctgttagcaggaaaaccgaaagcgccatggctctagtcgaagtgtagtagatatggatttagatgatacagatgatggtgatgacaatgcccctttgttttaccaacctgggaaaagaggattttatactccaaggcctggcaagaacacagaagcaaggttgaattgtttcagaaacattggcaggtaaaagaactttaatcttgggtttgaattttttaaaacatttcaatttatgagattttctaaaatatatttgttttaaaatgtatgtacgctgggtgcggtggctcacacctgtaatctcagcactttgggagactgaactgggaggatcacttgagcccaggagttggagacctgcctgggcaacatggcgaaaccctgtctttactaaaaataaaaaaatactagcgggcattgtgctgcaatgcctgtagtcccagctacttgggaggctggcgtaggaggatgacctgactgtggcactgcacttcagcctgggttgacagagtgagaccctgtctcaaaaacaaaacattctcaggctggtgttcctgtttttttttgttttgttttgttttttgaaaaagtgt

SEQ ID NO: 16319 - DNA, 1173 bp, Homo sapiens
tttcactttctataatgttataatgagaagaaattaggagatgtgaatgaggaaactgggaagtcttaacatttccaaactatctgttttgtacacttataggaaaccatactctggcttgggcttaggaatttaaaaataataataggtaatattctggtggcctttaatgctttcatgccaaaaactaagaacagaggatatttaaatgagtctagtcatgtaagaaatttcagcgttatttatagtgacactatcataaccttacttgctatatattatttcacagctttgacatgacaagggagaaaattgattaacaaatattgagtgaacatctatttcgtgccaggtatattctacacaatcacctccaaccctgaaaacccatagggagagaaaggcattaacaacacagatgctagggaaggataatctttagctgtcatgttttcttacatttgtctcatttctttgcattgactttgaaatttaaggtagttgaatttgcattcatctaaatacagtatatttctgattttcttctaggtttaatgcagagattaaggaaccgaggagagagagaccgggaaagggagagagaaagggaaatgaggaggagtagtggtttgcgagcaggttctcggagggaccgggataggtaaattttgtatctttgattcaataccacctttttggatgaattagagataggcctgtaaatgaaagaatcttaattatggattattttttagaaaagtaaagttttaattttgaacatatgtatagtaactaagaatagtctgttaataaaatacaataactaagaatagtctattaactaataaaaagttctgctttaaaaacccagaggcggttgaaattatattctttttatctgactcaagttcctatttgaatttttttacccatatcattctctcctaagtttatcttaaaaagtcttcatttttcaggccacatgcggtggctcacgcctgtaattccagcactttgggaggccgaggtgggtggatcatctgagttcaggagttcaagaccagcctgaccaacatggtgaaactctgtctttcctaaaaacaaaaaattagccaggtgtggtggcgcatgcctgtaatcccagctacttgggaggctgaggcaggagaatcc

SEQ ID NO: 16320 - DNA, 1113 bp, Homo sapiens
aagtcagggcattagggaaagagatgttactactgaaaaaaaatcaggagaactgtcattgtggtgaagaagccatattaagttttaaccatgctgagtttgaattgagcatcgttgacgtggacatatttatttaacaaatggagattctggttcatggtgaaagtttgaactagaggtggatctgggagtcacctaaatggagatagacattggactttaaggagaggaggtaaaatgaaagacgaagataagacatagcccagggatttatccgtatgtagaatacagaaggaataagggaggaaaaataataagttgtcgggaacaagtagctatggaaaagttctctgttaggacacagtttgaagaagttaagacctcagaatattttttaaaaaaagtaagttactaccattgaacaaaaaccaatcagtctttgaaattggctaaattatttctcccccccaccccttcccttaaacttcttacaggccacagtgtagctttatgggaatggttatttcccatgatatgctgctaggacgttggcgcctttctttagaactgttcggcagggtattcatggaagatgttggagcagaacctggatcagtatgtattttgtgcaccttaaattccattctgcctgataagcatgtatttcagggaataatctgtcatgcatttttttttttttaagatcctaactgaattgggtggttttgaggtaaaagaatcaaaattccgcagagaaatggaaaaactgagaaaccagcagtcaagagatttgtcactagaggtaaaggtatttagattttcttatactatacctgtagtatgctatttatataaattttaaaacatgcaaaataacaatagctttgcttagggatatgtacttataattaaaaatttaaagaaaataaaaagaaatgttaactaccaaatttattttttcgtgtgtgtgtgtgtgtgtgtgtgtggtttctttttatttttttcttattgtaaccaccaaatttagaatagtagttttctctggcagtttggttccctagcatcctctatgaatttttttgttttagtttttaagtatcattatgcatgcat

SEQ ID NO: 16321 - DNA, 1432 bp, Homo sapiens
caaacaaggtactgccaaagttttattccattaaggagatttggtgctagtgtgctgacttactattgagatatgtaaattgctcagacattactctgcttagcaaatgctcaggtttcagttcctgatcatctcctctgtttggatttgtcagtgagttgggtcctgagtatactcatgaatctaactgtatttgggtggtgggtatctcaaaagataaagaggaggatatgggaaacctttgtccaatacaaaatggcacaatattattaaatgctgatttttattttgcattttttattgtaacatacacataacgtaaaatttgcacataacataaaacttacattgtaaccatattaaactgttacatttactttaaaaaataccagaattttggactatgaacttgtttttgtgtggcattaaaattttataaaagaggtagtaggaattttggattgagcaggttaaaggtctgttaccctaatccagtaattaaataattttcctaaaaaacaaaacattttatctttttatgtttaggtgctactttgaatgataaggatgatgactctcttcctgcagaaactggccaaaaccatccatttttccgacgttcagactccatgacattccttgggtgtatacccccaaatccatttgaagtgcctctggctgaagccatccccttggctgatcagccacatctgttgcaggtgaattaaacaagttagtcttaaggtttctttctaattgggtttattttctttaaagtattcaatgtaactagaatatttctgttaaaattccagccaaatgctagaaaggaggatctttttggccgtccaagtcagggtctttattcttcatctgccagtagtgggaaatgtttaatggaggttacagtggatagaaactgcctagaggtaagacagtaaaagtttttttgcaatataacatttattaaggacaacttgtcccagcatatagatttttagaaatgcgttaattcagaatattatattttctgaaatgaagtgtcagaaattcctgccttgtggtataatgtaggaagaattccaacactgtcattaacttgctgtcagatcacttcatccataaaataccagcctccatatgtgctttgtctgtttcacagagctgactgctgtatgtggctgaaaatttgaatttttcatgtataataaaaatatatagatgagcatgtgtaattttggctacaacttttacttgctgaactaattttaatcaagactgtagataaatagcattaataatgatacctaatatttgttgactaattctgtttcctgggcattggtctccatctttataactatgtttggtagaatgcattatcaccctgattttttgggtgagaaatagagtcttgaagagagtaagtaaa

SEQ ID NO: 16322 - DNA, 1148 bp, Homo sapiens
tcaacctcacctaagagctatttagaaatgcaaatcctggggctttaccccagacctactaaaactctggggattagaccagaggtctgttttaataagccctccaggtgactttgatggaccctgaagtttgagaatcactgtcttcagggaaagaattcattttgccattccaaaggatactggaattccttttctatacaaagtataaggctgtaaatcatgcacagtggttatatttctaaagctgagcagcaggcttaactactttgtatttatgaatattctcagctcctaattttgcatatttatgatagtgaatttcacatttgtattcttctaataaacattttcctttctgttcttatagacgtgccaccttgcttagcgcccgtcaaggaatgatgtctgcacgaggagacttcctaaattatgctctgtctctaatgcggtctcataatgatgagcattctgatgttcttccagttttggatgtttgctcattgaagcatgtggcatatgtttttcaagcacttatatactggattaaggcaatgaatcagcagacaacattggatacacctcaactagaacgcaaaaggtatccattcttgccatgaggttgatttaagaaatacttgcttggtatggtcttctttagtacattgtcaacatttggagtaaggagaatagcattgcaaaagagaactagcacaggaccatttcatataggaaagtgggcttgaatttatccaacctttccccattgccactcttcacttaaaataggaaacctaagaatctggttaaacttcatgcttgagatagtttggcctggcctgattatcatctttattttttccttttttttttttttttttaaagagacagagtctgactctgtcacccaggctggaatgtgatggtgcgatcaaagctcactgcaaccttgaattcacgggctcaagtaatcttcctgccttagccttctaagtatataggacttacaggcgtgtgctaccatgcctggctaatttcttaatgttttggagagacagtgtctcatgatgttccccaggctggccttcaactcctggcctaagtgatccccctgccttagtctcccaaagtgttgggattacaggcat

SEQ ID NO: 16323 - DNA, 1408 bp, Homo sapiens
gtgcattgtgggatgttaggcagcatccctagcctacacccactagatgccagtgaaacccctctcacccttcttcccctccccttggctcccacagttgtgataaccaagaatgtctgtagatactgccaaatgtgtagcccctttggcggggggaggtggcgtgggggtcagatttcccctggttgagaactttatattaattcttgtcccctccatactcctctccccaaaatagtgtggtttaggcaaagttttttgcttgggtaccacaattgaccatttagatttacgtaagtatatataatcccagagaaacacaattagcaactgacattagctcattgtggttgtcctttttccttatagcaagttcagcgggtttgatttatattgatccttcaaacttacgccggagtggtaccatcagtacaagtgctgcagctgcagcagctgctttggaagctagcaacgccagcagttacctaacatctgcaagcagtttagccagggcttacagcattgtcattagacaaatctcggacttgatgggccttattcctaagtataatcacctagtatactctcagattccagcagctgtgaaattgacttaccaagatgcagtaaacttacaggtatgaaaccactgaaaagtttcccattccactatttttttttggctgtcaattatgagaattccagtattaggggaattaaatgttagaaacgtttacatattgacatactgctgctgtatcgaatttagctctatttggatagttttaactattttagtttggtcttcatagaactatgtagaagaaaagcttattcccacttggaactggatggtcagtattatggattctactgaagctcaattacgttatggttctgcattagcatctgctggtgatcctggacatccaaatcatcctcttcacgcttctcagaattcagcgagaagagagaggatgactgcgcgagaagaagctagcttacgaacacttgaaggcagacggtatgaaattcttcatatatacagaacgtccccaacttaaaatggatcctcaacttacaattttttgtttgtttgtttgtttgtttttttgagacggagtctcacactcttacccaggctggagtgcagtggtgccgtctcggctcactgcaagctccgcctcctgggttcatgccattctcctgccccagcctcccgagtagctgggactacaggcacttgccacccacgcccggctaattttttgttttcttagtagagacggggtttcactgtgttagccatggtggtcttgatctcctgaccttgtgatctgcccaccctggcctcccaaagtgctgggattacaggcgtgagccacagcgcccgacccccaacttacat

SEQ ID NO: 16324 - DNA, 1304 bp, Homo sapiens
gactgtgggacaaaaaataagaaatcgtacatttaggactcactgtatgtcaagcacattggcaggtatatttcataaactgaccttgtaaatgttttggttaaatttgttttgagattttattataaaatgttaatacttaaaaaatgttagaacttataactttatgaatgtctaaacatcttatgaagtatcttaacattaatagagtgaatataattttttaaagcttttagatactctactaggtacactagtgaaagaactccaaaacaaatatacacctggacgtagagaagaagctattgctgtgacaatgaggtttctacgttcagtggcaagagtttttgttattctgagtgtggaaatggcttcatccaaaaagaaaaagtaaggcatcctttttgattttggtttagataccattttcactctgtttttgtgatagtgatttatgtatatgaaaagatagattgctgatatttctctttttgttctagcaactttattccacagccaattggaaaatgcaagcgtgtattccaagcattgctaccttacgctgtggaagaattgtgcaacgtagcagagtcactgattgttcctgtcagaatggggattgctcgtccaactgcaccatttaccctggctagtactagcatagatgccatgcagggcagtgaagaattattttcagtggaaccactaccaccacgaccatcatctgatcagtctagcaggtaaattgctaccaggtaacagattctgattaatccttctctggaaatgtcgtgtttgacttcctaaaacctttgcataagcactcaggtggtgtacatgatcatttgtgtaacataaataacaaccagaaagccggaattttaaatatttttctacaacaactgtattatcaaggacagggctaaaataactccattataaatgtttctaattataagattatttgttcttaagtttcatttatcttttctatttgtttgatagtttccctaattacactgtaagcttgttgaatcaggatgttgagcaacttaaaactttccgatgtcctttagcacactgcttctcaaactttaatatgtatgaaaatgacttggggctcttattaaaatatagatgcccactctagaggtcttgaggtggggcctccaacttcgtatgcctttcaagttctcaggtgatgccaattctgctggtttaggggtcagacttttcagtaataatgctgtagatctttggcaaatatttagtgtattttgttttttcaagtctgattttataac

SEQ ID NO: 16325 - DNA, 1191 bp, Homo sapiens
tgaaaaattttaatagatattaaaagaattctggttggtattttttgttttccttattttaagtacctaaaggtgtgataatctgttgttattgattgttttccaagtgtactagatgccagggtggtggtgaatagtcctgacagtgttcacatccctatcagaagcaagaaatatctgcccatagggttacagggttcattaggtcatataggaggaccacttgaacaggactgggaattagggaagagattccaaaagtgattgtaccttagagtacctcttctcataggaattctgtgttgctttatagatgtcattactaccaagtaatccttcttgttatataagctttgacagttatactttgcatttagaaattaacaagggctctctctggtttcagtgagttataccttcataatgtcaacataaacctttgtatgtttaaaaaatttcagtttttgtacttgtgtataaattctctatagactcaaacggacatcaccaacagcctactgtgattgttgggagaaatgtaaatgtaaaactcttattgctggacagaaatctgctcgtcttgatctactttatcgcctgctcactgctactaatctggttactctgccaaacagcaggcaagtgggatttttagaacatacagtaagttaaatcaaaagagcgcagcacagctgagtagcttttcagcctccctcctcacgacaacattctgttttgcaggggagagcacctcttactattcttagtacagacagtcgcaaggcagacggtggagcattgtcaatacaggccacctcgaatcagggaagatcgtaaccgaaaaacagccagtcctgaaggtgagttaattagacatttatgacacttgtgggaagcaatatgttttatttttgttttggtcactatttctttttcattttagattcagatatgccagatcatgatttagagcctccaagatttgcccagcttgcattggagcgtgttctacaggactggaatgccttgaaatctatgattatgtttgggtcgcaggagaataaagacccgtacgtattcattaaaacctttttagatttatgtatttcctacgttagtgtagaccttttacagttcattctgtctttcgtttctcctcaagtcttagtgccagcagtagaataggccatc

SEQ ID NO: 16326 - DNA, 1103 bp, Homo sapiens
acattttcctgtattaatcatatctttgtgtcttttttcgctatgactatcactagacttacagttttcagctttggaattaagtctgatatgaagaaagttgatttaattcctaagtaaatgaggcaaaagagctgattgctcagttaaatatggcataccatgaaaattggaaattttcactgggtagtataatctgatccacaaatcttgatacagattttataactacaatgcctttttggggatgatacaaattatttttttctactggtaatatttctatttgtatatcataaactgtatatttgctgtagccctttataagttctagttttccaaagcacattaattttgtttgttgagattgaattgttctagaaaataccagaaataattattatgatgagatatatgcatacttataattattcctttaaaagtacactcttaattttaggatatttttgagtgtcgaacttgtggcttgctggagtcactgtgttgttgtacggaatgtgcaagggtttgtcataaaggtcatgattgcaagtgagtacaattctagttttctttagtttaatattataagctgtttagatttatattgctgtatggaaataatctgtactaagtcatgttttacttcagaaagcatgaggttacttacgtttcccttgtttaagtcagtttatgtataatagtgtgattcttgatttaaagtatactgtgaaatgtttggtttctttgctagttcaaacattgccctccttaaataaaagtaggtgattatacattgtaactaggatcagattagtcttttgagaagtatatctacagaatgttcctgagtgtattatgcagcggaggtctcaggtcccctgtagtggggtatactaggagaaaattgccataggcctagagggaatcatggtgaatgtttagactgtgtcttaaactaaatgcaacagtctttcattcagcaacagttaccacagctagttctgttggttttcagagacctgagaagcaatgaaatacctagcactaacatctgtggtgttttaggattatggatagggacttcagtataaatggctaca

SEQ ID NO: 16327 - DNA, 1192 bp, Homo sapiens
tgccatagtgagctgtgttcacatcaccgcactacagcctggaagacagagtgagacactgtctcacacacacacaaaagcctaagaaggtgggagtaagcctggaataaaatttatatcctttgcttaattggctatcattattaaaagggttctaattagatagataacatgaagtaaaaaccaaggattggcagactatggcccaaaggccgaatccagccactcctattcatttatgcattgtatgtggctgctttcctgtttcagttgcagagctgagttagttgagaaagctaaaaatatttacttgtccttaacagaaagtttaccctcccttctctattcctgtcgattgtatgttctgcttaaagtgtacccttaagttctgtttcttttggtaggccacctgaaattgtctctactgatttgcaaatctgattatatattattgtgttggccatgagaaatttttaatatatgtaatgtgctactcaaattcattgaggtttttttcccctaatttgtctgagcacagaaacaaaccttaatgcaacacattctgcgctgtgactatgaggcctgtcgacaatatctaatgaatcttgagcaagcggttgttttagagcagaatctacagatgctgcagacattcatcagccacagatgtgatggaaatcgaaatattttgcatgcttgtgtatcagtttgctttccaaccagcaataaagaaactaaagaagaagagggtgagattaagaactatagcaaggtctttaaagggagttttaggcaattttgaaaatgtaacagttgttaaagaaaagcaaatcactataaagaatttgtgtgtccttttttttttttttttactttctcagaaggtaaagatgggtatgtaagaaaaaaaattttgcaccagtgtgtttttattgtgtttaatactatatgatatatacaaactggatatgtaatgctaaatgaactttactgattttataattgcagatgacttattacatgagaattatttagcaggttaagccaagttacattgaggcaacttttatctaaatttttagaatgtagaggagaaaaatcacttagtgaggtgttatatgtttttggaaggtaaataagctttttttgccataaagtttttaattggctaaatgaagggagaaattgagga

SEQ ID NO: 16328 - DNA, 1750 bp, Homo sapiens
gttgagtgtattgtagccactagctgtatatgtggctgtttaaatttgttaaaatcaaataacttaaaaaagtcagcaccttcgtcacattagcttcatttcaagtgctcagtagccacttatggctaatggctgccgtattggacaccgccaatatagaacgttgccattttcaagaaagttctgtcagaccgaaggctgctttaatttaattaggagatgggaggatttcacgggctatatacttaagtttttcagttgattactgaaaacattcactgactgtaatcactggctgtgtgggtcagttttctctagcaaatgagccttgaatatagatgtcagtagcaaagctcagagtctgtctgggttgattttataacttggtgatcattgaagaaacatacaaagaattggattcctttaacattaaattagttcagtgaatagaatttgtatgttgattttatataagctattgctaatgttcattgaatttgcctatacttccaggtgctaaaagtagatggtgcctatgttgctgtaaaatttccaggaacctccagtaatactaactgtcagaacagctctggtccagatgctgacccttcttctctcctgcaggattgtaggttacttagaattgatgaattgcaggtaagtgtaaagaagttattcagcaagtgaatattggaactgactccgtgagtttattatggagtttgaaagcaaaattccttttgtgtcatgcaggttgtcaaaactggtggaacaccgaaggttcccgactgtttccaaaggactcctaaaaagctttgtatacctgaaaaaacagaaatattagcagtgaatgtagattccaaaggtaaattttgaaacttcttcagctggcatatcctatattccattaatacttgttcaggaaatgggaatatgataaaataattcagggcattggcatttttttgttccctatctgtaacattatggaatggcatgtatctgtttgaattgacttacaagtgtggccagagaagttaaaatattgtagatgtttattagagataagatgtataacaatttttcttctcatttatgtgcttctgaaggtgttcatgctgttctgaagactggaaattgggtacgatactgtatctttgatcttgctacaggaaaagcagaacaggaaaataattttcctacaagcagcattgctttccttggtcagaatgagaggaatgtagccattttcactgctggacaggtagaggctcatttttgcttttgaaaagtgataggacaacaatggcatttttgtgaggttagggggtctggctctggttagcttatcaattattcaaaaacctagaatatttagcacatttgaatactaggtttcttattactattactaaaatctaatttggaaataaatatgcctgtaaaaatcagatacattttttgattaggagtcaaactttaccattttcccattattataggaatctcccattattcttcgagatggaaatggtaccatctacccaatggccaaagattgcatgggaggaataagggatcccgattggctggatcttccacctattagtagtcttggaatgggtgtgcattctttaataaatcttcctgccaattcaacaatcaaaaagaaagctgctgttatcatcatggctgtagaggtaatttgagtattgaaactactgggcattttaattcacaaaacaccact

SEQ ID NO: 16329 - DNA, 1135 bp, Homo sapiens
gctggagtgcagtggcatgatcttggctcactgcaacctccgcctcccaggtttaagcaattctctgcctcagcctcccaagcagctgggataacaggcgcatgccaccatgcccagctaatttttgtatttttaatagagacggaggtttcaccatcttggccaggctggtcttgaactcctgactcatgatccacctgccttggcctcccaaagtgctgggataacaggcgtgagccaccacgcctggcctagaaacaaattttcttaatgaagacctttaaggtggtgctttttcagccttattgattgggtaagattatactgggaaacctaggaagcccagtactttcatatattgtatttcatccatttgaaataaatattatatatatttttaaagttatgtcatcttgatggtggttttcttttgtttgctaggtatgcttgagaaataatcctctttatcatgctggagcagttgcattttcaattagtgctgggattcctaaagttggtgtcttaatggagtcagtttggaatatgaatgacagctgtagatttcaacttagatctcctgaaagcttgaaaaacatggaaaaagctagcaaaactactgaagctaagtaagtactatagcttaactaatcgtgctttgacaccagttccttgtttgctctgcatatgaatgggaataatcaaggaagacttagaggtgtgaagttgtaaactcctaacatgatagggtcttgttaaggttcccaggaaatttgaaaggaagtgctaaattttactgtttgtaactttgctaatatatatctattaattaattaattaatttattattattatactttaagttgtagggtacatgtgcacaatgtgcaggttagttacatatgtatacatgtgccatgctggtgtgctgcacccattaactcgtcatttagcattaggtatatctcctaatgctatccctccccctccccccaccccacaacagtccccagagtgtgatgttccccttcctgtgtccatgtgttctcattgttcagttcccatctatgagtgagaatatgcgttgtttggttttttgtccttgcgataatttactgagaatgatgatttccaattt

SEQ ID NO: 16330 - DNA, 1059 bp, Homo sapiens
caagccttccaagtagctggtactgtaggcacacaccactgtgcccagctgatttttaaaacttttttctagaggcagagtcttactgtgttgctcaggctagtctcaaactcctggcgccaagtgattctccctccttggcctcccaaagtgctgggattacaggcatgacacctggcctaaagtcactaaattcttttaaaaattggtagagcaaatgtttacttctgaccttaaagatggccttagacattcatttgaataactgctattttgatttgtgtgaaaaagtattatagtttctagtcttactaagaacctctctgaattacttatttttatagcatttaactcaaaacattttagaactccagtctttaaagtatatatgccttgccctagtttttaccacaatccttttgaaaagatggcttgattttatttaaagttctaatattttattctttaggttgctacatgggtggatgaaactttaagttctgtggcttctaaattagagcacactgctcagacttactctgaacttcaaggagagcggatagtttctttacattgctgtgccctttacacctgcgctcagctggaaaacagtttatattggtggtgagtctatagggaggaggaatttatcggtgaatgcttgtgtatgtatagaaagatgctttgagtagtggaataccaacatgagaagttcaattaaaagattatgccttatggaagggaaatttcactttggaacaaagtaacattttaaaaaactttaacagttaaatttataaaaatacatacttagtgaatataattaataagttttatgaaagtataaagtagaaacaaaagtcatttagaatcctgcaacccagagataactacagttaacatttggggtattttaaatctttttttcctctgcataaacatgtactttgcttttacataattgaaagtataggttatagagtatttttttcatttcattgtatgaatattctctaccttatttaattatagctttactgttagaaggtgaccttacat

SEQ ID NO: 16331 - DNA, 2002 bp, Homo sapiens
ggatctcgtagaacacttaatgtcagacaacaggacaaggtgaggttttactgaatatggtgggttgtagtcatgactcatatcatgagttctgaaacaactgttttcctattttgatcctagaaaactttttttttttcctttgagagggagtctcactctgctgcccaggctggagtacagtggcatgatctcagctcactgcaacctccgtcccctgagttcaagcaattctcatgcctcagcctcccgagtagctggaattaatgggtgtgcaccaccacacccagctaatttttgtattttttagtagagacggggtttcaccatgttagccaggctggtcttgaactactgacctcaggtgatccgcccaccttggcctcccgaagtgctgggattacaggcttgagccaccacatcctgtcctagaaagctgattttgataaagaatttaatcaaaagaaaattaccatagcacttctttttattttttatttcaggcccaagttgttttacaaggcaaatccagaagtgtcattattcgagaacttcagagaacaaatcttgatgtgaaccttgctgtaaataatttacttagccgggatgatgaagatggagatgatggggatgatacagccagcgaatcttatttgcctggaggttggtggatcaccgtcatgtttttctcatttctggagtgctctttcgactggggagtggaatttaaagcacaatagacttttctgaatattcttttcaaggtggtagatatttttcactgtagagttgcttgattttattgtaaagtttcttttatttttttcttttcttttttgagacggagccttgctttgttacccaggccggagtgcagtggcatgatctcggctcactgtaagctctgcctcctgtgttcatgccattctcctgcctcagcttcccgagtagctgggactacaggcgcccgccaccacgcctggctaattttttgtattttagtagagacggggtttcaccatgttagccaggatggtcttgatatcctgaccttgtgatccgcctgcctcagcctcccaaagtgctgggattacagatgtgagccaccgtgcccggccacaagtgttatatcttaacgagtgatctttcttgtgattatgtagtaagtagctcaggcgacatttatgcatttgatgttctttaaaatctttgttaataatgtaggttgttgtgtttttcctcaggcgatgtcattccctagtttttaaatgtatgtgaatttttagagctctttcagcagtctacagttgctctttgtgtgtatgctgcagtgatgtttgtttctgtttatagaggatcttatgtctctccttgatgccgacattcattctgcccacccaagtgtcattattgatgcagatgccatgttttctgaagacattagctattttggttacccttcttttcgtcgttcatcactttccaggctaggctcatctcgaggtaattttgcatttatttatatatttattttggtcacaggctagctgtatggaaagatagtggtagaatctactgactgtatttgaacttctaatattacagttattattagttttttatgaatgcattagcattaaaattaattattttttattttgaagagccacaatagtattttagagttgatcctatttacgttgtggaattgatgtcaaggactatgacttcacctaaatgtatttttaattaggaatatggattctgaactaaaagcagaattctactttacagtgacatgcagcattcagaaaacaagtcttagtttatttggttaaaataagtgatctgtttattttaaatcctggttagataaaataatgaaatgtgaaaaaacttactagaatggatttaggaccaatattaaatgaatagaaatgtttagtttattagaatgccttttttttttggggatgaagtctcactctgttgcccaggctgg

SEQ ID NO: 16332 - DNA, 1266 bp, Homo sapiens
attcagaagggatatggttattctaaggctgagggaatagttatgtaaacaaaaataaaagagtagtttgtgagtatgatttagttagggaattgtgtttggagtacaggctccttctggaagagagagatgcgattagagtgacggtagtgaccagaagaaaaaaaaacgctgaaataaaaactcgtgtataagaaacaaggagttacagtgtgttcacagatttctttttccaagaattcccagacttagctttcattccctggatcctcaagttcctagcagatcttaggaatcaaataaggccctatttagtttgagaaccacttcaagccagagcttggcagagttgaagtagcaatatagtgagctatccaaggatgaaaaatacatttcagtaatattgataaatggctgccatttattgaacacttaagtgcctgctctttccaaggtatattacaaaattatcttgaatccttacagcatcactgctagacaagtggtagttctatctgcatttaatagatgaagaaaccttccatgcctctgggatgttaaaataagctctaccaaagttccagagccagttcacagtagagatggaatcaaacccaggtttctgtgacactacagcgtactcttcacacctcaccaagctgcccctcacaagagagtaggtgtgatgcctggggctgatgaaatggcagcttaggacgtaaagtgaccatttcaaaggcagcaaaactgcgatttcatctttgacgttaataaaacggcaacaagaagccatctcagtaaatctcgtacaaagaaactctccagaatctaatggcatcaagatcctcgatcaggaatataaccccgattgtcttgtttctatagagaaatcagatttcatttcaggtattttatttcagtttacagttctttctcaaggactgaataacttaccaaatagcagtgtttatactatgaagtacatcagctatctcttgagatattttatttgtatgtagagttaaaattggatttgtagtaatttgaatacattatctgcatttgggagatgctttacggaatgaagtcacaggtattcagaatgtggatggtctatggtgaagaaagcctagtatattctcttgaaattttggtcggatgctacacttttttggtcaggagccctgaagaagtctttcggtcttatctgctagcatagtttgattcttgtatgaatgtatatatagtcttactgttaaacaaatg

SEQ ID NO: 16333 - DNA, 1513 bp, Homo sapiens
acccacacgggtgagaagaaatttgcgtgccccatgtgtgaccggcggttcatgaggagtgaccatttgaccaagcatgcccggcgccatctatcagccaagaagctaccaaactggcagatggaagtgagcaagctaaatgacattgctctacctccaacccctgctcccacacagtgacagaccggaaagtgaagagtcagaactaactttggtctcagcgggagccagtggtgatgtaaaaatgcttccactgcaagtctgtggccccacaacgtgggcttaaagcagaagccccacagcctggcacgaaggccccgcctgggttaggtgactaaaagggcttcggccacaggcaggtcacagaaaggcaggtttcatttcttatcacataagagagatgagaaagcttttattcctttgaatattttttgaaggtttcagatgaggtcaacacaggtagcacagattttgaatctgtgtgcatatttgttactttacttttgctgtttatacttgagaccaacttttcaatgtgattcttctaaagcactggtttcaagaatatggaggctggaaggaaataaacattacggtacagacatggagatgtaaaatgagtttgtattattacaaatattgtcatctttttctagagttatcttctttattattcctagtctttccagtcaacatcgtggatgtagtgattaaatatatctagaactatcatttttacactattgtgaatatttggaattgaacgactgtatattgctaagagggcccaaagaattggaatcctccttaatttaattgctttgaagcatagctacaatttgtttttgcatttttgttttgaaagtttaacaaatgactgtatctaggcatttcattatgctttgaactttagtttgcctgcagtttcttgtgtagatttgaaaattgtataccaatgtgttttctgtagactctaagatacactgcactttgtttagaaaaaaaactgaagatgaaatatatattgtaaagaagggatattaagaatcttagataacttcttgaaaaagatggcttatgtcatcagtaaagtacctttatgttatgaggatataatgtgtgctttattgaattagaaaattagtgaccattattcacaggtggacaaatgttgatgttgtcctgttaatttataggcgttttttggggatgtggaggtagttgggtagaaaaattattagaacattcacttttgttaacagtatttctcttttattctgttatatagtggatgatatacacagtggcaaaacaaaagtacattgcttaaaatatatagtgaaaaatgtcactatatcttcccatttaacattgtttttgtatattgggtgtagatttctgacatcaaaacttggacccttggaaaacaaaagttttaattaaaaaaaatccttgtgacttacaatttgcacaatatttcttttgttgtactttatatcttgtttacaataaa

SEQ ID NO: 16334 - DNA, 1336 bp, Homo sapiens
acttcactttggtgccaatggacagaaaattctacctgtgctacataggagaagtttggaatgcacttaatagctggtttttacaccttgatttcgaggtggaaagaaattgatcatgaatctctaataaatttaaatctcttaaaccagtaggtgcttaatattttttgatttgattaatgcccatttaaatctcatgggttctattaaaaatatatatatatagggccccaatccattgccatcaaattgcccttggacttttccaaggtatattatggggttttatgcaaaattccaagctaccatgtaactttttttaaccatttaacaaggagggggaactgtttcctaccttctttacatgttgtgcattgttgtggtccagaaatgccaaacctttttaaagatggtgcaactttgagtccttggcttgactatacaggccttgaacttcatggcatatcaactttgccatatctgcaggagagctgttctataagaaatagctcagagttgcaaatatcacatgtgaatgatacggtaacttttaagaaatgtctgtattgtatttgaagactgtttgccataaatctgaaatttgaacctatgtatttcaatttggtatgctaaaaagttctgaattaatgtaaagttttttgttataatattgtaatctcagttcaaaagttaactgcaaatataaaacccaatgatttctatatagtaaattgaactgtaaaggtaacttgtgtgtgattctgaatacatagataaatgtttttattcctcatgttttactttggcttctatctgaaatagaggtaaaattttacatatcagctttatgtgtattaacaatcttgctttattagaaagaaaattgattctgctaaaaaatgctggaagttatatatagaacagtgaaattttggtaaagtccagtatatatgtgagcactgtttccaggacagccttttctagacacttcagttcactagcctcctaacaatttaaaacccggactaaatgaatagattgacaaattaagctagatttattccaagtaaatatgggcattaataccattaaatggaaatactgggttagagaagccacacattgcttaattccttttttcttctttttagagtatatattttagtttcctaacctgtcttggccttaagaagtcttctgaactctgctgaaatgaaaagcatcatctctttgttctttgaacactttagttaactgggtgacttaatattttggggagtaactttaaattcaaagatttacttaattattcaggcaatgcactagtatagggtgg

SEQ ID NO: 16335 - DNA, 1190 bp, Homo sapiens
ctcaattctttgttaccctcttcataaacttttgagccatagaagttaggtatcataaatctccttagtgatcatcgagttcatcactgtcactttactgatggatactctgagactcagaaacagaaaactacctgccaaaggtagcacaggtagttaaactaaatagttagaattaaagtattagaattaaataagaattagaacttagttagaaataaaatgctagcattatttccagtgaaggattatagaaaatactctatgtattttgattctcatttttcatttatcttactgttggctcaggctgtttttcacgatagagatgtgaattgccttctcacttgccctcttctttctcatctctgccagtactaatagtaactgctatttccagggatttctgccagggactgaccatttccttaaaggagcctaccttttatttcttgatttttgaaactgtaattaataacgctgttttagttattgaatggtagaatctcagaaccaatattaatagttattagatgagttttttgagaatgaaatttgaaaggaggagtttataagtgagatcatgaaagcactgggttactaagagagttgaagaaggtggtgtcactaaaggtgagtaaaaggaacagactgatgcgaccaggtttgatatttgctcaattcatagatttgcactttaattcatgagtttaattcacaggtttggcacttaacgtgctaaatcctagtttaatgatgtgatgaaattcatagcataaaattaaggacataagaaatatctcaatgagtcatgttagatttggtttctgagaatggtacccaggacattttgaggaagaacataaaacatttcaatcacaatttttacttcaaaagactgtgaaaatatgttcatcccagttatgtttcaactgattggtataatgagttcaatactaggctgactacccattatttaaagtgctgtgatttgttctgaaagtactccatatgatggaatacttgctcttgcttcaggagataacgcatcatctggaatgtgatcaacatagcttgaggttttatagtctttgatatgtatcctgtgaacatttattttttttaactgaagagtttctttcatgtggaagagtcccaatcctcttgatatattttcttcccttcatcct

SEQ ID NO: 16336 - DNA, 1147 bp, Homo sapiens
ccccaacatgtattttaaaagtgatgagctagagtttgcaaaaagttttattggaacagtttcaatattttgtctttgtgcaactctgttcacattccttacttttttaattgatgttagaagattcagatacccagagagaccaattatatattactctgtctgttacagcattgtatctcttatgtacttcattggatttttgctaggcgatagcacagcctgcaataaggcagatgagaagctagaacttggtgacactgttgtcctaggctctcaaaataaggcttgcaccgttttgttcatgcttttgtattttttcacaatggctggcactgtgtggtgggtgattcttaccattacttggttcttagctgcaggaagaaaatggagttgtgaagccatcgagcaaaaagcagtgtggtttcatgctgttgcatggggaacaccaggtttcctgactgttatgcttcttgctatgaacaaagttgaaggagacaacattagtggagtttgctttgttggcctttatgacctggatgcttctcgctactttgtactcttgccactgtgcctttgtgtgtttgttgggctctctcttcttttagctggcattatttccttaaatcatgttcgacaagtcatacaacatgatggccggaaccaagaaaaactaaagaaatttatgattcgaattggagtcttcagcggcttgtatcttgtgccattagtgacacttctcggatgttacgtctatgagcaagtgaacaggattacctgggagataacttgggtctctgatcattgtcgtcagtaccatatcccatgtccttatcaggtaaaagctatcacttggattatgtctctatttacatttaatgtagaaaatgtttcatggaaatatacttgtcatggatgtaaaagttgatttcaggtgagaaaatacaagagccataggtaaggatttcctatacatcaactgaaactgggatgaatgtttcatgacttccttcctcaagctttagcttcagttgtatagtaaagcacttcctttattctctgaaaaattaaattgagctgcaaaggcagattaatagcaataaagagcagagtcagaagaacagaccttgacattgggagaaaaaca

SEQ ID NO: 16337 - DNA, 1219 bp, Homo sapiens
ctggccagaccattttagaattgggaaattttagtgagaaaaaatgcactgtaaatatgctttagttttaattcagttgggatgcactacctagcgaaaattgagaaactatatacttctcagagaaatatctgacatctattgtcattccattgctattttttttccccagagacttccataatttaaaataaaatcctagatccagttcttgttttttggcataaatacttaatctattttaaatttataaaatctgagcttctaggatccagctgtgtcaacctttatttagcatatataactataaatcacttattacagatgctaaatagatcaccttttacagatgctgaaatgtttgggatatgtttgttgacaaggtaaatggaaatgagaaactttatacttcagttttcagatatatggatctagatcccaaataaatgattaatcttcattggtttctcaaattcaggttgaaatacaaattaatagcctttattgattttacttttatgagtcattgtagacatctataaatataaaagggcctgtacccaaaggatgccagaatactagtatttttatttatcgtaaacatccacgagtgctgttgcactaccatctatttgttgtaaataaaagtgttgttttcaaagccatctttaaatagttctttaaaaataggtcttttttttatattttggaaaaggcattgtttttaaagtaaagataaaatggtaagtacctaattgtatttactgtaatatcttataacatgcagatgaatgctttataagttaaatatgatgtattttttcatacttctggattatactataattcatatgaaatcttgatattagtccccacacggaaaaagtgaactgcagttgatatttggtgtttaagatagcaccattgtttaaataccgcctatgtactcccaaatgaataaaacataattcttgtcctctgagagcatacaagcttgtgtgatagataaatatgcattaaataattacagctatagattaagaactcgtaaggaatatctcacaaagcctggtaagagttctgacagaagagaactcaatttcagtcattcaacaacaaatagtcactcaactcctgctctttggcaggtacgtcaccaagcactgaggatatagcaataaataagccagacaatattcctgccctcagggaattttca

SEQ ID NO: 16338 - DNA, 1177 bp, Homo sapiens
gaaactcattgaagtggatgataaacgcaaactctgcactttttatgagaagcatatggccacagaagttgctgctgatgctctggttgaagaatggaagggttatgtggtcctaatcagtggtgggaatgacaaacaatggttccccatgaagaggggtgtcttgattcatggccgtgtccgcctgctaatgagtaaggggcattcctgttacagaccaaggagaactggagaaagaaagagaaaatcagttcgtggttgcattgtggatgccaatcggagtgctctaacttggttattgtaaaaaaaggagataaaaatattccaggattgactgatactacgatgcctcatcacctggggcccaaaagagctagcagaatccacaaacttttcaatctctctaaagaagatgatgtccaccagtatgttgtaagaaagcctttaaacaaagaaggtaagaaacctaggaccaaagcacccaaaattcagcgtcttattactccatgtgtcctgcagcacaaatggtgccatattgctctggagaagcagcatactaagaaaaattaggaagaggctgcagaatatgcttaacttttggccaagagaatgaaggaggctaaacagaagcgtcaggaacaaattgctaagaaatgcaggctttcctgtctgcaagcttctacttctaagtctgaatccagtcagaaataagattttttgaataacaaatcgataagatcagactaaaaaaaaaaggataataggaatatagactccatttgtttaaaaattaaccacatgagatagctttttgtggagcttagagaggcagggttagtaagaataaaatgaaatactaaagcactaggtcacataatagaatattaagttttggaatgcatttcatcaggaagttacgtgtgttaaaaataaattcaataaatttatgagtaattaattcatcatagacaaggtaaagcctatctgtaatctttgttttttgtttgtttgtttgtttttgttttgagacagaagtctctttttgctcagactggagtgcagtgccatgatctcagctcactgcaacctccgcctcccgagttcaagcgattctcctgcctcagcctcccaagtagatgggattacaggcacccaccaccatgcctggctaattttt

SEQ ID NO: 16339 - DNA, 1132 bp, Homo sapiens
gtaaaatagagaagaatgtttttgtaagcttctcccttatgtcgtatggctacctttaggtgctgcaggacagcatagtgtcttaaatgaacccactgatttttcatgaatttttttcctgtgatcatgcaaatttgcaccttgtctttgacagcagaaataaaatcataaatctgattttgcatatttgctctaaggttggcccagagtaacaaagcacaatcaagaccatggtatttgaaattttttaactcctaaaaatatattccatagatgatataatttaattatactccaaatgttttatctaaaatgcattttctgtcttttcctttttactcttgtcctcacttttaatgatccatcggctgacagtgtctttacatccaaaatgcaaagcagacaaatgggcatatcagggaagaacatgacaaaaagcaccagcatcagtggagacatgtgctcactggagaagaatgatggcagccagtctgacactgcagtgggcaccttgggcaccagtggcaaaaagcggcgctctagccttggtgccaaaatggtagctatcgttggtctgtcacggaaaagtcgcagtgcttctcagctcagccaaacgggtaggaatttcaatgttacttttaacttgatatttgagttgtcattacaagatatatttcttttctcttactcattttattgcagtaatgtgtggatgatgacatgttccagagggaaagggcattttaaactagttaacctttctgaaatcaacaatgatgttttttccagtgatcaatgagcctgcttccaagtgaaccttggccagtgttcttaaaatgtagataatgtctttcctcctcagggaggagttacgctgtgacacccaattgccagctgctgatcctttgtaaagataatctgaaatgggggatatttgcttttctttaggttcctcaagttggaaccagctaaattaatttccattcccagcaagatgctgtgaagatgacttctcatattttgtgtgaataatacagttcttgttttgctgacaacccaacttccttttcagtttgtaagcaacatttaccagtagttatcaattttctcactgcaatttttatttccctgt

SEQ ID NO: 16340 - DNA, 1111 bp, Homo sapiens
aaatatcacttgctgttttatgtcttttaaagattataatttttctccttctctttccatctatttctactcacatcttcacagggaaatctgaggaaccaaattgtgcttgtgatcagtttcgttgtggtaatggaaagtgtataccagaagcctggaaatgtaataacatggatgaatgtggagatagttccgatgaagagatctgtgccaaagaagcaaatcctccaactgctgctgcttttcaaccctgtgcttacaaccagttccagtgtttatcccgttttaccaaagtttacacttgcctccccgaatctttaaaatgtgatgggaacattgactgccttgacctaggagatgagatagactgtgatgtgccaacatgtgggcaatggctaaaatatttttatggtacttttaattctcccaattatccagacttttatcctcctggaagcaattgcacctggttaatagacactggtgatcaccgtaaagtcattttacgcttcactgactttaaacttgatggtactggttatggtgattatgtcaaaatatatgatggattagaggagaatccacacaagcttttgcgtgtgttgacagcttttgattctcatgcacctcttacagttgtttcttcttctggacagataagggtacatttttgtgctgataaagtgaatgctgcaaggggatttaatgctacttaccaagtagatgggttctgtttgccatgggaaataccctgtggaggtaactgggggtgttatactgagcagcagcgttgtgatgggtattggcattgcccaaatggaagggatgaaaccaattgtaccatgtgccagaaggaagaatttccatgttcccgaaatggtgtctgttatcctcgttctgatcgctgcaactaccagaatcattgcccaaatggctcagatgaaaaaaactgctttttttgccaaccaggaaatttccattgtaaaaacaatcgttgtgtgtttgaaagttgggtgtgtgattctcaagatgactgtggtgatggcagcgatgaagaaaattgcccagtaatcgtgcctacaagagtcatcactgctgccgtcatagggag

SEQ ID NO: 16341 - DNA, 1166 bp, Homo sapiens
gttttaatttaactttgattcttggaaagtgttgtatttaatcacagttctagttcagactttttcacgcgtgcatggtattacattgtattgatatatcatacttatttaaagcattagactatttctactcttttgctaaggtcaatagtgctgtagtaaacatgcctgtacacatctgtttttctttaaatgtaagtatttctgtagggtgaattcttagaagtaaagttactatatcagaggatatgtgcactttaaattttgctagctattgccaaattgtcctttaggagtgacacctctatagtgtatgacaattaatgtttcctcaccctattccagccgtatatattatcaaatgtgtctaaactgattttaaaggttcttttttaaaaatgtttttatattcttataatttgaaaatttttatgtttttctgtttaattggtaattgttaatagtgcttgcttatagaacaccatctaattattaacacttcattttaactaaatctttgtgtgaatgttttcttacaggttctgtatgttcctgatcctgaatatgtctccagtgttgagagctctccatctctaagccccgtaagtcctctgtcaccaacatcatctgaggctgaatttgataagaccactgtaagtatctctgctttgcaaagatggcgatgaagaaatctcactttgtctacattgactgtcttgttttttacattccattttgactatggttagaatgaaatatttcctttttattttgttgcttaagtttgtaaatcccagctttaaaaataagacattcttatgaaaccatatagcttaaattgacttacctttgtaggtggtggttgtgggccaaaaatattcatcaactcttattttttaaagaacatatataatttaacttacaaaggaatcttacccaaaaaacatgacattatcacagtagaggaagttcatgtccaatttgatgtttatttcatctataaataaatgagtatatagtacttagaactcttgagtttaattttgacacattgccttttaaaaaataatttatcatcttagtcatccaagaattgacatagtagattaatttatctagcatttctaaggaatgagtgttctaataacttacattttacaaatgaa

SEQ ID NO: 16342 - DNA, 1449 bp, Homo sapiens
tcttactttgatatttcctaaatattaagcaattgatataaaagtttgacttaattacttgatttatagaattacttggtctataaggttaattatttggtcatattgaataaatcagattttttatattctttggagatacgtgctacatccttttgttaaaaagtctttttagtgatactaattctgtgttcagtgtgtgaaaagtaaaataccacaattttaaaagtctaattatttttaattttgtttaatgacagagatatagatcagctatcaggaagggacttctgccattcaaagaaaatgacaggaagtaacactgaggaaatagactcaagaatccgagatgcaggtaatgatagtgccagcactgctcctaggagcactgaggagtctctttctgaagatgtgttcacagaatcagaactttcccctatacgagaggagcttgtatcttcagatgaactgcgacaagataaatcttctggtgcgtcatcagaatctgtgcaaactgtcaatcaggctgaagtagaaagtctgacagtcaaatcagaatctactggtactcctggtcacttaagatctgatactgaacattctacaaatgaagttgggactttatgtcataaaactgatttaaataatcttgaaatggccattaaggaagatcagattgcagataactttcaaggaatatcaggtcctaaagaagacagcacaagtataaaaggtaattcagaccaggattcttttcttcatgagaattcgttacaccaagaagagagtcaaaaagaaaatatgccttgtggggaaacagcagaatttaaacaaaagcaaagtgttaacaaaggaaaacaaggaaaggagcaaaatcaggactcacagacagaggcagaagagctacgcaaactttggaaaacccatactatgcaacaaactaaacagcaaagggaaaatattcaacaagtgtcacaaaaagaagctaagcataaaattacatctgctgatggacacatagaaagtaagtgttatagagtaaatgaagttagttcatccaattgtatggtgtctccgtctttcctcactgactcaaaagccgctgtaccttagggcaacctgaaggataagtgagtgacccttgaccggtgattctctggggacaagtatatacagtctccagtgtctactgtcttttcttatcccacaggtggattgtacacataatgagcatcattgctacccaccatgtttaaacattcttggctcactacatcgtatcattaaacaatttatttcttgagaaattgcacaaaagctgtataatacctttgatcactccattttctcttaaaaagtttttggtgtgttaccattaaaaatgtcttttttcatatataacattttaattgccaaagttgtaatcccatcttttataaaatgtacagt

SEQ ID NO: 16343 - DNA, 1203 bp, Homo sapiens
tggcacaggtaacatttggacatgttcatcttattcttaggaaggaaaaaatcacttgccaaaataatacatacttcatagaccactgagttctagtttttattcacactacaacattctctttaacgatgttgcaggtattctcaatttccttttaagaaaaatgaaatgtgaggagaattctggttgtaatagatgacagtacatatgatctgcaggtttgggcatatgctttcatcattaaattatctgataaagttacaagtcacaaaggagaatgagaacttaatgattctattggatttaatatattagcaagaaaacatactatttacatatgtgtagcttagtaaggcattaacataagtacaaaaactatgaaacagatgcatatttcctcaacatactgtgtcaggtatactgttttataatttggttgttttagccttattgcacaccaactcccaaaatataggttactcttgttcaaaaggaaaaaaaaaattgtgattttctttgagtggtatatgttattaattaccattagcatttgctcttataaagggcaatgattatagtagacaatattgtaactcagtagacttgttgaatatgcaaacttactgtcaagtgacctcaaaaaaaaaatgaaaagatagaatacactagtagttcttatcctcttttgtaggaaaccaataatagccattgtggcaataattcatcagttgattttaaagcttcatgttatgcaaaaaagaatcctgctgttatacatgtgacagtgactttgtgctgaaatttcagctattccagataaacattgtatatcttgtaaattaatgtttaaaggtgtagttttgttcttacagaaagtgttgattgccaggttgcttatagcactttaagttattctaaaaatgaaattataagccaaatatttggcttaagtagatttagttgtatagcacttacatatttagttcttttgaaagtttagataattatttaaagaaagcataatgctaatggaaaagaaaatctgatgttctattataatatgctattgctgaatatgaatagaaatacagggcatcatttccttgtctcattataagttagtaacaatatatagattaaatgtttacaatatagggaattgtaaataaatatatcagtttttttccccttcggtcttccaca

SEQ ID NO: 16344 - DNA, 1180 bp, Homo sapiens
aaccaatgtcttgtaatattgtaatattccttccccgttgcttccagtctttcatcccctgaattatttaatttaagtggctgattttctcattagtatgagtgctttgcacataggttttcacacatttttttctaatgggtgaatgaaagtcatcgcttagtagccttttggaacagactgacagcatgtcaatgaaccttgcaaaatcctgttactcaaaaataataataggataattagcctcttgattgagtcttccatctcaccccatattaaagaaatagtggctagcattctcctcatttggattcctgaaactggattctgtttttaaatttccttggaggagattttcttataatactcattcttaagtgtttgcagtcttaggctagtgaaatagtacaatctaatgacctgctcgagagttttctttatctcaccctgggtaagttattaaataacttttatattttttcttagatatcttaatgcaattcagacaatgtgtccacacattcttcgctatttgactacagcagtcataacaaacaaggatgttcgaaaacgtcggcaggttctaaaagatctagttaaagttattcaacaggtaaaactaaaatatatattgatttttttttttaaatacctaagctttaggtctaacctctttttctaaggtaagacttagttcttaaggtacaaacgtttttaaaaataggtggaaggaatacttgaagtttagaaaagagaagaccctcaaatgggcttttgttttccttaagtccaagatacacaagttggatgtggtaggaatgattattactgtctgctagatgaacacttaatatatacattatgtgtatgtgtttctcttattgcaaagagtgaagaaaatctggaacctggaggtgggggtcattacctgtgtaattctacatgggtgaactttatatacaataccgtttcaatagaccccaagttgggcaaaaggtttcaggcagccatgctgattgatatttagtgagcttgtcagcaaaacccgtagattagaaatataacttaaatatttatttaagagtgtattaaatacaaagaagttattgtcattcagtagggaatgaatacccttatgattggggaagtttattactgtttattgaccaagggagacttt

SEQ ID NO: 16345 - DNA, 1134 bp, Homo sapiens
agtatagctttatgtaacttttagccagttgctctgccacagacatagacaaagagagataagatttcacattatccatcactgcataacaaaccacaccaaaactcagtggtttaaaacaaggacttttattatttttcacgattcagtgagttggctgtctctgctgtacagggcctctcagcctccagtagactagacgaatcttctttccatagtagagaaaacatcttaagagagcaagctccaatatgcaagagcttatcgatcctgtacatctatcatatttactaatgttccattggacaaagcaaatcacatggccaagtctagagtcagaatgaggggactacacaagctgacagcggatggtatgactcattgggggccattgatggaacaatcttaccacacaaggacaaattataatttatccttgtggctctctttatttttctaacaacttcaacaaaataatcctgtttatatgttatagtttcttgccacaaattttgttttttcaaacttacctttccaggtttgttttagtatgtatgtacctggaaatttttattactttttataccatttcaagatatgtatcttatataaacctcaagttggattttatattttaataaggaagttaagaccttcatttaagaggcagaagattaagataagaaatataagatagaaaagctttgttcctaacatatcttttgcctgtctgggcaagtatttgactcaactaaattttaatgaacgaatgaatgacagagaggaggaaaaaagatgaggattgcatacatgttctaaaccctttgtcagattgcagtttcctagagagtattgaggtgctaggtagaaagttaggaaaggtcctgaggactggtattgacaattggagtcctaatagtactctattcgtattaggaaagagagactagataccaaacatcacgagatcatagagatggaaaactgtatagtaaccaaaaaccaaaacagtgatatttccagaactttttagtattgttgtaaaacttcatgaaacaaaagaccatttaaatagtgaattattaaaaatctttatgatgggaaagtagatctaaattttctctaaaattttcc

SEQ ID NO: 16346 - DNA, 1325 bp, Homo sapiens
attagtgagaaaattttaagactttcaacattttatttggtgataataaaaaggcactgctatttctttctagaatttatttgccattttacctgtttggtattttctaaaagtaaaagtatgtttcttttcagacagcagaaactagcagacagagaaaagagagcagccgaacaacaaaggaagaaaatggaaaaggaagcacaacggctaatgaagaaggaacaaaacaaaattggtgtgaaactttcataacacatgttcaaattttatcatgccagtaggagaaatctcagctccacaacccaagcaacatttgtatggatttaagagtattttaagaagacatactgcttgattttaatacattgatcaggccatccaggacaccacgattctcccaaagtaccttgaactcttagtgattgagactcaaaaaaacaaaaaagacttgagacaatgttttcttcaacatgctccaaatataagacatttgtttgctgtacagaaagtatcacaaatggaatatatcagtacctctcaagctagtgtttctagctaaataaatgggtgtatataattttatggtggaaaagaactgtactgtctgttatgatttccttcaatgtgcataatgataaaataaataattttaatattcttttgtttccatggttacctgacctaaattagataaattgtagggctttagctttcttatttttgtcaaaagttggtgttgacatacattccctctaatttgaactggtattgtttacgtttgatacaacattaaggaatttgatgattttcatttcatgaaaatgacattaaatgcaataattttacttatcataaacattttgtacatcattattttcttttggattagtgttgtcatacatgtaatttatatcacatgtataaacattgaaaatcaactaaaatgacatttgttctacattataacttgtgagtttcaagaactagtattagtagttttttcctttcattatagattgtaagatgttgtggtatctttgagtgccttagttcttccttcctcccaaaagccattaatttacaaatgcttaaagccatcaggtcaaatatttcaaagcctttagatgatttctgtactagctttagatgtctgacgttatgtaggttacctgtgttcttggctaggaaaacattattgattcattaaatcataaaggtgggaataataatcttttatttatgatgttgattggctccaaaatagtcttaaggaaataaatactgggtctgtaggggaaaagtagacttcatagtttaaaatc

SEQ ID NO: 16347 - DNA, 1189 bp, Homo sapiens
agttacttcacttctctgtgtcccagtttcctaattggttaaataaagatgatactcatagcacctgcttcatgggttgcttgtaaagaatgaatgtcatcctcatcaacagtctttgttcctcatcaatattgttttcgatcagctgccaggttagtggagtgttatcccaggactgaacagacaggatgaatttgatgacctttaagataatgctctgatgccaaacgcttggtgactaagcatcctgctgcagaaggcacttttccaactctcaagaacctatgcccagtggcctccagaagttctggcagttttttgttttcatagcactgctgaactcttttgagagatattccttttatttataacgttaggataataagcgttctgtgcatgtatgctaacgccagggaattagaaaaggaaggaaaaatgaaaacaaaaagaatacgtgcccaaactgataactaactagacttatttttaaagcactgcctgtaatctggtctcttaggacattattaattttgcctgttttcaagatatggagcagtcctcatacatcagaacatcacagtatagaacaatcctgagatctactaagcagtattaagccattctaaaacactgatttaagtaaccccaagccctctcttatcttttatcactgcaaagctatcaaattaattcaggttggaccacctcaaatagaggcagtaaattaaaaaaaaaaacccacctagttcccacccttctctcccatcctccttctccacccatccccccaaaatacacatatttttaaatgtacaggtctccagggaggagagaggaaccattttcactgaagctaagcacagctattaaggagcagcaggagcaacggacacacgcaattatagaagacactattaaaagaagctgctctaaagtacattcagtagaatggactcttaactgctaaggcttggggggcccagccaaggtatccaagaaacgcttcacagcctaaaaagggtttttgttttagtttttgcaaattactttcctgaaccccgtataggtatttatctcagaaagggaatatttggttaaatgagccatacattgataagatacatatacaggtgtttttttttttgcattttgagaataaaagtattcttgaaaaattgtaaatgtaatt

SEQ ID NO: 16348 - DNA, 1139 bp, Homo sapiens
tcactctgtcctacaccggagaaaagcaggaataactttaccgtggaaataatgtttagcttttatcagagaaaattgtccttctagagcatagagtcccaaaactcaattctggttttcccctgttttttttttttttttttttcccaacatataaactgcagcatatcactttttctttttgtgcctcaggttcctcacctgtaaaattgaaaaatatatgtattaataatattattaataataataatggtaatgtagtacttgtttgtaaagcactttgagatccttggttgaaaggcaccataggagtgccaagtattattatgtggccaagggggttatttaaactgtcagttcccaaaggccaggaaaggttggggtcatttttcttaaagacgagctgtaaatatcaactaggcagccaatagtgttgactatgaagatgcaaaactattactaggctgataaaatcatagtttcttaatggctaccaataaggcaaatatcacaataataaacgccaaattccttagggcggactatttgacaaccacatggaaaactttgggggaggcatgaggggggaacatctcaaaatgccaatgtaaaatttaacttacagcaatattcaccagcagaaaatgtctttcatatggaatgatttcatgttgctaagaaaaagaattcaatttgtagtcctgatttgaatactagaatgttggctataatagttctgttcttacaacacatgaaattttttcgttttattttattttgttttcatagtgcatgttcatttctactcacaaacatgttcttggtgtatttcttatgcaaacaatcttcaggcagcaaagatgtctgttacatctaaacttgaataataaagttttaccaccagttacacataacggcgttggtatggtttatatggattcactttcatccttctagcaataggaaatacagatcattgtaatatatatatatatatatatatatatatatatatatatatatatatatatatatacaggctctgctgaattgaaatggtgaaatcaaatcaccattctaaaaaattattacttatattgataaagcctggactctctcaacttgttgtgctttgattt

SEQ ID NO: 16349 - DNA, 1187 bp, Homo sapiens
aagataccagatgtgacaaacaaaaatgattttctattttggctctggctgacagtatgaaaagctgtactatttacaaagatagagaaataagaagtaactgggttttttgtttggttttggttagaggactctgtatagtgataatgattttatttttcgtgagcactttgaacttcacatatttgggatccaggctttaatactgtcagctggtgaaaatatgggtgtagaagatatttttgtatgaacataaaaatttggaaattgagagtttttaaatattagttgaaaagtggacatacttgaaattccttaggttttaaagttaacactcgtttgtagataactagattgttgccattatactataccatcatttttacttgcatgcttatctccctactagcaggtatacaccttgaggacagaattgtctacctttttttcaggttctctaccacctaacatagtagctggaacatgttcactgggcctgctcagctaggtgtttagtgaatgaataaataagtgaatacgtagtaaaccaaacaagaatgtagaatgagaaggaagaaatcctggggaaaatatgatttgagattctagtattatttctgaagagtggtcagacaactttgatgagaaccagaaaagagtagtggggaccactgaaaacaagggaggatagagtcgcacaatcaggagttactgctcagttcatttagctccctcccccgaaaccaagatgaataaattacctatagaaagatctacatacacatgggaagaatgtctggttcatttaggatgaaatttgagattccttatcattgtcaagaatagatgccatcgctggactatattgtcattaaaaccaagttcaggtcgggcgcggtggctcctgcctataatcctagcactttgggaggccgaggcgggcagattacaaggtcaggagatcgagaccatctggctaacacggtgaaaccctgtctctactaaaaacacacacaaaaaaattagccaggcatggtggcaggcgcctgtagtcccagctactcgggaggctgaggcaagagaatggcgtgaacccgggaggcggagcttgcagtgagctgagatcacagcacagtactccagcctgggtgactgaaaacctattccatgttcttcacacatcaagt

SEQ ID NO: 16350 - DNA, 1189 bp, Homo sapiens
tactaactgacaaggaccatttaataatctacccagctaaggttagcagtcaatattttacatgatatttcactgataacttatttatcatattttacatgataacttaagattctgtgggtcttaagttatgcatattctcttttattactttaataaatattaaaccacaacatgatgtaattttagcttattactaagtattataagagcacttagaatataactttttacaattaccaaaaattttttaatgtcttatcaacatgaaatacttagtcatttatttagaaagtataagtttattagtggatttactgtgtcctgatttaggtcagttaccttaaaaatacgttcatttgtctgtttttattaatgctacatgccaaactaatgacatttaaaatcataggaaaaagagatttggcatttgatttatatttcatggcaaaatgcacaggtttgggtaatctcaggttcttaaattctttccacattaaatagtgagctaattctaacttttttactgtacttcttcgtgttactgcattaggtttttgaatctgcttggatgactcccgaagagcagtttagtctttgagaaaaccagatctccattgcttccatgaagatcttattaatatttagataatggagagtaacgaaaagaatttggacattgaatatgtctttgtcttctagctatcattctccccaacttaatctgtgaccctgagaaagttacttcatttctcttgagtcctcaacaaatttttcttacacagtatatgccatcttaattatcttaagtatgtacttgatcatctctagaggttcctttctagtcttaggttgtaatagtctttgtcatactggaaaaacatttttaaaaaccatcaaaatgtattctttttttctacactggaattgacatatggcactataaagatcttgtgatggtagaagtcatacatttgaacatgagaatattaatgacagcttgtaaccacagtatttcttatcctattctaagaaataattttagttattaagctggttttttttggtatgtcttgagtttatttgaacgattgaagtatttggaattgcgtcatgtaatagttcactgcaaaattaaagtaatttgtatgaatgagaaatggaatcagtatggtaaactcatttcatt

SEQ ID NO: 16351 - DNA, 1107 bp, Homo sapiens
accaaaatttcacacatttcattatttcctttcaggctcattattttctggtgttatcaaactgagtcagctctcacctcttacacaacttgtactcacttaagttttgtctttcaccataccttttcatattataaagcgaccagacactttactttgaaaacttcttttttaaaaaatttccacttgacaaatgaagaacataatccataacttagttacacagttgaacttttctcccccattgcttgtataaagtgtggagcacccatatgaattataacacagagagctaagaggtagatatttgagatatatctatcatttatagtcattttcacagatatgcaaagctcataaatgccatcacacaatctcctactgtcatactcattgatattacactttattattgtgggaaaaagtacttacattataattactcaaagatatagccatgctataattctaacaggttggtgattagtttgtcaataccctatcttacgtagaaattcaccagttatctaaaaacgatccattaaatcgacttaattatgtttaacctgacaaactacagcacatacttattgttgacataaaaagattttggttgaattcatagttttatgtctttctcagtgctcgacattgttgttagcagtaaacgtttataatacgtttaagtttagattaattcgtctcttcatgaggacattaaaccaaattttatttaaaaaataattgtaatcttggaatatacttaatattggtaaaatcagggaaagatatatagtgttttcaaaccaaaattataaaaaatgtcatagtagtttgaatatttaccttaattgcataaacttggtttatatccttattcaagaatgctctgaggttgtatcttctacaaatattgctattttttaaataaagtattagcacatttaaattttttaaatacaggtgttttttatttttttggaattctgggaacgttagatgaatgtgattattaacttctcaaagcaatcataacagaactcattattagagatattattgtataatttattaacacatcgtggatataggaaaacatctgaaagt

SEQ ID NO: 16352 - DNA, 1303 bp, Homo sapiens
agagggggttcaatttagggaactcccctccagtgaatatacatggagctgcatttttatcattgtcaatatttgttgttttctcagcatgtcattactcttctggcctcaagtgactcatggcttctggttataaggcgggaatgaaatgtcctatgttttattaaattcatactgcattttgagagtatggtatatttgggggccttatatctatatcaccggaacccctttccttcctttttctacttaaaattggtttcatccatgacatcttcatttgacaccatattgtttgactgtttctggaatattaccttttctgccattgtttatatactctaagactttgaaatgacaatttattaagcaatggtataaaaaacctgagcgtagtggttgcattttttgagcaagatggagatgttaatacttttctaaaaagttgtttttctcaattcctccacttccttaaatccctgatttcaagtttctattgcatcattttaacagccttttcagttcctccacattagctgctgaagtaggaaaccttaaacaagagattccttagctgtgttctacaataatagccaaattccaaccctatgatttattatcttcaaaggctgtaatctactaaatttcagagatctgataaaattacattaatatatacaaatacatgcatatgcatatataaaaggaagaatattgaatcattctgtggttgcaataaaatttaaatcttttaagattcacattttatatttgaatagtgcttttggaaatcaccaattttactggatatttggaataggaagggtagccaatttaatttattgggcaacatttaggttattagctgtatatgaaattttcaatgtgtacatatcttagatgatgagctttttaagacacctaacagaattaagaaacagcccattctcattgtgaatttgacaccaattctactttggtggtattagttggtattctgaaattatcataccgaattacctacctctaattcattaccctaccagtggtagaaaaaaaaaaaaaagcagaattttgaggtcatgtttactaaaggccaaaaaaaaagtactataagtttatagtttcagaggcatagttattagtgaagatgtcctgtaataatttaaaatacaccatagaaatatacagatataatttacatgttttgaacccaaattacagtagtgtataaatatatgcctacagaatgcatgtttatatttgaaacaataaaatagaacttgaaagtaactacaattat

SEQ ID NO: 16353 - DNA, 1172 bp, Homo sapiens
tgttcaagatccatcttctagcagtaagaaggacttgaaaagcgcagttctgagtgagaaggctggcttcaattatgaaagccccagtaagggaggaaactttccctcctttccgcatgatgaggtgacagacagaaatatgttggctttctcatctccagctgctgggggagtctgtgagcccttgaagtctccgcaaagagcagaggcagatgaccctcaagatatggcctgcaccccctcaggggactcactggagacaaaggaagatcagaagatgtcaccaaaggctacagaggaaacagggcaagcacagagtggtcaagccaattgtcaaggtttgagcccagtttcagtggcctcaaaaaacccacaagtgccttcagatgggggtgtaagactgaataaatccaaaactgacttactggtgaatgacaacccagacccggcacctctgtctccagagcttcaggactttaaatgcaatatctgtggatatggttactacggcaacgaccccacagatctgattaagcacttccgaaagtatcacttaggactgcataaccgcaccaggcaagatgctgagctggacagcaaaatcttggcccttcataacatggtgcagttcagccattccaaagacttccagaaggtcaaccgttctgtgttttctggtgtgctgcaggacatcaattcttcaaggcctgttttactaaatgggacctatgatgtgcaggtttgtactttgtattgtctctttgtacagaaaaagttattagaaatgaaatgtgaattcttatattcatgttaaaaccaaggtcccagtaccagacaggtagcctgctagatctagcagaagagatggacacactccatagctacttcatacaagtatattcagagttgtctaaagacaacttttagcctcttattgtggaaaacaatcctagcatttttttaaatttgggaaagtcttttcatggaattagctaagcttcacaattctgggcatatgtcatggtaatttgatgttttcacagtcttccaaaaatgttactaatctttatggttgcacatgataataattcatgccttgttccagttttagattataaggcttttgctataatctttctttcagtgaggatatttcctgtatcttggattag

SEQ ID NO: 16354 - DNA, 1157 bp, Homo sapiens
aaaagaagtttcaggccggtgccccctccccctcgcagccccactccccctcgctgtctctttctggctgattttaattctctcctaccgggcgcagcggaggagctggaggtggttggacccgaggggccgccgccgccgccgccactgcaagttttctgggggctcgtgacaagcggggcgcagactaggcaccagcatgcagagtagtaagttgggcgaactcgggagggtcgggagggtctcagagacgggcctccgtatggtctccaaagtgggaaaacagcacaggactgcctttggctttgaagagtttgcaaatgcaggcttcaaacttttttcccttaaaggcccagctgggctctggagaaggcgggtgtcgcatcccttggtgcacccgcctcagagcggctcaggacagcttggccgagcggtctgtgccctgtccgtaccatgtggcagggccttgcagcccgggcgcttccgtaggggctgaggaaggggcagacttcctctgcgatgcggttgatgcgccatgtgtcgcgcgggtcaggggacactggccggtgattaaatgcctgacagcggtgggacatccaagcggacagacgctttgccttctgtctggttcctgtttgggatctagagaaacgcatctttgaaaggccaaggcaaacatcgctgtccctccaaataactccaggattataggaccccaggaataatttgagggtgaggcggcggtgggagctgtttgaagtgtaaagctgtttttgtggctgggaaagctttttcgttagtacctgtctgagatggtggtgtttccccctttccccagggaagtcagcaactgttttatggccccaggactctaaagcaatttaagttagagggtgagaaggactggtgggtttcagagggaatcttggacttattaaattttaggaccggctttacttccctctatctttttaggcctcatatttgatgctttgaaagttttttgagtaagccattgatcttaatgatgaatctaaattatgatagaatattcattcttatgccattttggaaaatcacggctagagtttaagcgaggtaagtgaagtgagaagctcagcggaggagttaaatctgagacaagttaggcctattca

SEQ ID NO: 16355 - DNA, 1191 bp, Homo sapiens
ggagaagaaagggttgacaaaagaagtaaaaagaagtggctggagaagtatagggaggacatcagaagtgaatcatatcatatatgcaaaaataacagaatgttttacagaggaatttatcaacagaagaaggagcgagagagagagagagagagaaagagagagagagagaaatggggagagggaggaagaaagtaaaaaaggaagggagaaaaaagaaagtaggaagaaaggaagaaatggaagagaaagaaagaatgaaagaaagaaagggaaagaaagagaaggaaggaaggagggaagagaaagaaaattgactcctacttaaaataaaaatataatccattgataccatttgaagtgagaaaagactcactgcaggggaatgttcaaaggtaaaaggacaaagatgtctactgcaatgtcttggaactgtcttactttctgcccaacttggcactaccataaaatattggaagccataaaatatttagaaactgattattaaacaggccttgaaatcacttttgtgccagtctgtctcctttcattttatctgatctctgcattcagttctgcgttagaacatgcactagttaaaatgtccattattatcacgaataatgaattagatgactcatgaagccagtgtcttttaaagtcagacttccagaggaaaataaaaattttcactgcctgaatgtctgatcttatgtggatgataccgttaggctgtgtccccacccaaatctcatcttgaattgtattaaaagctcccataatccccacatgttgtgggagggaactggtgggagataattgaattatggggacaggttttcccatgctgctgtcatgatagtgaataagtctcacaaaatctggtggttttataaagggcagttcccctgcccacactctattgtctgccaccatgtaagaaatgccttggctcctcctttgccttctgccatgatgatgaggcctccccagcaacgtggaactgtgagtccattaaacttctttttctttatatattacccagtctcatgatatttctttatagcagtatgaaaatgggctaatacagtaaactggtaccagtagagtagggtactgctattaagatacccaaaaatgtggaagtaactttggaactgggtgacaggtagtggttggaacagtttggag

SEQ ID NO: 16356 - DNA, 12042 bp, Homo sapiens
atttctagctattttaaattaagttgtaggtgtaggttgtgtagcataacttactgtgacatttacattttagtatcagtgaaattttaaagatacctgataacaaagaatgagtagtttcttctgccaagaatctcattttctgggctttagctcaaattcgcatcattttcaaagttactcaaatcactcaacttatgcttgactctgtaaaactccagtttctctactttttttttttttaagagtgctaatgaaacaaagatcttggatagggcctgtaattaggtaaattttatgaagtagtcagtttagcacttacttttgaccatcagactaaagtatttttaacatgcttcacagattgaaaaaagcaaatatcacctttgagtacatgtttgaagaagtgccgattgtaattaaaaattcacatctgatcaatgtcctaatgtgggaacttgaaaagaagtcagctgttgcagataaacatgaattgctcagccttgccagcaggtaagtggccctgcctaatgaaaagcccatgttttagaactttttgcaaaagattctttcacataaactttacctgtgaaacaagaaaacagttacttaagaacgtttataggttcttaaaacatgtataacatggagtaatagtctggccctgttaggatgtcagggaaaaacgccaaactgataacatgaaacaacacattatttgaatactaattgctcatattagaagaaccctctgctgccttctttgctgtatcatttgtgctttgataaggtcagtgcccaagagggagggcttttttatatggctcagctttatttcttgtacacgatcctaagaggcttagggtattaggtctggatatttaataatgctcaggaaaagaacagaaatgcttttttcttttactggttgtacttacccttgttcagatgcagactcttgcagttgtaaaattacagttgtttgagttttcaactaaaatttgaattttctgaacctgacattggcttcacctattttagttggtgataacgatttcctccaccgtgactgccttagctatctagttgctgagataatgtttattatatttgtaaaatgcagattgaggtttccaaaaggaagtattgttccctttgttaaattaatgtttatttccccctcatctattactcttaacagaaatgtgaatagagccacatgtatagctcctcttaaatgccctttgagcgttatgttagtgattattttgtctgtggtggaaggaggctagcagcagacttgtggaatgaaattaaatggtcagagtaggtaaagaatcaatatatgcttgttggctgaaagaaacaaggtgtgttttcttaagcaaccagtttggagcagactaaattatttatcagatttctagttatcttagatagagacttgttaaaaaaaaaaaagtgtacagactttgtacttcctcgatataaggcaagtgggatgaacccagaagggccagagacatcaatgttcttctctatgctctggcacgggtaggactgtggttgaagcgccgccttccattgcgttaattgatcacaaaggccactagaaagtcttaacggggcagggagatggacgatgaatgtaaatggagtgctcagtaacacagccaggttgcaaggctaatttggcaccaaaaagcatactgtttgactgcaaacatatattcataatagtcctttaatttgtctgttttagaaggtcatatttttctttattgcttttacaaacacattgggcacacctgtatttaaagcatttagctaagaacctttttcagcatacaaggttacaatttgatgtattaagtatatagttatataatacttttaaatttactgcatgaaagcttttgcttacataattcatgtcttcaccttttcccaggctgcctttattgagcatacaaaagaaatacatccctgatggtgctttaacattaccaatgagctggtctataatgtccatttgtccaaagcagcatttataatagccaagaaaatgttctcagtttgccctagcaactgagacctagacaaatattttattatagtttttgtcttctgtatttttacgtaaatgaggaaaaagaggtcccatttctttgctttccatatgaagttatttaaagtgtaaattggtgttcctgttaggaggaaaaaaaatgaagcaactttgaagcagtgcttttttgctagtagacacttacattgaaccaaatcgaccatactattttaaaagacagaaagataagttttgtacatctcaatttttaatttctgacagtaattgtgtgatgatggctcaggccagttgccataaaagtttgtataagaaaccccatcagaaataattcttatgcaggtgcttaaacttggtctttcctttcacagcctatagacatgggcaccagtttctttgatgtgcctgataagtttgttctctgcgacgactaaaacatactgtatttgcttttgttgaaaaattcaaatttttttattttaattttattagatggaagttctagtaatagttattccataacagcctttattagtttttaaaaatgtgtatcacaggcgttcagcttttcacacatgtaaaacaattctgtttttatttcctcttttaaaaaaagtaaactaagggtgggcatcatacattaaggattataagcataaattgatactgtagccagagcagacttaacacttcatgtcctggttcacatctgtttatctgttttcagttctttatttgcttggcaataaaagaaaaggcaatgttactgaaactcctaacaataagtccctgtttcagcatcctagttaaactggtactgaaaagattcccacaaaattggtcttggtagtggtctgattttctgtcattgttaatttctgatgcccttttaaggcctgtagtacacagattgtgtgtgtgtgtgtgtgtgtgtttctgattgttttttttctgaagagcattatcataatataaaagttatgaaatgcttaaagtccacatatttgtgcttgtagcagtgttctttcacaataacttcatatacttgcagcagataatattagtactttatattaaagacttttctggtagaaacagtgggtctgttttagtagtgcctttctcattactgtaaacaacctccaagatttaaggtctaggtgtattttctctgcatatggcagtacctctcctgtgctgttattttttccctactgtcactgctttccccttaacctcccagccacagcattggtgatgatcttttctttctctgatttccttttgcaattaatgacataaatgacttaacaactaatcatgtagctaacgacatttcctatacttagtatagccctttgggcttcaggttgctcactggtaaaaatgaaaggatcagaaacctgaagctagtgcctcctgtcttcttgccttctcaggacctcattaggttgatctactccttccttcttcatagattttcagtttctttctatactagtttttttttttcaatctttataggctcatttttccaattaaaaatttatgtttaaattttcaactctttagacaatttgaaagaaaaatacagtgaacatccatccataaacctttcatttagattcaccaattgtatatcatgccacatttgcactctatctacgtacgtaaacactttttctttctgaaccatctgaaagtaaattgtagacatgacttttaacccctaaatacttctaaaatgcgtgcatctcctaaaaacaaagacatttaaacttgtttacatccccccatctcaaaagaaaaacttatgaaaagaataccttttaatctcatgcctttagtatccatctccttttgtcttctgctaaatttttctatttgtttcataatcaaacttctcgatagaattttgatgtcactgtttcctcatttcccactgatttcccagtgattgtcaacagtttgtggtgttccacccattatatgtagtaagacctccctccaaagtcacagaagactttgatgtcactatgtcactgagtattttagactcttcagcatgtaatatgttgataaggccttcttcctgagatcctttcctaggagcctgtgaaactatagctcttctgggtttcctctcattctccacagtgaaccccctcttgtgctcatctctgtccgtgttcctcagggtctgtcttctcacacatgtactcgtggggcgattttgtcttactcctgtgacttactgccttagtctaggaccttatttctcttcctcattactttcacagcttcctcacttcctgttttttgaccttttcctctttcaaaattgtaatgatcttgctaaatgcaaattagatgctcatattactcctttgcttaaaatctttagctggtttcccactgtccttaggacagattccagacttgtagtatgtttttaagtcattgcactttgaccgttgtctgcctctcttttcctcagtcttgcccaattctaatacttaagtcggagtgaatttaaatcaactatttagaaattagggtaaaacagaagcaaatacattgtatccagagaagaagaaatgttttgaagttaaaagtgatttaaaaaattacaacacaacaaaataaatatgaaagaagcacttgattcctcagcaggtgaagtcatcagaccatgttactggaccaaggttatctaggtagtgccaggctgggattaaaagataaatttactcacatacaccttagttctatgctccttccattatttgagaaagagccaaaacttcctgattttcttgaggttactgatagaatccatattttagttggatttatttttattcattctcaatattcccaacctgtttccttctcagtctttcccttctctgtaaatgtagtaaccagctgccagaagactgggagtcaccctccattcctctctgatgcctcctatcaaataaagattgcctgctctgcctccagaatctctctcatttctgctcacttttctctatgctctgccaccatcctagttcaagtcaccacaatttctctctgtaatatcacgatagattatttgctggaggtgcagtttttaatatagagaaaaaattgaccatttaaacccttttcagatgtacactttagtcatttttagtatattcacaatgttttacaaccattactagctctagaacattctcatcaccctgaacgggaacccaaacccattaagctgtcattcctattcccctaacccctggcagcctctagtcactttctatctctacagatttgcctattctggatattttataaaatggagtcctggccaggaacagtggctcatggctgtaatcccaacactttgggaagccgaggtgggaggatctcttgaggtcaggagttctggcaaaaccctgtctctattgaaaatacaaaaaatccagccaggtgtggtggcgcatgcctgtagtcccagctactcgagaggctgaggcacaagaattgcttgaacccgggaggtggaggtcgccccactgcaccagcctggatgatgagtgaaactctgtctcaaaaaaaagaaaagagtcctacaataagcagccttttgtgtctaccttctttcccttagcaaatgttttcaaggttcatccatgttgtggggtatatcagaactttattcatgtttaaggccaaataacattctactgtatggatatataatattttatttatctattcatcatttgatggaattttagattgtttttagtttttggctattaagaataatgtagctattaacatacatgtatgagtttttgtgtgagtatatatttttaattccctagggtataaacatattcatagggtatattcataagagtggaattgctgggttatatggtaatttggtttagctttttgaggaaccaccaaactgttttccacagcagctgtatcactttaccttccctcccagtgtatgagtgttttcatttttccacatcctcgccaacaccccacagtagacttttaactaacctcctggtttctcctctccagtctatttgcatagcagcagaatgatcattttaaaatttaagcaaaatgtgtcataaacatgcacaactccaggatatcattcacattgcagttgtgaggtctcattcacaacaaactacattgctggggagttgtatggtgctagtgagcttcctacatgtgcttgtctggtctgcctgacctaatccctgtgctctagccatgccaggcctcttgtgtcatcaaatctgcctaattcttgcccatctcaggcattcagtacttgtattttcttttgcctacaatatttttggcatagctgactcatctttcactttcagtctgtcatctcctcaaagagatactctgatcatgctatctaaagtaagtgtctcttcacctcccccttctctttctcctccatccctaatcagttataagatcaatgaagatatagaacatgtatgtcttattcactgttgtctccctgttttctagtactaaggctggcacataataggagtttagtaaatacctgtttgcagttaatgaatgggtactactctttagaagcttgctattttaaaaatatatatatgtatagtagctgtccaggcgttaccatggtaggagataagttgcaggcagaaatcagtgaatatggtggtcattgtgccagtcattacatcactttataaagcgatgttggtaactgagctgcaatagaaatttcgggagagaataagaaatatgaaagactgtactacagattctaggaaaggtaagaggaaaggagcctcttcatcatgttttgtagaataaatgttaccattgttcatttaaaacctagatagagaaatcatgtgccagatgtcataatctgtgtggttctttcctgtgattactgataaaaatgttatggaatgcatttgggcaggagtaagttaatgaaaagaatttgggaatactgaacttggtataaaaaatatgtattatagatgtctcactaggtatgtttaacagttcctaccctaacatacctgtgctctcacaataagaaactcagctatttcaggtatccctgagattatagttggaagttcggtatggaaagtttagtaacaagttgactcagattttttcctctgctcttgcttttatgcatatgtgtgctctcattcttttagcaaaagccagttcaagttcatatcttaaaactgtttagagcagtagcaaagctataatttaaagtaagacttgtcagtatatttactttacatttcagcaatcatttggggaagaatctacagttgctgatggacagagtggatgaaatgagccaagatatagttaaatacaacacatacatgaggaatactagtaaacaacagcagcagaaacatcaggttggtattgtggaaaaattcaacaaacagctatttctaagtttcatgtatttcaagagtcatgttcaaaatgacctaaattatctttggtaaattattgaccgttagctactctatattatatttttaaaagattattatttttatggcatgtttgtaacatattatttacaggttatacttaaaaatacctgtgttaaagagagctgttaagctcagattgtaatgccaaggttatgcaaataagagatacatttattgagaaaatcagaagcaaagagattccagaatgtcacagctcatttctttactaactataattggtttggcagtggctcattgtggcatagttagcaatcttcagttcatttaaaaaacggagcaattgtgattaagagcaagcaatgttgataggaaataatagaccaactgctgtgaagtagatagtataatacagacaaaaaccctagaattatccgaatattctcatatgcacacatctacggctgtgaccatataaccttttctttattcatgttgcctgcaggccacatggttttcacagttcctggaatattgtatttggactatactgctctaaagtgttcttagcatttgattcatagattagttgattccagaatgtttatctgtgaaagtagtatttatatatgactactctgttcattaaaatgtactttaaacagagctttgttaaatatagaattctaagcacaactgagtggtttctaagaatgttgtatttaaattttctcttaatatcagagttcattttcagtatatagtgaaatttaaagtactttgtttctaccagcttagaattgagaaaacatatgtaaatcagtattttttttttttaactaaaaagatgggagtggttacaaatgtctgataaactgagggggaaaaaagtcatctcagctggatttcattttcatgctggtttttcctgtaggtgaaggactcatccagggtatcaaattgaatatttgtttcctatgagtaccccataatgaatacaggaatctttacaaagcaagttacgttccttcactagaaagaattgttgtttcccttgattttcttaggaatccaaagactaaatttttactagcccagcttggtttctcattacctgacattttaaggttgtgtatgggatattacgtgcttcactgttgggagcagtcatagctgttagctcttattgtagttgatctataagtttatagttaaagtttatatatatccctgctttctcttcagcgaatcataggaatccagagtttgaaagtatttgaagcattatctgagctattaatattatccatctttagttatagagctaaggtacagacaattatctgttaagaatagtaacaataggccaggagtggtggctctcgcctgtaatcccagcacttggggaggccgaggcgggtggatcacgaggtcaggggtttgagaccagcctggccaacgtggtaaaatcctgtctgtactaaaaatacaaaaattagccgggtgtggtggtgggcgcctgtaaccccaactactcgggaggctgaggcaggagaattgcttgaactggggaggcggggaggcggagaggcggaggctgcagtgagccaagattgtgccactgcactccagcctgggtgacagaatgagactctgtgtcaaaaaaaagaaaagaaaagaaaaaaagccgtaacagtagtgaacatagcagtaataacatcatctgtattgttattttaggtcaataggagtaaaggtgaaagaatttccagtgtggtagttcattacttagtcattaaaattaggatgaatcatttattacctcattgtcatgaatggtaaaggaactccctttaccttactagtcatgagcttctttccctttaagccccctgttacttacataactagttttgttttctgaatcattagttatagactcttagagctagagtgacactagagttttcaacaaaggaattttcttctgctattggcgtatttagcttcttagacgcaagttaccaaatgttgccaatgataaaaactgaggttggaattcagagcagtggggttctgctggttgtgtaggggaaggacatctttttttcctcctcagatggagaaaaataaccaaaccattttccctttgaattttagtatcagcagcgtcgccagcaggagaatatgcagcgccagagccgaggagaacccccgctccctgaggaggacctgtccaaactcttcaaaccaccacagccgcctgccaggatggactcgctgctcattgcaggtattgttgcccagtgcaaaacctggctggttttgttcgtttcttaggaagcagaagacagtgagaaatttacaaacagaaaagcatgccgtaaaagctagtatgtttgaaatagttgcaggatgaatttgaatctagcacctgtaatatctgaaatctaagaacttgtaagagtttgttcttttgtccaggtcctttcagtgcttcactctgtgtttctaaacatttttgagatggcataaactttctaaaatgagtcctttttcatggaaacccagaaaaattgtttacagtcttaatgcagaagaccacttagctcaggcctcttactcttccttttccagcacagcactgtacagtgggtacttgacttgaatttaggaaattatttcccttacttggacttaaattgtggcagcacaaatgtatttccggataaactttttctggttatacttaatgtttaataccacctttaagcaggagaggtcctgtgtcctgtactaggacttgattttgaatatatgacattcatgcccttatttggctataatcttatagaaatgttaaatgccatctgattcagtcagatccttacctgtgagaagattttatcaaagtgaaaatcctactcaaaagctgattggcaatttctcaaattatattgatacatttgtaatgtgggaggaaattccaaattccttaacattttctagtgtacatacaaattaaatttggaaatgagacacaattccttcccaaaggtccaattcaaacagaattgagatccttatattttgaagaagtatgtaactgatgtaactgttgcatgggattagatcattaaagacataaaaagcaatgatggagccctttcttcaagtgaactctttactcttactctgtctggctcgtaggagaaaactccttaacgttcccaaagcacaaactgaaaacctaccgtacttgttcacatctgggtccagtgggtctggctggtttgcagctctgtgatttattgttagtatctcctttctacctgtgaaggctagtcagcgctgttttctcagttgtacagcattggtttgatctatttagtcagtccttttgactgacagctattatgtccttagggctgataagcttttgaggagtagtttttctttattctccatgtaattgagagtggacagtagcttattttcaaaagaacttgtatttcttatcccttatggaaaaataaactctggattcaaaacaataaacaggtgattctgttttatgctgatttttctgtttgactagctttctggatcattttacaatttgtggaacattatggctctatctctttctcaaatgcacaggccagataaacacttactgccagaacatcaaggagttcactgcccaaaacttaggcaagctcttcatggcccaggctcttcaagaatacaacaactaagaaaaggaagtttccagaaaagaagttaacatgaactcttgaagtcacaccagggcaactcttggaagaaatatatttgcatattgaaaagcacagaggatttctttagtgtcattgccgattttggctataacagtgtctttctagccataataaaataaaacaaaatcttgactgcttgctcatttgattttagatgtattttctctggcttacttttgtttgcttatacttgtttatttctaaaagctaaaacaagccctgaccggaagtttcaccaggcagaaacctataggctccaccacttttgctgcctctcaggtgccacctttcaacccacttctcccaactacttatcccagctcctgaccccgaggccctggcatctactgtgaatattttttttttgaatttttatacttcgctgctcccaaatgagcaccccgagagaagtccaggcttcatgtacttgcccaggaattccttgtccccggacccggaatcacttggcctaattccggtcagtctgccttttcatttctgcaggtgatggtcaaccagtccccgtactcataggccatgggacacaagattattattatcatcattatttttaaagacagagtctcactttgttgcccaggctggagtgtagtggcacaatctcagctcgctgcaa

SEQ ID NO: 16357 - DNA, 1169 bp, Homo sapiens
gtagttgtttctccttagttttcctaatggttttagtttctcagctctaaaagctgtgttgaagaagagattgataactcttcctcttttattaattcaaatgaaacttcttacaaccaaccaatttagtaattacacaaatttttcttaaacatttactattttgagagtttcaaaaaggggagttagacgccacatttaataattctttggttagaacaaggtattaatattgtgtgtaatacattttctacaaaatattttttcattaaagaataaaaggaaacccctgatgatttaaaagcctaattttgttttgctttatatgtgaactgaatgaattttaaatctggaatcctgttccctattgctaataaattgttatgtagacatttgtttccaaaacggcttgtttttgatgttggtaacatcattaaaaagttttttcttttaatttcctcttccccatcatccagtccaatatcagatggaaatgatgcggagccttcgccatgtaaacattgatcatcttcacgtgggctggtatcagtccacatactatggctcattcgttacccgggcactcctggactctcagtttagttaccagcatgccattgaagaatctgtcgttctcatttatggttagtaggaggtttattattcttttttcccttaatattattactactatttttgctttctgtcctttttgcctctaagagcagtctggcaggccttctcaagtaaataccaaccctgtttctgcagcagcctcagcagcagctcagtctagacagggtttccttctttctgtttatttttcttgctatcagagccctgatgtgtacattttggaatgctggagtagctgcttcatttctattcctccatctcccctccctcattgaaggggctggtggaactagaccagatgtctaacaaaccccgattgctagagtgtctggctctgtacgtgactgaccaatcataatacggtgtgccaagttttttttatacctctgacaacagcgtacaaaacctggactgtttcttagcacaaagatttttttcttttcggcctatttaatggtgtttcctcaagctctccagaccagatgttctgtgctgtatcagaactgtaggcaatttaacagctttatagcctt

SEQ ID NO: 16358 - DNA, 1222 bp, Homo sapiens
ctttttgataaaacatgtgatcccttacaaaattgtgttaaccatgagtcatctgttatctccatagaaattaacatacccttatatagatggctaataatacaaagccacgatggtttctgtggttttactaactgtggttccatttctaaaacatttaaaataagacctgctcctttttaaaaaattttttgggcaaagggttgtcttatcagaaagtgcaataatttaagcagatccataactgggaggaattaataacagaaagtttttgttgacaccaggaagtagattaaatagtgcaattgtggtaatgagtaccatatatgataagcctgagccagctgggttatattaggctgcttgatactttgatcacagtattatttcaaggcttgtctatttaaattgctaaggtttcttgtcatctttgcgatttagaccataatttcttttattgcaaaaaaaaatttttttttttttttaaagaaaggccctggctaaaccaaaattgttaaggaggtacaagttcaacagctaggcaaaccttagaactagaaaacctgttcaacataaaaaaatggaaagcttagaagtacagcagttgaatattaagttcatctgaccttgcttttctttagttttttgcttggatcataattatcatatggtagtgagtaccataaggatgtttggtataattcaattagttactgtttgatataaatatgtgcatttaaaatatatatttcatgttttaagaataaagtactgctctcagtttcccttcagctggtattaagtggttttgatgaacatctttgagaattcggaaagatttttaactactttacccatagtgaatgaattacactaatcacagaatttaatttgcttgataaattatctcacttggcctttgaacttgaaatctttaaattttaattagcctaatataattgaatgaaatttatagtcatcaatatcagcacttttactaattttctatactgtggaatagtcttttacaggtatttattggtatctttgttatgtatttaagtgactgctttgtcttggaaaaatattcattttgattagtaaagggaagactatgaaggtttataattttaagatactgttgtccttagcatagtaataataaataataataataataatgaggtgacattttgaaaatttacaataagttgctttgtac

SEQ ID NO: 16359 - DNA, 1145 bp, Homo sapiens
acgtgttcccgttgttgcatcctctgactatggagatgatctgttgagaaaggcaaaatgagaatttatcagaaggctctgctttcaggtgtcccgataattgagacctttatctctgtgtcttattgatagttttgtcatttatgtgtctattaacaggatcactttctcaataatagcctcaggttgagggggtattctttgatttggctgaaggaactcctggatgccagaccatggggaagctttgatttaagagcataactgctgtagatggacgtttttgacatgtaatcaaactcctggagtttcagatctgcgtttagattatgtgagctttattatttatgtaagggtaaaggaaaggatttgtaagacatttatttattcctcttatttaatttgtggttttgcaaacctagtacagtttcttttgttttttcttagaaataaaggaaataataaactaggatggttgttaagctcccttctgtgtgtgtatgttttaggtggtattaaagataatcaaacattatcaagaagaaggacaaggaactgaagttgttcaaggagtgcttttgggtctggttgtagaagatcggcttgaaattaccaactgctttcctttccctcagcacacagaggatgatgctgactttgatgaaggtaagggtgttcatcacaagtgtgtctttgcagtgcatacaaatggatattgacacaggtctcaccataacttttgataatgtgtgaattgggaatctgtcaggctagcctacttcacttgatgtctgatactttgggaaaattatataaattctgggaaatgagggtttatactatagacatcattagtttggcctttacttatttggaatttgtgattctgatttgtcatagattggataggaactgtgctgatgttgactttgtcaacatgaaatcagcttgctaaataaagttttgagggacaaagatcatccttatgtgtctgttatccattcccttctatcctcttttgaataagtcagtgtttagaaagagatggagttcaattttctgcttcagaaagaagatactcctcaagcatttcagaaattttatttttgtactataggtgtagttcctttgttagcaaaggctga

SEQ ID NO: 16360 - DNA, 2170 bp, Homo sapiens
tatttcagcgtgctcttgctaaaactggagctgaatctatcagtttgcttgagttatgtcgaaatacgaacagaaaacaagctgccgcaaagttctacagcttcttggttcttaaaaagcagcaagctattgagctgacacaggaagaaccgtacagtgacatcatcgcaacacctggaccaaggttccatattatataaggagctagaagcattatagctagtgtttgattcactagtgcttacaaattgcccccatgtgtaggggacacagaaccctttgagaaaacttagatttttgtctgtacaaagtctttgcctttttccttcttcatttttttccagtacattaaatttgtcaatttcatctttgagggaaactgattagatgggttgtgtttgtgttctgatggagaaaacagcaccccaaggactcagaagatgattttaacagttcagaacagatgtgtgcaatattggtgcatgtaataatgttgagtggcagtcaaaagtcatgatttttatcttagttcttcattactgcattgaaaaggaaaacctgtctgagaaaatgcctgacagtttaatttaaaactatggtgtaagtctttgacaagaaaaaaaaacaaacaaacacttctttccatcagtaacactggcaatcttcctgttaaccactctccttagggatggtatctgaaacaacaatggtcaccctcttgagattcgttttaagtgtaattccataatgagcagaggtgtacgcgaaattgtgttatgactgatagccttcagctacaaaaagataggactgacctggtttaaagtgttctattttgtaaatcattccatttgagtctttctgatgaacttggctatactgaaatctgttattttagtgaggctccaaaatgagcaaagctaggcctgattagagtagagtgactattaaaaaacataactttctaggagctataaatcaaagttttaaaaagatgtttggatatatttgagtattccgatcatgaaaacagaaattgccctgcctactacaaggacagactgatgggaaattatgcacctggtcaacttagcttttaagcagacgatgctgtaaaaactaacggcttctctgatatttattgtaagttttagtactgatctccttttccagtgctgcacactcctggtttggaactttaatagcgttgcaacgaaatcctatatccagtttcctgtaatttaattgaagaaaaatacatccaaataaagactttattattaacagaccagatagcatcagaaatcatgtgactgttatgattatcagaatgtcttaactttttagggcaaagttaacactgaaagttctagcttaagtgttgaaacttttgtgggaaaaaaaaatcacttttgaaactcagacttcagtgtatacccaataatttaaaattatgtgaaatgttttaaatttgtgaactcgtaattactgttttaatgattcagtttcttcagagtggtaattgtataaaattgctattgcagctttacattcaatatgatgtgcctgtaaaccaaggagttttccccgtttgtaaaaagacattgtagataattgaatgtttgattttagaaaggtcattagtttcttgttacacattttgttagtctggtttttgttgcttatcgggtttaatattgttcttgaaaatagttgatgctatgttatgtataacttttctaataaaagttgtgttataagctgtacttttttgagtattcattattcagttggtggtggtccccaagggaaagttggctgaaaaagttaatagagccaaacacttcgtttgtttgccttatctagaatagttatccatacaaaccaaatgaatttttcaaaagaaagaggtcttagactaaaaaatggaagacagactagcttgtctccaaccttctttgttaacagaactaggtgatctgaaattttaataaatatataattgttatgtgtgaaggtattaagattaaaaatgaaaccaacaaatggctggtacagaggaagctttggggcataaatatatctctgtaactgctaagtacatacaaactgacatgctatgtgtgtacatccttggtgctccaaacaagctaggtgggtaggcaggtgc

SEQ ID NO: 16361 - DNA, 1139 bp, Homo sapiens
gcattttgagaatatttttgcaataccagccatatattcttcattttcttccactaaaatatcatcagattcacttttttttttaaactgtactttgtttttaacttcttggttgaggtcagcagcatgctgcatttatataatagtaatattaaaattgtaaatttttttttaaagttacacttcaaaaattaaaggggaaaaagtatttcaagtcagagggtttatcacaaagtttttctaggtctgttttatagcagtgaaacaggtatgccaagttgttaataaatgggcatgcattgctcttaaattcttaaaattaaacttgatcagttgtgagggacagcttatgtctatgcattgcctaaaaattgtttctgtttgttggctttacttatagaaaatcttgatttttttttcattacttgatatttttattctttgtttttcctgataagctgccaaatggtgtcacttaccacactggaacatatcaagaccggttaacaaagctacaggataatcttcgccaactttcagttctcttcaggaagctgagattggtatatgacaaatgcaatgaaaactgtggtgggatggatcccattccagtcgaggtaattttttgtgatagagggaggatgaatataaggtgtgaactagtgtcaagacagttgttaatctttttcctctctctcctgttttagcaatatttccaggtttcgaattttattggttttacttttgaccagagaagatgaaaatgtgatatatatgcataaaatactactatatttttacattaacaatttcttgtagactttgacaggcttatagtaatttttgttgttgttaggaagaaatgttttcctatggcaatttttattgctgtcagtgtctccttttaattaagtcagggatatttttagtaggaattttaatagtatcatatacttttaaggtggttttcatgaagtactttacagataaaatattatttttattattattaatttggattttatatttagcccagtggaatcactatattttaaaaatatattctctaaatttaatcttgggtcatacctatttagttaattaggcatatatttctataagtcaccctttcctgttga

SEQ ID NO: 16362 - DNA, 1186 bp, Homo sapiens
agcctgagggttaagttacaccatggatgaaaagctgatgcatggttctaacttgcccgggcttgatattcaaaaaatgtctattccttttccattttctctcttttccaaaaatcctcttgctctgtttctgttaagacccttttgcaacactctgttttaacatggtgcttaatatattgtcagaaaccacattttccagtgcatatggtgcagtttttaatttctaatttagctttttaattaaaaactcaccttttgctcctaatacctataggggttggtttccaattctgcttttctggtggtaactgaatctctgttctcccagtgatgagtgtaaccctctgtgtacaagtaggaacatcatgactgccatgcttgggccattggtataattatttctgctacctctgaagactgtggtgagggtagaatcagagtggtccctagccatcgtcccccttttgaattggtagtcatcttgaatgtcacagcagcctagacttgtagaccatatcaggaaagtagaagcaagaattctgtcgtgtgctactccactccaagatgctgtaggtcatcagaagctctgtgacttcagatgtgcaagtgaggccaaggcactgtcacattaatatctgtgtgatctcggtggcattgtgcttttccatcattgtcagggctgctgggctctctgtgcctaaaagctgcttcaaacaagcagctcacattccagagctctgagagatgttgtcagcctttaacagttttctcttcgagaagacattagattctgtacaggttgcagaaacgttgtcttaaggtggctggaaggaagtgtttgaaataacacatgtgcttgtgattttggtaaccaaggaaacatgtacctgatacaaagcttcctttaaaaaatgatggtacccttctgggattgcctcagaatcacccacagcaagattccaaagggatttaaaattaaagtaggtcacttccagcaactgtatcaagagttaacagagaatcacctctttaaaaatgaagaatcatctctttaaaaatgtactgtttagaagaggaacccaatacattgtggatacaatatgctaccatctgaataatctgagtcttgcttataatggatgtttaataagtcttacctggattaaattttcctctgcttctg

SEQ ID NO: 16363 - DNA, 1201 bp, Homo sapiens
ttttaattgtagtgaatgtgaaagtgttgttaatgaaaatataaagaatatttgttaaagtgtggacctagccaggaatactaggtagaaaaggtaactctttaaaaacatttttttaattgtgaagttaatttattgtcactttgtttgatatttattattagagtccctaggttaattctgtttttattgcttttcagaataattaagacctaaatcttctgccgaattctgtttggtttccttatttcttttgccatgttctttcattccacaaatgttattgagcacttccagtgtaccaagccttgtgtttactgctttgatgataaatgcaataaggtaatgctgcttttaaggatccttcaggataggctcttgtagcagtaaggacttagtatttttgctatagaagtgtatggagagctatctatggtgcaataactgtggaaatacagtttttattctatttggttcccatatacattgagtcctcctttggtgggaatttgatcaggttggtctcagttgaatcctggctgcatatgcctcagtaaggaagaaggcctaggggactgtggaaagcctggtggtggtcctggaaggcttgagaatacctggagctggaagctccttgctcattggtgacctttttcatatgcagcagagctcttggcattcctagcatactaccttgaaaggactgtgtcttgcctcctagaaattctggacttggtagaatcatttgtttatgttattttaaaaagaaaaaaaactctgaaatgtactttttggaagaaaaatgaacttgtttttggacttttctgtgtgttgtttctttaattgaaaattctgtctggagattgattttcaacccccttcctttccctctagttttaaattgtaacattgctttccaagcatttcaaaaaaacaacaaaaaagaaatattttattattactctatttttatttgctcattaataattcttgattttctatctatatgaaatcaaagaaaaattactgtataattttcatccagttgcagtcaattctataactgaaatacaagataaaaaataagtaattgatttacttaagaaacaaaggcatctcgacctcctaaaaatttcatcaaatattcactcggcagacccttctttgtaataggagctcacttactattgtgagcactgac

SEQ ID NO: 16364 - DNA, 1227 bp, Homo sapiens
aacacagtgaccaccatcaccaccatcaccatgagcacaagaaaaagaagaagaagcataaacataagcacaaacacaagcataagcatgacagtaaagaaaaggacaaggagcctttcactttctccagccctgccagtggcaggtctattcgttctccttccctttcagactgagaaggggacaaaaagacctttcctttcatgtccagaagaatgtatgtaactaaagctttgtcctctgtgaagaattataaaagggaggggggaaaggattcgcctctcctacagaaattctgaattcatttaagttctaagcatttgatttatgttatttatacagttgggatctaattaggaaaatgtgttttgtagttctggataaactatttcatccgctgtttcctccccaaaacacacacacagagcaaactccctttcataaaagccctcatatccactggcagtccccgttcgcatcatggtctccatgtgtaccgccaaagtcaattatgtttgaaagcctttggtggatgttatggggcaaagttatgatttacacagaagcaactgccaaatctgtggtgcaaccactatctccagtgaaatattgtataacaccatttggaactactgaaaagacagtggcttttctacagtactcttccttattgcaccatttttgtattaacgtagaaactaagcatcagaatttatgaacaaagaatatgttatttttccttttgctctaaaatactgagatttggggaagcaattcttttttaaaaaaattttgaataactatcttttgataacacattcggcggttacgatgttggaatttagcagaactatcaaatccaaaattattttcaaatcaagatgtttaaattataagtttttttgttttgttttccagtaagtataaatgaaaatattcatatgtaaaatatgttttgcttaatgtggacaatttacacacccaacacatactgtttccaaaattatttctatatgacacaaagtatgatacctttaaaaaggtgagcttatatattgtttattaacctggaaatagacaatttggctctcataccataagcatttaaaaacatatgaaatattttgatttctttatatggtggtgtgtttttatttctgaattttccatgtgctttaatatttgtttaagaatattttttatatctgttcaatttttatcattccc

SEQ ID NO: 16365 - DNA, 1163 bp, Homo sapiens
agcatgagctttgtgggtaaagagagctcaccaaattcagcctccagcagcacacacagctcagtagcagcgccccgcccagatgtttatattttcctccatcggccccgccccccgaccatgaggggctctagccacgcccccaagctcaagtttctggggccggactagcccagcgcgtctgcctacccatagggattccctctccagccaatccagtcagagcagcggagctgccccgaacaaagatggcgcgggaagcgtctgtgagggcagactgatccgagcacccaaaccctcggcggacagcggagccagtggtagccgcacggccctaaaaccatggaggagggcggcagcactggcagtgctggcagtgacagcagcaccagcgggagtggcggggcgcagcaaagggagctggagcgcatggctgaggtcttggtcaccggggaacagctacggtaaggcaagagacacagcgggtgagctcacgatggcactgccaacgcgtgcccgctgcagtcctgcgcgcacgcgctccctggctcgtggcttgcgactcgcgtggggcgccggaacggctgcgggcgcgtggatggtcctcggtgcgcccgcgcttagctgctgcagcctcggtccctgaggactcgctcgccaagcggggctgcctggcagaagccgacgagcgggtggtgcgcgctgcgccctagcctggctgctgcagtcctgtgccgggcaaagtccctgccacccaccgcgctgtccgtcttcccgtgtacctggacgccgccaggcctcccggctgacagcctgcgcctcatccgcgaagagagcaagaggggtcgctgtggggtcccgaggcgaccccagcccctctactccttgataaaaggagcaagaccaacgatagtcttcactaggttttcctttttgctgacaagtcttccttcactcccctgagcctcggtgttttacatctgtaaaacagggctgattcaagggctttttgtgaggttaaactgagagagcatttctgaaaccctgcacctatcagttaattggcacatcgtcctcaatcatttgggtccgcaagggggcgtggaggcaccttgtcgggctgccttgaggctgtgccaactccccgggctcgcacgttttgg

SEQ ID NO: 16366 - DNA, 1164 bp, Homo sapiens
tctaaattgcctccttagcctgaatttttactagctttctagtgtaacatattctaaggacatgacatgctgcttatttggggggattatttttcaccaaaatgatcatcttgtgttgtaacttttcagctcacttgtatatacgcacgttttcatttttggtctagaaaatagtgcattttggggctcagcgtgcagaggaaattcctcaaagtgccaaattaggcagtcaggaaatactaaattcttcattccaaataatggatctgaatgatgacgttaattttttatcatgcattaacaaaataaaatatgagaattgtaccacagccatttcttttcattaggttatcgtaatgtataggtactggtggaatggacctaccgtgctaaatatgttatagacatatatatatatatatatatatatatatatatttctggtaatccaacttttctgatttgtagctttagtcagagaataggattttggagtgacagagaatgtctaacagtaatactgttgatatacatttgagaaatactatcacctctgtgtgggtgtgcatttgtactgtatggcaggctctgtgcatttaatatatatgatatcctttaaccctcaatgcaaccttgcaaggtagatattaacgtccacatttttcagatgtggaaactaagcctgagcaagttttaaaatggtctctaaattcacacggctgcaggaactactaggtgaaataggctgaatgtaaacacaggtttaacgctaaatcccatgttactcccctcaacttttccccatttaaggaccttatattgagggtttattctgagccaggctgtatgctaagactttacgccatttgtccttatttacctgtgaagtcaatacggtcattatctccattttacaaatgaggaaactgacttgtaaagtggttagtcatatgcccaaggccacaaaactaataaagtgggaaaccttaccactggcttaaaaaaattttttatagcatctttaaaagatgagtcttaaatgctttctgtgctcaggtattcattaagtgacaaaagaagaaggaatacctttcgagaaatggtatctccttttgagaaatggtatcttcttcttgcctgctttacccattatcttggaccctg

SEQ ID NO: 16367 - DNA, 1179 bp, Homo sapiens
taattttataaaatttaaagttttgtgaagttattttttctcaggatccaatgatgatgtcagtataattggttttcagagtgttttattgtcctttataaaagagacatcatttatttgaacattacagttttgcacttattcattctcttttggataacaaaattatgtttagaaaaatataatgaaattgcacaggttttttttttctctgttgagtacaatagcattgatgatcatgagagtgatgtgtgtaattaaccactgctgcagaattggcaagtaattatgatatagtttattgttttctagtatatgctagctatttcaagataacatggctttcaataaatgatgaacatttaaaaagtttgaattcctaagggcgtatattgttttggagaatttcagaaattaaaactaaaagcttcctttgtcttctaaataaatataaaactaatttttctaaataaacataaaattcagttcttcagggtactattttgagacatttcagatctaactttttaaaaattacaaaaatgcctttttctctttctaggtagagcaatggtagatataatactgttgctttctgacaaagatcctcctaaattgaaagactatttacctactgtaggagcattaaaacatttgagagaatggtattcagcaaagatcactatagcaggaaatcattgtgaaatgtaagcttctttgttcatatttgattattgtctgccttgtctgttttcacaattaacatactattctcttttcagactcagcgtttgaaaattattttaatatgacaacataaaattctatgttataccatgattgcaaatttgtgtattgagaagaatctagatgtttcatattttatatttatgtttctgagatatttaagtttttagtaaatattattgatgctgttttacaaccattattgaggattaattctataagcacactgtgtgcttttgaacatagatacactggatttgtcatgttgtatttggttttctgttatgtgccaatgtaggaataaatatacactgttgtgttttatgatattctagcaaggattaattgtatattacaattttgatccttaaacattcagttggatttaataacttcatgatttgttttcattcaacgaatgtttattgagca

SEQ ID NO: 16368 - DNA, 2028 bp, Homo sapiens
taggcctactggctttgtgtagctggagtagttgggttgctttgtgttaggaggatccagatcatgttggctacagggagatgctctctttgagaggctcctgggcattgattccatttcaatctcattctggatatgtgttcattgagtaaaggaggagagaccctcatacgctatttaaatgtcacttttttgcctatcccccgttttttggtcatgtttcaattaattgtgaggaaggcgcagctcctctctgcacgtagatcattttttaaagctaatgtaagcacatctaagggaataacatgatttaaggttgaaatggctttagaatcatttgggtttgagggtgtgttattttgagtcatgaatgtacaagctctgtgaatcagaccagcttaaatacccacacctttttttcgtaggtgggcttttcctatcagagcttggctcataaccaaataaagttttttgaaggccatggcttttcacacagttattttattttatgacgttatctgaaagcagactgttaggagcagtattgagtggctgtcacactttgaggcaactaaaaaggcttcaaacgttttgatcagtttcttttcaggaaacattgtgctctaacagtatgactattctttcccccactcttaaacagtgtgatgtgtgttatcctaggaaatgagagttggcaaacaacttctcattttgaatagagtttgtgtgtacctctccatatttaatttatatgataaaataggtggggagagtctgaaccttaactgtcatgttttgttgttcatctgtggccacaataaagtttacttgtaaaattttagaggccattactccaattatgttgcacgtacactcattgtacaggcgtggagactcattgtatgtataagaatattctgacagtgagtgacccggagtctctggtgtaccctcttaccagtcagctgcctgcgagcagtcattttttcctaaaggtttacaagtatttagaactcttcagttcagggcaaaatgttcatgaagttattcctcttaaacatggttaggaagctgatgacgttattgattttgtctggattatgtttctggaataattttaccaaaacaagctatttgagttttgacttgacaaggcaaaacatgacagtggattctctttacaaatggaaaaaaaaaatccttattttgtataaaggacttccctttttgtaaactaatcctttttattggtaaaaattgtaaattaaaatgtgcaacttgaaggttgtctgtgttaagtttccatgtccctgctctgctgtctcttagatatcacataatttgtgtaaccaattatctcttgaagagcatttaggaagtacccagtattttttgctggattaattcctggatgcagaattcctgggttttcattttaatgaaggaggatgcttgctaactttgagtgaggagtcatatctgattgtagcatgctttatggcatttttatagcttctacccatggatctgagccctggaactttataaaattagtttaatcctgtttcctcataaggcacacacagactagatagcaggtgccatgacattcctgagcccttttttttttttttcctcgagggtgaacatcccagtctgtatcttgggccttcgacaggccaacttcactcatcacaaggtgaggtgacaggaagcaggttgtatgtatgtccctcttctattactggggaaatactgaagcaatagaaaaagatcccgcttatttagaaggacacattgccagtatcattgtgttctaagctaccttttgaatgacatggatctaataataggcaatgttgcagttgccaacatcttcgtttattgccaactctgtttctgaggtccctgcccctcttacactttcagcagtaacttaacactctgaataactaacctttgaaagaagttactcctttctggactttatactgtttttttcttagaaggctgggctgagcaaatggg

SEQ ID NO: 16369 - DNA, 1104 bp, Homo sapiens
atttgcccctgacgggaatcatgttgcaggtgaagacaaagaggatttgtaatagtaacagtagatctatacactcttgaggtgacctgtatgtaagccaagggaaaactgaagaaggtcagcgttgatttcagggtgcaagtcggctttcctaagtgatctctgtggtgtcttacactcaaggatacaagaggcaagggagaagtgcttaatggctccaggaaagggggaacaggcatttattgttcctcttttccttactcccacgcttctctcttggtagccttcatgtttgcccacattttataaatacaatattcatgactgaaagcattcagaagcatgctttgcaacttccccaactcttgaggcaggaagtagcaaaaacaatattttgaggatgggctggtgcttgaaagagaggtcagaggggctgctggccttgaagagtggcaggcctcattggttcagcaggactgatttcccgtctccctcagaatgcatttgccactcagactacaaaagtgctcattgtcagctctcacagactcccagggactaaatgggctgccttgaaggctctcttccttatgctattagttaaaacttggtgcatctctattgcttgaatgtctttaaactcatttggctctctttgcagggtaatcaatgagcttattggaaatctggttggacatctttattttttcctaatgttcagatacccaatggacttgggaggaagaaattttctatccacacctcagtttttgtaagtgtttttgtcctgtctcatctaacattttactgcctgtgttcttagtgcatcctaatgagagctccatgaggagtatgatttacccctatgccccatctgctggagaaacctgaggcaacaagtgacttaccctagtcacacagtcacaggaagttagggattaaagcttaggctcagttgccttcctgttactcttttagccagggaccactgacaactagattccaacattacaggaggcatctcagctctctgagcctgctgagggacctgatgcaactccagagtgcgaaacagtaggctggtgaatgggcagagtcacaggt

SEQ ID NO: 16370 - DNA, 1750 bp, Homo sapiens
aaatattgttcaatttaccaaaaaagttaccaaaaccttcccaaaatagttattacaggaagtgaggtacatatatatcttttgcaccttgtatagaaatagaaaaaagtacaagtctttagatttcatagtctgcttattacagatactgacaatgaaatatatactccctgctcatacagtttgaaataaattattacataaagatgataaatgtttataagcaaatctagcatatgaagaacatatacatagatgagttgcacacaaagcctagtgtattatggaagacatatgtggcaggtaatctcaagagaatacaaaagatgtattttcacttttatttctaaaagtagtaaaaattaaaatatggttttctttaaattttcagttttttatgatgtttttcttttttagctgcctaaaacgttgaaggagaatcaattcttcaactcaagatgtctgatttactgtgaatttgcccaatctttgatgacattgaaaacgttttggggcatacacactcaaaaagcaggatccaatacccaaaagaaatggaacttaatgttgtgccaaagttaaactactgcagttggtggaagttctgcaatgtaaatagaacactaattaaaaaacaacttgtaaaaatgcaatttaaattttaatacagtacatttttcttctaatatgatggagacattctgaatcttagactttctgagggggtttaatgaccactagagcttgtcctcatattcagtccagtttaatactgtatgtctagtaagatgggctatatattgcctctattctttgagatgtgattaagcttagaactttgaccaaaaattttacagtaaaaattgttagaaatgggtaaaaaaaaaaaaaaaaaaaaaaccctgatttattactatgtcttatttatcagaccctgcactaagattaaaagttgtgcatgggcttatacaatttcaaatgtaaaaacagcctatttatatatgttgaaacaataagattttatggtttcactggcccttaataattggatccttcattaaacacatccatgaataccactgtttctactgttacttgttccattagaagctgatttgctttttattaaactgcaggaaattaattctgaagaaggaaaagaaactgacatggtaatttggatagggtgaagctttgaaataaatactgcaccaaaaatgtgaaaaagaatcacgtagtaaatgtatacttagtgttttcttacaatcgtggaaatcagaaatgtttatacaggtgtcagatcagaatttttaagagttatctttcagtgaaattttataacagtttcagtgaatagagaaaaaattctgaactgatcataatgagttaaaagttagcttttcacttatgaatcatgggagtgttaactgttaactcttgccgtatcaggagactgaaagttcatactaatttacaaactttgtaaagactggtgctgttcattcatattgggaagaaccctttcttttgtgaccataggaccatttttcaaaatgcgctttcttcgtagaagaaatgttcagtttaattagctttggattttaacatgtttttctgaatgaccagatgtaggcttagccagtttattttctctaatttaatggataataaatattaagctcttggttaaatgtttttcagccattgaaaatgttatgaaaaagccttgaatatgcatgctgctttcatt

SEQ ID NO: 16371 - DNA, 1224 bp, Homo sapiens
tatttttttgagacaaggtcttgctctgtcacccaggctggaatgcagtggtgcaatcttggctcactacgtacaacctcagcttcccaagtagtaggactacaggcacaggtcatgtcaccatgctggctaatttttttttttttttttaatagagatggggtttccctatgttgcccaggctggtctcaaactcctggcctcgagtactcttcccacctcagcccccaagttctggggttacaggcgtgagccaccatgccttgccttttttttctttttgatgttatatattgtttgagaactcttaagttcctttgtgaaattatgctttataaaatgtcttctaggattcatttgtggggggtctaacaaccgtctgttttccattgatttcaatttctgtgggccatttgggatgttattttatagatttttttaatccattggaaatagtgaggtgccctgagaaaatttattcacatgtaatgcgttaaatcttacaaaagaagaaatattactgaatgatatagactgtgttcatagtattaatctcttctctcttatttttaaaatttagttctattgtttccaccctgctagctcttatggatggattggacagcagaggggaaattgtggtcattggtgctacgaacaggctagattctatagatcctgctttacgaaggcctggtcgctttgatagagaattcctctttagcctgcctgataaagaggtaagaatttaatgtcactcaaattttgacaaaatatattgctgtttattaataataagtcttggtatagtaaaaatttggagattcttgagttttgtatcatggtcttgtcaaatgatagtaaacaactcaaatggggacaaatttttattcttttctttaaatataataatgccttcccaaaattactcttaaaattatttcaatttgagtgtagcctttggatgttctaagtgttgcttcagaacatatggcttaatgagtaatcaatccttagccagtttgttagccttgtctttttcatgaatatcatcatataatcctaccgagtttttttaagtctacttaatcttctgggaaccaaagaggaaaatatgtcaagagctgtctgtactcttaaaaacagctcttaatatgcaccagaatgaatagctactttagtagttacttttctcttatttgtgtttatgacgaatataacttt

SEQ ID NO: 16372 - DNA, 2996 bp, Homo sapiens
tttctgaagttttgctcattattgcacatcttattgcgacaaagtgctttttagcagccagcactgtattttttaccttgagacaatctgcatttcttttataaaactaagtatatactttataggctttatgatgactgttatgtttataagcagtcactatgaaaattgcaatggtaattttatatgttagtttatcaaacataaatcttgtttaattttatattttgttacctatactttgggggatcaagggaagagatggaactcttcctctgaaaaggcttcttggtacttaaagtagtaaaactataaaacaataaacatccagtattgagagatgatatgatagggcattatgaattcctatgggtgtctgtaaattatgtatgtcagttggacattgtagaaggtatgtaaatcagcatagttgtgtataacttaaccttgatttataaggtcttaagattatgactattcattgacatctcatgagaagctttagaagactttctatttttaaacaccatttatatgtggacttctgttgtcactgactttgggctttatattttcatagagtctttatggaaaaaatagaatttattttccactcttgtagctatagctgctgcacactttcaccctgatttatttttttgtttcttagctttgatgttttcaaaccaaggattgtgattttaggttagaattacatattagaagcattaagactatgtctttggatcagaatgctttagtgataaacctactttgaagacatactcttaagcaatctggatcttaaatttatgtgaatacttttttagaaaatgataaagaaaaatggaattacttcaaagtgtttcttgagtcattgattcttttagcatctcaaatgttaattagaataattggaatcactttttagacttttcaagttaccttccttgggaagtttgtgcagtgttatagtttagtttagctcctcttacagggtaatggtttgctagtttaaaactgtaaccaaacgaactggtcagacaacatatatctaaaacacttaaaatgttaggaagtttgggaatgttataacctaaacgtttttgctggtaactttttgttatttatagatatttgtgtatttaacatacatacttcaggaaatatatgcctttcctaaaacttaaccatgcattcaataccatggcctatctatagaattgaatattttggaccatgttatctgtggcacagtcagtgctgtgtttgaggtaaatgcagtaacggttagttttctactttgtcttatagaaggtagaaaccatgtgtatgttatgtttgtctataaaagaaaaaatactaatattaaataatttcttacgactctgagtcactcacttatttttccaataattgatattgtacattcctagtgccattaggtatgtatgtatgtaacttttacagtttttcagctgaaagttgtaagtattttttttttttgatcggggctctttaatctcattttaatttcctttgtttgaactgtagttattttatttattcctatattaaccatctaaaccaactgtaatgacatgtacactaatacagaattgaacatttgtagttgttggcagtgaacccagttgttggtgaatttaaagcttaaaatatgggaatgatttgctgctatatttcctttgagagagaaaggaggaagaaatagaacctaatagtgatcatgaattttagggaaagtaccgaagaaccatggggtcccctctggtttcttgtgttgaatgaggcaagggtaatcatctgattccgagctgaagacctctggtcctcttaaggagggagagtgcatttttagagcttttagcaaaatgtgaaaagctgatgtttgcgccttgctttgtgaatttggctttgttttacttatacattaactcatgtaatctcttaaatcttacaagcattgatccatttcaacaaaaaggtaaatttaaaatgcagactttgttatttgccaaagaagattcatgaaaaatttacgtccaattattttgcaaatagttaatttcatttggctttttaccatgttccttcctttctttttcccgcttccttaatgtaatttaaaccctggcaaacattctttagaaaccaagaggaaagaaagaacaaatatcaaaaaagacatagaatttaatattgatacaatttcacctctaaaatggatttgaagaaatgcaactttatatcaaaaaatgtcatctgatttcctttgtttcttttttaaattatgtaatcagatgattttatgtttttttttcaggggagcggaatattggtttcttttacttgttgttttcagttttctctgccattcatgtttcttttttgtgttcagtgtttcaaatacaatttgtatttaaggattttaaaataccaaactgtaactgagtacagtggatcgttttctgttaggatgttaatattatacaatgaaatctataaagtgttgtcaatttgattattgacacatataacatgtttacaaataaactgtggtattgatcaagttactatgaaaatgtgtttaattttctgaaagttcctgtcttaattttaaatacaaccatggtttggtgctgtggctttcctgtacttaaaaaaaaaaaaaacccacaaaaaacttaattattttgtagtaatttcagatttacagaaactggcaaagatagtcagatgttccctgtacccttcactgagcttcccctagcgtggacaccttctgtaaactatggcaggtctatgaaaactcagaagttaaccctggtactagtattttctaaactgcacacttgattaggcttttaccagttttcccactaatgtctttttgttgtcaagatccagtccaggataccacatcgcatgtatttagttatcagtgtctcattagtctcctccaatataacattttc

SEQ ID NO: 16373 - DNA, 2568 bp, Homo sapiens
agtcatttcttaactgtcacatctattgaaaatggatatagatacaggttttaagtattttaagtatatattacttattttaattttctgactttactattttaagggccagagggttaatcacaaagagcaattatgtggtctccctgctacatgaaaccgtgtatactaacaagcgtacaatttttagttgattttttttaaccttttagtttcccagttttgaataattacatggtggattctgacttttgaggggaagcaaatgattattttagagtctttgaaatggggattgtggaattagattgaactaagggatttaacatgatgcttggaaattaagagactaaagctttttttaaaaaaaggtggaaaataggaactgtcaagaaggtttatggtataaatgatgaagttgaagtgatgtttgaaagattaatgagatacaatttatattatttggtaaggtttttttttttccctccaaagatgtcatcttctcatctgaatggaataagtctgaataccccatattcatactcctaatctcattatatcttatttagtgaattttatttatgaataatttctgttgaagtgaaaactagatatttaatattttgcttttttgctacatagtctactcaaaaattacatgaggagaaatcctttttccctttgtttttcttttttcttcttttgtggtatttaaagcatattttaggttgaagttacttatttctagtcttgtacttctggcttaagtataaccatgtaagaattataaattttagttttctgaacccttaaacttttttagcatgtggtctgttacacatgctaaaaaattagtcttacttgtaacagcgtaattaaacacatcatggaggagagaaacttaaaattaaaatagtattttggcttttgaagttatttgtgttgctaaatagatgcagaggttttacagcagtttattttaaggttttatttatacataattactttgaactcttcagagtagatattttttcacaaggcagtttgtcataaattctctcatgcgcttcagaatgcataagtgccatcctttaatcatagactttgaggagagaaagcataaaaatatagcatataatctaaaaataaatatataacatgcacaaataatgtgacattcttactgaatcaaatcatgattctagaacttgagatcttaaatagaatttcggtttgtatcttccatataataaccacacacagataaccacacaaaaaatcctttgtaaaatttctgattgataggattagagtgcttaaatttttggggggggaagggtggggtaaagtgtaagtgctttcttttgtccctaacttgtgtattgatggcagtccactctgttttctaaaaatgtattttactgtggtgcttaacttcttattaattaaatcccgtatcagaaaccttgcctgtgactttagaaagggcttttgattattgttttttcttcttgctcttgaaagtaatctggtcccagggaattactggtttaactgaacatctccagaattatttaaggtgtcaaaatatataaccttcacattgaaagataattttaatttatgggcataataaaaatttgaatcattcaggtaattttcaaaaaatggagaccatttgtctttaactgaaggtatatgtttaagatcatagtctaccctagtatggtgctttgccacaaagtgatttctgaagaatggttctttttaagataatgacttcatatgatcattgtttcatgttacttgccacaaataactttaatttaggttgaaactggaactgtttgtttctcatattagctacttctctattaggagcacaagaaccatagttaaatgcaacatgagctactttagtcctgtttgtttaaatttgtgttgtccatgtattatgatttattaacttgttgatgcatgtaaattgggtgcattttgttgccatgtatgttaaatggtgaccaatgtttttacaaaggaattgaacaaaaaaagtatcttttaagaaatttggaatgtggttttgattttgaaatttgatttcttactaatctcagagggccttggtatattctgttactaaagcaaacaggattaatgaatacggatttgttacaaggtggcagcaatgtcactgagatagtgaatggaacaatttaccacctccctggaatctgcacctgagatacaacatcagcgtatgagtgaagagtgagcccatagaaaagctttagatagactcacataagtcacactgatgggtatttacagcagatatatccaagctgtttatgtaatagtctcatttactttattctttttctctagaacataaattttgaaggtaatggaagtttatcttttataccaaaagtttgtatgagccattttgaagtaaatctttctaattttagaattatattttctcgccatcttaagacagtatattaaatataatataacctttttcttagtggctaagcattatctttatgtatattattattg

SEQ ID NO: 16374 - DNA, 1222 bp, Homo sapiens
cttgccttttgagactcagtgtttggttatatccctacttagagtagtatgcttctttatgaatgtttaggtggtacatctcttgaaaggatcatgaagacctgaactcattttttgtaacataaaactaagacccagagggcttgtaacctgctgaagatttagtgactaattatatatcagagtaggtatttgtgttaggtcttttgggtttttagttcggtgctgtttttcactctaatacatttcttcagtgttagcagtggattagcctcaggctatagggtatccagttgttttggaaccatgtaatagtttccagttgttctgaaaccatccagcagaaaccacctaatacctccattcaaaaaacattttatttggtaactatgatgtatcatttgattttctcctctttattttaacttcaatttttttttaaaaaaaatgtatctgaaggggaattacattttatgaggggaaaaaaagcaatttgaaaaggatattagtattttagctaattgcagttttatttcaatttcaaatactaatgaataaccagtgttttgacaatgttttatatatgcacatacaattgattcttggttcttccatatttttctattgagaatttattaactgaatgagaagtagaatgggaaaatgagaatctgagttctggacctagctgtgtgtctttgagtaagtcacttaacatctgtgggcctaagtggctacatcttcaaagtggagaatgaagtcagtatttcacagtgagtgtgcttctggtatttgggctggataattctttgttatgaagtactctgttgtgcattgtaggaagtttagattccttaatgctggtggtagcatttcccagtcattatcatatcccagacgaccctgcatatccaaacctcttctagtggggagggaccacttcatattgagaactactggcaaatggtctctaagaattctttcagcttcaacattctgtgaaagaattcttatttggggcatgattgaaaaagaaggtaatatatcatacaccgaaaaacctctgctgcttcctggatacgaaacaattttattttaaaatgaataacttttacgaatctgtgtagccctactcacagatctaccatttatgatgttccaagataaattattttattctagcttgccttaggctttttctctacagtattatccatagcta

SEQ ID NO: 16375 - DNA, 1193 bp, Homo sapiens
atggaggacacatggaagaggattcgtttcccagacatactacgagtcttttggctaacaagagttacagctcaggctacagtgttaatgtacatcttaaggatggcaaatgaaactgattccttctttatttcttgggatgatttttgggacctcatttgcaatcttataattagtgggtgcgattctacactaactgtactgggcatgagtgctgtaatttcctcagtagcccattatttggggcttggaatattggcctttattggatcaactgaggaagatgacaggcgtcttggctttgttgcacctgttttattttttattttggctcttcagactgggttaagtgggctaagaccagaagagagacttattcgcttaagtagaaacatgtgccttttattaactgcagtcctgcattttatccatggaatgacagaccctgtattaatgtctctcagtgcctctcatgtgtcatcttttcgtagacattttcctgtgctgtttgtctctgcttgcctgtttattcttcctgtcttactcagttatgttctttggcatcactatgcactaaatacatggttgtttgcagttacagcattttgtgtggaactgtgcttaaaagtaattgtttctctcactgtttatacgttattcatgattgatggctactataatgtcctctgggaaaagcttgacgattatgtctactacgttcgttcaacaggcagtattattgaatttatatttggagttgtaatgtttggaaatggggcttacactatgatgtttgagtcgggaagtaaaattcgggcttttatgatgtgcctacatgcatattttaacatctacttacaagccaaaaatggctggaagacatttatgaatcgtaggactgctgtgaagaaaattaattcacttcctgaaataaaagggagccgcttacaagaaataaatgatgtatgtgcaatctgctatcatgagtttacaacatctgctcgtattacaccgtgtaatcattatttccatgcactttgccttcggaaatggctgtacattcaagatacttgtccaatgtgccatcagaaagtatacatcgaagatgatatcaaggataattcaaatgtatctaacaacaatggatttattccacccaatgaaactccagaggaagctgtaagagaagctgc

SEQ ID NO: 16376 - DNA, 1176 bp, Homo sapiens
actaactatgatatgaacgaatgaatgcttgagtgaattggtccccagaagcggtcagcctctccgccaaggcagaggggaagggccgggaggtgcacgtgggatgaatggaaacatagtgattggcctttttggagttttcttcttaaaaaactgaatacattacagatgttgaaaacagcacaaaaatcataactgtacggcttgttaatttttacaaataaatacaccctcgtgaatccagaacctagatcaagaaccagagcattaccagcacccagaaacctccccgcgccctcctccactgagcggccctttcaacccttacaatgccggagggcgcaattcctgggtcctgtgaccttggtgaccgacgcccgggacaagtcagaaagacccaagggcgtggaaaacgctcctcttaccgataaacttgaagcgactcatgactgcgcatggaggacctccccagcggaagcggaagtggccgccggcaactccgcccttccggctggccccgctcagtcacccgcagcaggcgtgcagtttcccggctctccgcgcggccggggaaggtcagcgccgtaatggcgttcttggcgtcgggaccctacctgacccatcagcaaaaggtgttgcggctttataagcgggcgctacgccacctcgagtcgtggtgcgtccagaggtaagggatggggacccaggactcggggaggtgaccctcggggccccatggaggtggagaggcccctgggtacctggaggttcaaggacttcgggaacggaattggaaggtggcctctcgcttcacagaatcctatggtagacccgggttcaaatccaggcttcgccacttatggccgggagaccttgtagagttgcttgtcgggtctgggcgtcagctttttgtttagtaaaacggacgcacgaccagcgcagagggtcgcaggaaaattaagtgaaataaaggaaagtgcctaaaattgtaattgtcatgggtccagcgctcgctcaatcgttttcttcacgatcttctcctttccaatattaacagcaataaactatgcattattttcttcagtctgcaaaactctaggagttaggaattatcttaagcttattttacagataagaagatgagcacagctggtaacttgcgcaaggtgatagagt

SEQ ID NO: 16377 - DNA, 1395 bp, Homo sapiens
cacaaccagccccatgcatgctgctgcctctgggcagtcgtagaatctcccacttcagtttctcgttgattgtactcacctttatggaatccaaatacatccaaaagggtaaggcagttttaaaaatgtgaaaacatttaaaaatgataatagcagggaattcttagattatagtaaatgccttttacttaactgtgcccagcaggctgggtgcgttaaaaagcccaagtattttgaaaaaactcgaacagatttgacaagggtagccagcttggagtctagcaacttgccaatgtgtttaccaatctgggggcttgtttttcttttcttctttcaaataaatggcagttaactggctttacagtaaacattgaagagaggaggatttgtttattgtcactgggaatctgaccactatactgtcctttttttgtattctgggtaaatgttttttggaaaagatttgtcttttctaagtggaagttaaatttgttatactgcccatcccctaaagccaacagagatttgtagatttaaagggatcacatttgaagacaatagtgtttaagaaagcaagcaagtcccttagcagtcaggtcataacagggcacatttctgaccgaaccctctcaaggcagaggaggagtttggtgggtttcatacaccctgcagattcctgttggctctaaccctcaattacctaatcttatgctttaacacataactgcattggatgtgagagtaacgtaccgtatggtcattgttctatatattaacattgaacactgctgcgattgctcaaggacattttatgttacggctttaaagcaaaggcatgattattagaaactatttaagcttttttctttgaaaaacaagctccttttacagaatataaacaacagtagtgcctgtggtttagcccaccaatcttgatgactaaaagtagctgatgcattgtgcatatgatgcttgagatggtttttgcaaaagcagaaatcgctgcaaggtaatcacaatagataaaagtggtattttaaacctttgaaataaatggatgtaactgtaccttggtacagcttttcacttgtttagtttttaaacgttagtataatctgaataaataaaatgttgccaaattcaatgtagaaagaatgtgacaacacaccttgggtagttctgcttgtgtttttgcatattgtaaaagcagtgtcacagctaaaaagaaagaaatcgtttctaacagtaaattattgtgctttagttgctagtttgtactgagagttgacctctccctgtgcagttttttgttctaaacttgtataaataacaattgtgtaatgtgtctccctcctacattgtaacaattgcttcagcctacgttataaataaaga

SEQ ID NO: 16378 - DNA, 1149 bp, Homo sapiens
ttcccaggatatatttgaagaatttagttattaatgatacagtttgccctataataagtctttgaagccccttataaacatttattatattcggcccagtgtggatttctaaatatgtctgtataacattttccaaatatcatgtttagaaaacaataaatatttaattttattgggataatatgacacacttttatttaacgaatattttgatatcattgatttttatatattatctagattttaaaatgtaacaatttgtttggtttgataatatttagtatctagctttagcctaggatgcaaaagtccagtgtgtccacatagcggtagcatgatttgaatctaacaaatttggatacctagtttacctttttttttttaaacagcgcagaaaaggaaccaatatttcagaaacaagcttaataggaacagctgcctgtacatcaacatcttctcagaatgacccagaagttatcatcgtgggagctggcgtgcttggctctgctttggcagctgtgctttccagagatggaagaaaggtgacagtcattgagagagacttaaaagagcctgacagaatagttggagaattcctgcagccgggtggttatcatgttctcaaagaccttggtcttggaggtaggttcatattgattttcaggagagttacgtggtatgaacaagcactcttcacttagaccatcctatgaccagtaagaaggtattccattttattttcatttataaaattttctatactcatttaccaacaaatttgcatgaaagtgagagcaaaggataaaataagcatttaatagtatgattagatgtgaattagacttaatgagatataataaaatggccaaaagattgtaatggtcaaaattaaggactggaaaatcctagaatgagggcattaaattttgtgaaaggcgaagggaactgtcatttgtagagggtatgttgtatacttgttacagtgttattacttagaatcttttatttaagcaccattcatccattcaaccagtgctttttaagcactggctattcatttaggaaatatttatgcactgtctactttgtgtggggatggggtggtggggtggggtggggtggggaaggtgggagagacacaaagaagca

SEQ ID NO: 16379 - DNA, 1220 bp, Homo sapiens
ccagaggcaagaacattcctcgcagatcaaggtacctttaagagccaagaagctcagatttggaggcgggagagctgtactgcatcccctcaaatgttagcagtgccaagaaatgagacgctagtctagggggcaccacaagcagaaaggggctgtttcaaggagtcgtccgcccatgggagtctcctcttctattattcaccttgctccaaggatatcttttcttttacgtatgaaaattttgtaattgttcaactataacaccatgaataatttaattctttaatttttcaggttgctgaagcacatgtgcctaatttcatttttgatgagttcagaacagtgctgtaactgtttttcctacttcttcaatggaaggattgtccttagatcttcccaccatcacaaatgaatttgaagatgaaaagaaactcagttgctcatacaactgcattttttctgtctattatgggaaacatcagacgttctgagtaagatatatctcatggcattagttaatataactgatattgtttaaatcatggtattacatgcaatttatatcagataaaagcagaacacatttttgtactgcctctcttaaatgctgaatgtaactgttatgtataaatccatttagttttatgttctaaagaactatttgtgcaactccagattttcagtaaaatagtattactagtacccaaagtcgtctcgcttatgattcaaaaactgtgtattcaccctgtaaaaaaccctgtttggaataagagatgactctgctaggtataatagctcacccccaacaagctggcaggcacgtggtgatagccagactagtagcaaatgtagtggccacacaatctgtgtcatgtgccattgaagtttcttggtgtctcatcatcctcttccaatcccacatgccctagggggtccacagcattccttctgtaggactccttaacaaagctgctccttccggtatcttcctcagcaacctgagtcctgccccaagtccccacaaccgtatcattatccagagtcctttttggtaatagccttcccataagcttaactccctcgaaatcctaaatcatttctgcatgaaaattaccctgaaaaggaagctgccactattagtctgttctcacactgctatgaagaaatatgggtggggacacagagccacaccatatcactgccatcctactgtggcaact

SEQ ID NO: 16380 - DNA, 1205 bp, Homo sapiens
atccccattttacagaggaggatattgaggctcataagaggttgagcaatttgccaaactttatatttacaattcaaactcaggaaatcaagctgcagagtccatgccctttactattacgtaaactgcctcttgttgattgactttattgaggaaaaagaaaaaatcttagaagttggaggaaatgggaagtcagtacagcaatgataatgtgatctgttttgtaggacattagattttttcaaattagtgattattttggagtacttttgctaaagtctgtgtttctaaaacaaagtgccttcatccagtgggctaaatctgagaataatttatcacatatttggcatatctttcttaggctatatgtgctaatccctaacatgagctgagtttgagaacttaatgtttttacatattacctcagagactgaaatcagttcttaaaccagtattgggttttgccattcagagaggcactgtggggccatgccaagaaacaaattagctaaaagtaaggctttccttcagtcgacagcagtgggtctcctttcatcttgtggctcttttaagctctctaacaacctctttctgtcctttcgactccattcacctcaaacccaacagttcttttttgtagtcaacactgctaaatagttattcagagccctgcagctctcatttcattcttggctttgtctaagttcctgagagagctgcaaaaagaggttgaagaagtgaaaatcatcagctcaccctgtttgcatatcctgcagtttgccagcaccccctgagaaagttcaaagtctaagggtacagtgagcagagaagcctctccagggagattcccaatagcttgtttgtttcacattgtgctctggggtatatttgtttttattcaggaaggtattgcctttttatttcttgatatattttataagaaaatgttttctcttaacatgagagcaaattatacttatttgctgaacaaagcaaagctatctgcaaggacattttagttttcacttcaagcatcattgcttttggcaattgtagacaaattatcgtactgtttgatgaggtgtaaaataacacgctttaactggagaatgaacacatttccagatacaatattatcgttctcttctttttcaagtaataatttccaaaagatgaattttaatggactttttgccatttaacca

SEQ ID NO: 16381 - DNA, 1251 bp, Homo sapiens
ttttcctccgccccctccttcggcttctccgctgagctgggggcctgcgggagggcgcgcgcgccgcctcctgcccagcccctcccagccctgggggcgtgtgcgcgcgtccaggccggcccgggacgcaccacctgcgcccgagcgcgcgctgcccggagcatccccagccctaagtccacccccattccccccacctcctactccctctccccttcccccagtctcctccctccgctccggagactgctcgctgggcggcggggccggagtcgtcgcagccacctcattgcacaacccggcttcccaactgtttacacagcccggcctgtgagtgtgtgtgtatacagcgtgagtcaccaggaggcggaggaggtggaggaaaaggagaaggaggagtgcactggccgggatcggtgcagcgctcacactcactcacagtcactctctctgagcgcgtctcgctcgctctcatacacgcccggagcccaggagcgctcaggatcccgagcgccgcgaaaaagttcccccggcttttgctggagactcatcgctttgggaagtgcatttgcttcgtggctccgccgagcctgctgaatcctgtcctcgcggctcgggaccccgggatcgctgaccgctgccgccgccgcctctgcctcccggactatcggcagcctcggcaacaatagtggcggccgcccccagcgaggctccgggagcccttgcctgcgggggtccggggactcgagccggcctccgcctcccggacgcacagccagcgtggtccccgcgtgcaacgcgagcgccggggagtggctcctgctttgcccctcgtgggggccgagccaagaccagtctgcaaactccatcccgccggctggaagaagtcgcggagccggcaccaaacccgcagcgtcttcccgcgcggatcccgggacttaaaaagccggggccaccccggcccaggacgggatgcgggtcggtccggtgcgctctgccatgagcggcgcctcgcagccccgcggcccggccctgctcttcccagccacccgaggcgtcccggccaaacgcctgctggacgccgacgacgcggcggctgtggcggccaagtgcccgcgcctctccgagtgctccagccccccggactacctcagcccccccggctcgccctgcagcccgcagcccccgcctgccgctccgggggccggcggaggctccgggagcgcgccggggcccagccgcatcgccgac

SEQ ID NO: 16382 - DNA, 1300 bp, Homo sapiens
gtacatctgaagtagattctaaacattagagtattaataaaaatgcatagataagtgaagtgaatcctcaacgtaaaactaccagcctagcatatactggttccagataaaagaagtaaagttgcaaccaagttaaagtttgaaaatataattaattatgactgataacactatactgcttttatctaacaacaagcaaagcgaccccaggactctgataaatagaaatacatcatggacagtgaaaacattaacaattctggcgtttgtgttgtcatctcttatagcacctcctgtttccctggcaatcctcagaacccagacaggagcgtggccccatcagtgcatgctgaagggcgaagggctggtaccgagaattatccatttcaagcagaaggaaaatggaccagttgtggtgttgggacacattacaggattgcctgaaggccagcagatgccatgttcatcagtgtgcaaataatatacaaggctgtaccagtgcaggtcctcactttaatcctctatccccaaaacacggtggaccaaaggatcaagagaggcatgttaaacacctgggcaatgtgactgctggcaaagatgatgcaatgatgtgtctattgaagattctatgatctcactctcaggaggccactccatcattggccatgcaatggtggtccatgaaaaaccagatgacttgggcaaagatggaaatgaagaaagtacaaagatgggaaatgctggaagttatttggcttgtggtgtatttgggaattcccagtaaacattccctaggatgaggtctgagtgccagtaacacatgtgttatcctgctagctgtagaaatgtaacttgataaacatttaacactgtaatcttaaaagtgtaaagaaaaaaaaaacacacacacattcacaattctccagaaacttcttatgtagaatacagttttaaacatgtttatgttaatgacattttacccacacaaatttaatctatgcaaacctgagcatctcttccgattggacaatgcttcctagacatcttgtcaatgataacatatcaaacaatcctaactgtttccaattcttgtcttttcccacggtgaaagaacacatctttgcaactttccagaggtcctctgggaaatctcaaaggcaattttgggcactgaggaggctgagaagactgtgcttgactgttagctgaaacaacttttggctgtttggcagaggactaacaggccctctgctttatgtgaatttctcactttaacttgtttgctccattttgggtgcag

SEQ ID NO: 16383 - DNA, 1113 bp, Homo sapiens
ctcccgcgacgatgcccctcaacgttagcttcaccaacaggaactatgacctcgactacgactcggtgcagccgtatttctactgcgacgaggaggagaacttctaccagcagcagcagcagagcgagctgcagcccccggcgcccagcgaggatatctggaagaaattcgagctgctgcccaccccgcccctgtcccctagccgccgctccgggctctgctcgccctcctacgttgcggtcacacccttctcccttcggggagacaacgacggcggtggcgggagcttctccacggccgaccagctggagatggtgaccgagctgctgggaggagacatggtgaaccagagtttcatctgcgacccggacgacgagaccttcatcaaaaacatcatcatccaggactgtatgtggagcggcttctcggccgccgccaagctcgtctcagagaagctggcctcctaccaggctgcgcgcaaagacagcggcagcccgaaccccgcccgcggccacagcgtctgctccacctccagcttgtacctgcaggatctgagcgccgccgcctcagagtgcatcgacccctcggtggtcttcccctaccctctcaacgacagcagctcgcccaagtcctgcgcctcgcaagactccagcgccttctctccgtcctcggattctctgctctcctcgacggagtcctccccgcagggcagccccgagcccctggtgctccatgaggagacaccgcccaccaccagcagcgactctggtaagcgaagcccgcccaggcctgtcaaaagtgggcggctggatacctttcccattttcattggcagcttatttaacgggccactcttattaggaaggagagatagcagatctggagagatttgggagctcatcacctctgaaaccttgggctttagcgtttcctcccatcccttccccttagactgcccatgtttgcagcccccctccccgtttgtctcccacccctcaggaatttcatttaggtttttaaaccttctggcttatcttacaactcaatccacttcttcttacctcccgttaacattttaattgccctggggcggggtggcagggagtgtatgaa

SEQ ID NO: 16384 - DNA, 1177 bp, Homo sapiens
tgtgttgtctgttataagatgtttcagacctattttgcatactggcagcgacaagttgagacttgttcaacttgacacagtcctgtggtcatagcgaatctttctaaagctctgatcagtcaagaagggggttgtatcaatcctcagaaccctgagtggaactttctacaggatttattaggagaaaaaccttcccggaagctgcagaaggacaaatacagaatccgtgtctgggagaaacctcgtggcctggtctccattatttgagatgagttacatcttggaggtgaggacgtgcctcgtggtctaaagcttcggcacaagggcccaactggaattccacttacgggtatgactgtggggtatatgctgtacccattgaattcccagagggatttgttaagtggttgtgttgctgttttgcctggttaagagtggcttattcttgttgcctcatctatcttgagtgcagaatttttgcataaacggcttctcttgaaaaatagaagtccgtttttgttttgttttgttttttttctgattaactttccttttcctctgtcttaaacaccttcccccgcccctcgccacctccatgctgtgtttctgtggctggagcttttctgcactggaaaggaggagttctcccctctgttctgacatatctgatccccactagtttatatgattgctggtctgaaaacctggtgaattctcactgcccacatcaaatcaattccctgttctttagttgttttttttttccgcctcctgagcggtaggcaggcactctggctggattctggagcctgtgtttgccatgcctgggccttctgcctgcccaagatggacacgtttctctggcagctttgtcaagagatctcctggactataagacaccctgttctttcctcctgtttgtgtgagtggccctgcatttgggcagagtattggcagaatatctgggggaagtggaagactttggatagttgccggtccaggtcgtctggagaggcagtggcaggcctgctgatggctgcccctttgctatttgttttatatcaggtggcccttctggatgtgtggcctttttattttgcatttcctttcatagttggctgcagacataagattcttctttttctcttgttttgcttttttttttttttttttgaga

SEQ ID NO: 16385 - DNA, 1232 bp, Homo sapiens
aggtacacaacaaaacatttgaatgatgagactacctccaagcaaattaaatccatgctgcaataacaattctggaataagcacctgctgtagacagaagacagtattctgcaatgactgagaatgcagttttttagtgattgcaattactatctcatttattcttgcttttatttctttcctctgttcctcttccctcttttttaatcatgttcttaagacttcttttctgtgccaaaatcagtaaagttacactctgaagggatatcatcctttcaaacgggccatctaaggcagctaattatgcattgcattggggtctctactgagaaaaattctgtgacttgaactaaatatttttaaatgtggattttttttgaaactaatatttaatattgcttctcctgcatggcaaaactgcctattctgctatttaaaaaccctcaatgactttattttctactgccgcctttttcatgtgcaaccaaaatgaaaatgtttaaattaactgtgttgtacaaatggtacccaacacaaactttttttaaattagtaatacttttgtttaaagttttaagtttgcattttgactttttttgtaaggatgtatgttgtgtgtttaacctttattaactaacgttaaaagctgtgatgtgtgcgtagaatattacgtatgcatgttcatgtctaaagaatggctgttgatgataaaataaaaatcagctttcatttttctaagtgtggcttggtttactgatgttttgtttttaggcttctgaagttttccccatgtatgtttttatggaatgcatatatacattacatgattttttcttcttttaggggagagccgggtcttttcattagaattttgatcattgtctatgtatatacttttaattgcctttaaaattttgctaagtatattaagaccagtgatcttttcattaactggacttttattcttgatttactcttgtatggatgtagtaatggaaggaaaaccgcatccttgcttgattctccatttccaggggagcgggtagcaacatgaaggcagagtagccctttaatcatgggaagagagtgattataagagggacttcccaggagaaaagcagaggccatgatctcactagtggtagaaaactaacaggtttcagtttaagatcataaaacctaaatcatgaaatctaaatctcatggttggaacaaactacttaaaggttgtc

SEQ ID NO: 16386 - DNA, 1205 bp, Homo sapiens
acctgtaatcccaacactttgggaggctgaggtgggtggatcacttgaggtcaggagttcaagaccagcctggccaacatggtgaaatcccgtctctactaaaaatacaaaatttactaaaaatactaaaaatacaaaatactcacttgaacccaggaggcggaggttgcagtgagctgagattgcgccgctgcactccagcctgagtgacagagcaagactccgtctcaaaaaaaaaaaaaaaaaagaaagtcagtgctcttaactaatgtagtcttgtcaaccctataagggccttcacggaaaaccattgactcttggagcctgggtgccctctgtctgtgacagtgcacttcccttttctacttcttttttcccccggtttcctagactcccaactatcctcactggtgaggcttaaccataggatggggacctttggcaaaatactgtacagccatttctacgtaggcgtgcttttaacttttattttaatcgagctatcttacatgctgtaaaatgcacaaatcttaatcgtacagcttggtgaaattttgatatgttacacccatctaatcaccacccaaatcaggatatacaatatttctagaaaggtccctcatgccctttgcacttagtgttgccccagagataagcactattctgacgtctgtcaacatagattcatgcttccaccttggccgtatccaaatatacttgctcaacaaaagcaaaaggataaaacaccactttaaatagtgtaggtgatcctgtcattccacccaatgggcgtctctcttggagtgggtgtgaatggcagacatggatctgctattccgtctgttggtcatttgttctcatggctttttaggatgtgagcatcttgtgccaccaaatatgtttctcatatttatggattttaattatcacacaacatggcccctaaatctaagccagttattacatatggtgcccaaccctaagaaaccaaatccagtgctgaaggaaagactggctgtgttggacttcatgaaagatggtttgtttgtctccaacctgagaccttattgtgggatttttcaaggggaattttggcttctttcaattttcacacaacatgctggcttcagaagctaacccttgagtagatacaattttaatgtgggcagaactcaagtgtggataagtggttatattaaatttag

SEQ ID NO: 16387 - DNA, 1616 bp, Homo sapiens
taggctgggctcttacccactgggtttgtcgtggggccactgcctgctgcctccatcctgaccactctcttttctccctgcagattggccacatcgaaggacagcctgaaaggaagggggtctttccagtgtcctttgttcatatcctgtctgactagcaaaacgcagaaccttaagattgtccacatccttcatgcaagactgctgccttcatgtaaccctgggcacagtgtgtatatagctgctgttacagagtaagaaactcatggaagggccacctcaggagggggatataatgtgtgttgtaaatatcctgtggttttctgccttcaccagtatgagggtagcctcggacccggcgcgccttactggtttgccaaagccatccttggcatctagcacttacatctctctatgctgttctacaagcaaacaaacaaaaataggagtataggaactgctggctttgcaaatagaagtggtctccagcaaccgttgaaaggcatagaattgactctgttcctaacaatgcagtattctcaattgtgttactgaaaatgcaacattagcaaagaggtgggttctgttttccaggtgaaacttttagctccatgacagaccagcctgtagttatctgtgtacacagtttacagctacaaaaacctactttggtatttattacagaaaagtgctcagttaaatgtaagtgttattccttcagcaaaatattcactgacccaaaactctttatggcattttacaatgcacacagcctcatgcaagtttagacaagtggatttatactgtcttatgagtgcccgcccctgatatattacctcattatgcaaaaataacatatctttcatgactattttgacaaaagtttaaaacacatatgaagttcaaatttcaggaaccaaggactgccagaaaatattagcctctacattacgcatgcatttagaagcttacctgaaatctgccttttataaaggaatagtatggataagtggaattgtacattttttaaacttgattgccattaaagcagaaattataaggttgcaacaatatttgtttctaatcactggctttctcaagagtatggattgacatattgtgttatgaatgcacatctctcagatgtgttgaagcatccattgcatccattttttattattttcttagttttgttcttggacaaatttaaacttttaaaagattattcaagatgaatttaaaagtcaacccttcacacagtttccctactgtatgtagaatccaggtgctgaaaccaagtgtttcttttcccatgctctttgttaaaccccaattatagataatttttccagtcttaagctctgtccaccttcaagtcaattcataaccaagtttttgaacgctgctatgaattgcactgtgaaaagcactcttccctctcagttttcttttcatcccagccatgtttatcagatccttaagaacattgtatttcagtcttttacatcagtctgaattttggaaaagaatgcaatagttgtactccacagtcagtggaactgttccctgagtccgaggctcatgtgtcattctggcactacatttgcttaaattgc

SEQ ID NO: 16388 - DNA, 1182 bp, Homo sapiens
ttcagcctctctgcgcttcagggttttttatctgtaaaagcggttattattagtatttaccccatcatatagttgtaaagattcaatgaactaatacatgtaaatgttaagaaacagtgtctgtcccataggacctggcactctaaataaatactgcctgttatcactgtattgcttataaatctaggttagaaacatcataattttctctattataataattaggtctcaaatttgactcagttgtcagcacaaaaataagtggctaatctatagttttaagttataaagtaagtcatttttttctaatcatcatctaatttttcagtgggaacctggataagcagacggccctgggaaacacagttctacactactgtagtatgtacagtaaacctgagtgtttgaagcttttgctcaggagcaagcccactgtggatataggtaagagtgtgtctagtgtcttcatgactgtagtaagcgtgtgttgcatggtacattgtaatttgattattgttccttgccttcttaaggtgtttcctagataattatgcaaattaatttttttcctatttcagttaaccaggctggagaaactgccctagacatagcaaagagactaaaagctacccagtgtgaagatctggtaagcaaaaatggacgtgggagatttattagacattggctgccttaaaagtgtcattctgagaagctagaattgaatattaaaaatgcagattcatttttttttaacacttgctaaagaaaatcagatgagcaatgtgctacattagaaaaagtggtaaaatgataaatttgtcatccacatgtttttggaatgcagttaaaggaggtgaaaggcattacacaagtattattaccagatcgacttgtgcattgaggtcatgctttttatttcccagaccattagactttctctgcagcttaatagtaaagaattatttgagaagctgctccaaaaattgggcaagtaaagctcagagagtagtggtcttcaaaatgttaacacactgttctcccagcccctccccttcctgtgcacattcaccttttttgaccctactagttcttgcttagcaagtcagggccttcacattagtgtgattctcttgagtttctgctaagtgccaggttccaggcccaccagttgggcctttttat

SEQ ID NO: 16389 - DNA, 1886 bp, Homo sapiens
ctgttgaaagggaaagtcaggcccagaatctgcctcccaactctttttttccatctctttttccactagggtggttgtatgctctttaggcactgttgatttctggctttgaatcatgatctcttcatatttcagtatgcatgaataataggacaatttcatgcattcattttgctatttctgagtagaagttagtgtgaccaaccaagttttaatctgatggacctgcatctgaatcctggctatgttgctcactatttgtcagtttactacacctctctgtgggtcagtttctccaagccttggtttctcctctgtaaaataggggtcataaagtgaccttattgaatgacagtgaggattacatgaagcaatctatttaaatgcttggctgagggtctgttgcatgatcggcatccaattaatggtcatcctcatggtgataaagatgatcagtgtcatcaaatgaaaatgaaagggaatacagcctgagataatagtctggggaagtaagtgcttgtggtagggaaggaagtaataggcaaaaagtatgctttagctctctggatcccagtctgaactctgaagggaggagagaataaatcagtgatcgttaatccgtctcatacccagtgacagagcagtgtggccagagagaatttggggaagaagaacaggaagcacaggaaggcaatgaagacaaggagggatgcttgatattctgaaaggagggttggaggtctgatatgtatttggataatctaaagggagggtttatttatgacaaaggtactttgttagtgggatgatgatttttagtcacattgctgttttgtattattaaatggagagctgttggtatttgagagagatgcccagtttttccagagtctgaaaagagatttttgttgatgttgtagtataaaaagtactctgtgacatggcacatggctgccaaaagtgtgaaagaaacaggaaatcactacacacttgaaatataatagaccttttcattcatcttgtgtttttttccctctgaattgttaaataaaagtatattctgttacatgctacagctagaagcaagctttaagctatcagaatggttgtgaagaactgtagaataatatgaagataactgtatttgtttcatggcataaagttcttttcaaatttggttactcatcctgtggtttaaaagttaaaaagagaccatatatattgtctctgaactctagctgaatctatgtgaaacacaagtagaacttttgggaggctgtgaggtttgtagaagactttaatagaaatgaatgaagagctggcattttgtaataatatttcatcatgtgcttttctttttccgttacccaaggaacatatttgatgtgcttgatatttttgttgttgttgttacctgaaaatcaaagagtacctctttatatgtgtgcctcagcaactttttgtggtttataggataatgtccactctccttaacagctgcacctagagtcctctgccttctgctgctgccagaaggagcagaagcaaactggaagcctcttgcattttcacgtctccttgcctcctcctgtaccagatgaacacctactcatctttctggactgagctcagatgtcaccttctgaagagacccttcctaactactgcttttccctgttccccagtccccattagaagttggcagcccagtccttgcagctccagctgctctgtgcacactgtggcccaacacccatgaggcttcacggggttccctgatggctgtgagtctcttctgtaatctcagcttctgggggataggcatggtgttccattctgcatgctgcttgtcacataataggccctccagaaatactactgaatga

SEQ ID NO: 16390 - DNA, 1277 bp, Homo sapiens
tgttcttgtattcttagggacattttttagctcagagtaacctatgataggaaaagaagataacttctagaagtggtaagttttgtaatatgacagattctcaagcaggatgtcgcttccccattctgtaccatctgacttaagttttgtacgtctggagagcagtggcagtaattgtataattttttggcagctgcacaatgttttgacgacgttgctttagtctccaaagtagacagttcagattttttttttttttcaaaaagaactttctcagaaaggcagtatagtgtatagtgttgagagtacaggcttagaggcccttaacgagatccatgctccatgcttctcgttgtatggtcttggggatattattgtctttctgattctctatttgtaaagtgtaaataacaatacctacctcatagggtcattctgaggattaaataagaccaaacctagaatttagtggacactcaaatatttggtaaatacattttgaaagaatcagactagtagatgagggatagataggagcagggaattcttggagtagattggatcttgttgccatttggttaagtcttctgattttccattgtatttgcacaatatccatgaagccagattttgtgcttttgaaaaacacttggattagaatttggtgtattagtttgctgagctgttgtaacaaagtgcaaccaactggatgatttctacaacagatatttattgtctcactattctggagggtagacctctgaaatcaaggtgttggcagggtgggttctttgtgagggctgtgaaggaaggatctgttccaggcatctccctggcttttatatagccatctatctggagttctgactgtatgtgtgtctgtctctaaatttttcctttttataagaatactagtcgtattggattaggacctaccccaatggccctatcctaacttgattactactgcaaagacccccctctctctagatatggtcactttctgaggcactggaaattatgactttaacatatgaattttgaagggacacaatttaatccataacagaggtatatcagacatgagaatgaaacagacttttacttacaacattttcatttttttaattgtgcgtatttattaaactttgatgtaaattaatggtataatctttttttcttttactgagcccagacattcatttacctaaacttaagtgaagtgtatgtggcacttgaaaaagattggtaaaattgaacaaaaattccttatttcc

SEQ ID NO: 16391 - DNA, 1339 bp, Homo sapiens
cctaaaataatgtttcaggatatgaacagaatattgtctgctgaagacagctacgtatacagatattctagttagcttttaaattttattttttatttacaggctaggtcatagtttttcactttatttttgcccatttacagttaaattaaggatacctaaagatggtctctgggccctgtgttcttactaagattttgctataaatatagaaaagttgaatgaaagtgaaagcaagctgctgagtattttagttatacataaaagacattctgttagctagaaacaatttgcacagccaagtttatttcttcaatttgaaagagtgtatgattcattttggtggtgttaaattcatgaaattagaattaagctatatattttctggagtataaaaagaaaatgccattttaacatttctaaaaagtaaagtatattttgtttattagaactgatattaaaattcttgtgtttttctttatttctcgttcctttttagtcgcataggccctccttcttctccttctgcaactgacaaagaagagaatcctgctgtgctggctgaaaactgtttcagagaactgctgggtcgagcaacttttgggaatatgaataatgctgttagaccagtttttgcgtaagtagttggtgttttcctggttatttgtgattttgctgtattaattctgtgttaacttatttatagaggacaactacttttttacttgcatgagtgagttattaatggaaccagtgtaacattgtgaaagtagtacaggactgagtcatgcatgatgtgtttgaccagtggttcaattacttaattagctttttccctttaagtatgaagtgtaataatgtgttaatatcatgtgcattaacttgaatatctgcttacagaccttgaaatgcctatgtgcagtgaaatatttaaacaaacagtgtctaagcatgatgtatcttgttctactaactttcatggtcagtttttcctggtccctggcttctatttattggctctctttttgccatggctgggctgccttagatcgcattcacatctctgagtgaattcatcttttacatagtgattaatcagagcaagaatattaaatatcttgttggtactttcatgctctcctccaggcaaaatatgttaatgagctttgagtttctccacatagatatggtctctcaagccttgtcaagcctttgtgtttctgactcaatcaccagatgatagatctactatataatattctgtgtaatttctggacatttttgctagtctttcttttgttaaaattcaccttgtccttttctccttctgactgtaata

SEQ ID NO: 16392 - DNA, 1137 bp, Homo sapiens
ccacctcccaggttcaagcaattctcctgcctcaacctcctgagtagctgggattacaggcatgtgccaccacgcccagctaattttgtatttttagtagagacgaggtttcaccatgttggtccggctggtctcgaactcccaacctcaggtgatccgcacacctcggcctcccaaagtgttgggattatgggcatgagccactacacccggccaatatttttcctttttctaaaactccagtcaactcaagtcagtcccggtttgtcactgttataattatataaaaaaagactttgatatatttatcattttatctaccagtccattatacacagtttatattgtacataactaaatgattttgtacaaatgaaattgtaatatcctttaatgttacatgtagcttacagacttgtgagggattgttttaccacatattgaaaactttggctaaaaataattttgtattatatggaaaagtagactttttcagtttctaaaatttgtcttaatactttcataggattttttggaagtaacctaccagattatcagaggtcagaaatcatgatgttcattatggggaaagtacctgtctttggaacatctacccatactttggatatcagtcaactagggtatgttctcagactgtaaatttgaacttaatcttgagttacattttatcctaacgaaatctagaaaatgttaacgttttgtttttttttaaaaatcattagtaatagcattcctatggaaagcagttagtattattatgacagtagattgctaagcaattgaattagcatttttaggcctttagaatcattttcagcttataaattctcagatatttccatctttagaaattgtttggcctggacattgtgtgtgtgcatacacatttagggtaaagcttcaagtttcctgtataaattttaaacattaatgtcaatatatcagaaatattggcttattcctagaattttagaactgaaagtaattttaaagattatgtgacccccttattttatacatttaattggattttataatatgctgaagtttttgtttgtgaatgttgttttgttaatttaataaggaagtaatagtatcttattcgacttacatttc

SEQ ID NO: 16393 - DNA, 1123 bp, Homo sapiens
gaaaacattttttataaagcagacaacatctttgaaatgttgccgttatccaaggacatgaattttaaaagggaggtatctagttgtaaatctaaaatactcaagactatgactacattcttcatttattccttttacatatgttgcatgagcatcaactggtgtgctaaatatccttcaaggccatagggatatagtgtgatgaagcagacaaacatagtccctgtatccacacttcctacactgggggggatagtcattaaataagaatgacatacatgcagttgtttaattagagttgcgtaagtgttatgtaatagaaggacagtatgcaatggccatatatgcatgtccgtgtgtgtgtgtatatatatatgagaacaggaaaggctttcctagggaagagagtttaagttggaaaaattaactctcttgtaaaagaacatttgttttcctttcagaattgttttagaaaataacttctgataaagtggcatttttgttagctttccaaactacctgcagttttccagtgtaatcagagaaaatgctggtgaagtataagaacttgatctctctgatgtgtttgtttcttattaaaggacagtgcaattatcaatgaggataatttgccaatgttccatcgttgtggaatcatggcactggttgcagcatacctcaactttgtaagtcagatgatagctgtccctgcattttgccagcatgttagcaaggtaatgtatttagaaaagtccttaaacttgaattttgtacaaaattgctaattttattccagtgatgattatttttaactttggtgattacgtatcaaattaaggtaattctataaaaatctacagccagtaaactgaaactacagctaaaactgtagctactgtttttatattttcttagatgcatgttgttttattataatagtttaatgtagtggttgaatggaatatgtggttttcttctagaataccttatgtgatttattctatgacttttttcctttgaacccttatgactcttagtatgtaaattttcttaaattatactcttttgttgtttattctaaactacttgaggcagatctcaaaagttgaataattactgtgca

SEQ ID NO: 16394 - DNA, 3074 bp, Homo sapiens
cctcctcccagtccatcaggaacactgaccattacttctgggcatgcccaataccaatctgtcccagtctatgagatgaagtttccagatctgtgtgtgtactgatcggcgcatgaagacctcaggatatgatttgtaaagcctaaaaattaaggccaagctgagctttcagggtttacttaatgtgtattaacatacttcttgaaaataatgatggaacatatctttaaccaaatgtttggcataccatattagaagttttggagctatatataatttcgagtactttcaaagatagatttatgccatgttaatttgctttgaggttcctgttgcctttttaagttgaacatgttttggtttcactttattccactgttaagtagtatgttttaaacttttcacaaatgtaatgttttttaaaaagtaagccttcagaggattgaaactgtataaattgtttatctcttaaacatctacacagccgcttagatgtagaatttttgttgttgttttctgcaaaggcagatacatttaaatatattcctagtcctgggactgcaaaactgttcggtggctttttgtccccatgctttagataagctgggataggcaccttgctattcagttactataataatatgtgataggcattcctcatcttcttcacaataataggacatctgttgaatagcattcctcgaatataaccctaaaaacgccatactttaaattgtctggttcttgtaatattgtgtttcctgccaagagtttgaccattctgcttgagaagtgtagagcttactcttggagtaccaaactgtgcaatatttttacatcataagatgtattagtttacaggctgtgctttgaaattatagtagtattttgctgtggctccattaattaaatgagatatatatttagtgcagaaaaaagacatttaaaacagctattagttcacctgtgaagagtctgtacattttgatttctattaagagcacatttatttacatttgtatattattttaaatcctcatagtcaaaaaattctccagatggacttttaatttgtaagatttgaactgtgacttgtatacatctgtttagaatcaattatatttgaaaagctgcctgtgttttaacagtcaagtgtgctaaagtttgtcaatttaagctgcttttgatttcagctaccaagatcacaggtgcactctacacataacactgacagacccataacattacatacatcttagtgaattctatcacatggtaaaatgaacagctttctttgtaactcataaaattctcttaggacatttttataaagtcacctgtttatagttctatcttttcagattccatttctttttacataaaacagcatacatatcaaaaactgtagcctagaatacagtttaatttttggcttttgtttttgtttaaaaaattgcagtgaagaatgggatgtttgtgtttatggctatttgggcacctttagtagaaacagacaaaagtaaggaaacgataataggacaagcatacttgaaaatttctgaatacttaaacaaaagcgcaacatcttgaaaaccagtctagtcattgaaacctatgaaatgacactgaaagatcctgggctgcttcttaaataagtagatcagcaagacttgtttcagagtgacagtggagtcgttaccgctggaggactaaagggccctgtggcagctgtcactggaactttgcctcttgatcaggaaaaatgcttcaccagtccgtaaagccaagttgtatttttttaattgcccttttttccttctgtatttttaaagaaggatgttaatttttgactatatattttaaaaaaatctaagcagggggacatgcaaaaacaatcatcatccacttggatgtcattttatagattaacactgtgtgcttttgtatggaaaaaatatatataatttaatagtataaaaaataaaatatatattcatttgcacttacgtgaaacacaaactttgctctacaaaatttcgtgtttcttagtgattttaaaatgcatgtattgcatgtaaaggaaaaccattacaattaatgtttatcacacctttatcttggtctttgttgatttgggttttgttggggtttttgttactgtttttaaattacagtaggcttctatatatcctggatttctgaactggtcttgttgacaaggattcccaagaaatggatcttttcactggctgactctcccatatctgcaagagattctgcaggaactgggtgtgcacacggtgttgtagccagttcaggtactgaatatttaggatttggtgaagttcactgtattgctatatttttgtagataaataaaactcaataaattgttaatcattctctttttgctgtatagaattgcttatatcactctttctttcatgacattggttaacatttaaatgttcctcctgtacttgtgttgtctgtgaccgcttatagagttttattgttattggtgtttacctgaatacctatgcgtacacacacacatatttccttaatacttctgaactcattatcttttagaataataatactactacactttaccagcaattaacttctccctacccaaaatgtttttcttcctgtctgaaaatggaactaatttgtcttattcgtgcttatatctgtattaaatgcaataaagttagtttttgaaatgtaaaaattcactgtgcaattcatatgtcagcaataaaacatagattatttgtatataagttcatttttatagctattgttacatttaattaaatttattcaatatttgcttaaattaaaaatgaattgcttcttttgagcccaatagttcaaggctgcagtgagctaggatcatgccactatactccagtctgggtgacaaagcatgaccccatctcaaaaacaaaaactgaagagctttagtaaaaatcagtatgccaagtgaattcgttcccatgtacattggaagtatcagaatgataactgctagtcatgacaatgacaagacgtagtaaggtaaagtt

SEQ ID NO: 16395 - DNA, 1205 bp, Homo sapiens
attagttcctgcccaatctcccttggccatagggtcgtgatgagctgggactttctctggggctgggaggtctgcagagctgtgtttatcacatctctgcatgcacagtacccacctaatacaggcaggctattccgtgaatattaattaaatgaactgatggtttttctctgggcattttctctcactcagctgtgggactgactccctgggagggagggagggagggtgggaaaaaacagaaggtaagtctggtgaatgtggctgaaattcctgcagccacgggtgtgtgggtgtgaagggtgggagatgggagatggagagggaaatccagacatgtgcaggtggcaaaacagccccaccctttctggaagtgggcagcttgggaagcaggcaaggcaggcttcttagtctcgggggctgttttgcatgataattagcacttcttcatccggcttctgatgaataatttgatccaataaggtcgggaaaatcacttcctatctatgcaggtgaccatatctataaagtagccattgagatgcttgcctctttctcacgtgtaattagtgaggttggaaggggctatgtgctctgtggtagccccacaagaacctacactttggtcttcactggcctgggctcaaaacccatctcttctgatgcccagctgtgtgccgggtgcagacaagtggtttcacttctgtacccttcaattctcatcagtaaacatgaggcttttagtctcttaagaagttcttgaacaaaaatgaggcaatgggctaatattttctcatacccaggccaatgcttagcacacaataggtattcaataaaagccatttttactgtgtttcttctttcattgaataaagcgtatggttgtatatctatacattgtggtaattactattatcatcacaactaataataataccccaggatttgttggccttcatacaatcataggtaggctaagccaaaaaataaatgtaaaaaaaaaaaaaaaaagatgccaagatttcctcaggagcttctagaaagtaaatcaggggtatatattatagccccagtagtaatagcaactagcaaatacttaatttggtgagatatattccatgtctttgtctcctgaacaattagctagatgaataaatagctgtctgccctgagaaagggaacataatatgcaattaaaattaagg

SEQ ID NO: 16396 - DNA, 2388 bp, Homo sapiens
agaggacgggggcccagcagctggatggctgcagggatcaagtcttctctggggctggcacgtaaaagagcatgtggctggtggacgggcatgcctggctcctcacctggcagtctcctgccctctaaccggctgtctcttgttcccctagtgccctcggctagcatgacccgcctgatgcggtcccgcacagcctctggttccagcgtcacttctctggatggcacccgcagccgctcccacaccagcgagggcacccgaagccgctcccacaccagcgagggcacccgcagccgctcgcacaccagcgagggggcccacctggacatcacccccaactcgggtgctgctgggaacagcgccgggcccaagtccatggaggtctcctgctaggcggcctgcccagctgccgcccccggactctgatctctgtagtggccccctcctccccggccccttttcgccccctgcctgccatactgcgcctaactcggtattaatccaaagcttattttgtaagagtgagctctggtggagacaaatgaggtctattacgtgggtgccctctccaaaggcggggtggcggtggaccaaaggaaggaagcaagcatctccgcatcgcatcctcttccattaaccagtggccggttgccactctcctcccctccctcagagacaccaaactgccaaaaacaagacgcgtagcagcacacacttcacaaagccaagcctaggccgccctgagcatcctggttcaaacgggtgcctggtcagaaggccagccgcccacttcccgtttcctctttaactgaggagaagctgatccagtttccggaaacaaaatccttttctcatttggggaggggggtaatagtgacatgcaggcacctcttttaaacaggcaaaacaggaagggggaaaaggtgggattcatgtcgaggctagaggcatttggaacaacaaatctacgtagttaacttgaagaaaccgatttttaaagttggtgcatctagaaagctttgaatgcagaagcaaacaagcttgatttttctagcatcctcttaatgtgcagcaaaagcaggcgacaaaatctcctggctttacagacaaaaatatttcagcaaacgttgggcatcatggtttttgaaggctttagttctgctttctgcctctcctccacagccccaacctcccacccctgatacatgagccagtgattattcttgttcagggagaagatcatttagatttgttttgcattccttagaatggagggcaacattccacagctgccctggctgtgatgagtgtccttgcaggggccggagtaggagcactggggtgggggtggaattggggttactcgatgtaagggattccttgttgttgtgttgagatccagtgcagttgtgatttctgtggatcccagcttggttccaggaattttgtgtgattggcttaaatccagttttcaatcttcgacagctgggctggaacgtgaactcagtagctgaacctgtctgacccggtcacgttcttggatcctcagaactctttgctcttgtcggggtgggggtgggaactcacgtggggagcggtggctgagaaaatgtaaggattctggaatacatattccatgggactttccttccctctcctgcttcctcttttcctgctccctaacctttcgccgaatggggcagcaccactgacgtttctgggcggccagtgcggctgccaggttcctgtactactgccttgtacttttcattttggctcaccgtggattttctcataggaagtttggtcagagtgaattgaatattgtaagtcagccactgggacccgaggatttctgggaccccgcagttgggaggaggaagtagtccagccttccaggtggcgtgagaggcaatgactcgttacctgccgcccatcaccttggaggccttccctggccttgagtagaaaagtcggggatcggggcaagagaggctgagtacggatgggaaactattgtgcacaagtctttccagaggagtttcttaatgagatatttgtatttatttccagaccaataaatttgtaactttgcagcggcttgtgtcttttttctgtccctgagagattgtgtgtgtgaaacattgcagtgcagggatggctgtttcactggggggttgcccgtccttgacacctaggggaccccagcccctcatctctggaattctttcctcggagcatcacgtccagcagaaatttaagtcagctcatatgttaattctaatttcccagtggccacattttcaaaagtggaaagaaacagatgaaattaattttaataatacatttcatttatctcaagacgtctaaaatattaccacttctata

SEQ ID NO: 16397 - DNA, 1217 bp, Homo sapiens
gattaactagtgttaaacaaaaaataggtttactaaatatgttaatctattcttttaacataagcctcacctttcattttaaaggtttccatagaatttagttattttatctttcagccatatgctagtttttttttctcttgccaacatgcgtaaaaagggaagccaattacaagtgcaaataatgtggtattcttttgtaactcaagtcttgaaatgttctgtagtgttaagcaaagtctcctcttgcttgatactaaataaacttttgaaagaaattttgtgtgtgtgagctaacaatttcatgggtttttttttatttaaaaaggccttcataaatagttgtaaacagggaaagaattcatttaacaatgcttgtcataaaagggtcacactaaacattgtacaacttattttaaaaatggtataaaattaaatgtaccattatatactcaccatagatttaaatgctgtttaaagagtccaaatggtatcgagctgcttgagtggcacgttaaactacgcaaaaccaaatcttgtttaaaaactggttttaaaataactactggattttctgaaaaagatgtgatcagttttcatcttgttgagcgttttttcactagtgcaactttggattttttatgagaattttggtaccttaatgaacacctcgctccatgctggaagcactaagcacaaagcttttaaagactttctggcttgactaattgaggtcgcactcgccaaggctgaggatgtgtaacccttaaacggtcttcattttcaaaggtaaataaatcaaataagattttaatctcacttaatttatcttaatataactaataaaaccaggaagattacaacttagcaagtttcattatccattttagaaaagttttaagatcacctaaattctcattttaaaaagtttaatttgttttagtaatctaaaaagccttagtttagtcagtttaattggggccaattactccctattaaacaactgtaaaacctcataactagttatttgtaatacattatttggttagtaattgagggcacttcttaaaactgacaaatatttaataaagtttattctttaatcattaagcttttttaattgtagattgtgtaaaatgtttaatttttatttcttgggggatttttttctgtttatgttgagtaaaaaggtcttttcttttgttaggaaatgtcag

SEQ ID NO: 16398 - DNA, 1524 bp, Homo sapiens
gtgtgttttgagcccaagtgtatcagtgacttgcctccctagagcctctcagttctgaccggggtgaggcccacactcaagtgcagctgtgtcccagcgtcccaggcccatagtgaactctcaacatttaattttgttcatgatgttaccaagggcacattattgtttacttttgttatgctaatttttgtattactttaagtaggtgcacatggttcaaaatcgttttaaaaaatagacattcccatcttcccttttccttctccacctcccagagcacccacttttatttgtttcttatagaaacttacaaaatttatttctgaaataataagtacatgcaaacaccctttttaccgtaatttttttttacacaaaaggtatgtatacattttgcatcttgcttttttcacttactgcatatcttgggaaacttctcatattatttcataggcaatgttctctctcctctttcctgctgcagaatattaccgcaaagcgggagcatgcctgtgtgccccccgcctcgtcaacagggatgcttttccacttccatattgttaccagtctggcagacgggctcttgagcaggtccttttcctctggagatgtcgttttgcaggaaagagcctggcctctggagttaaagtggctccgggggtggccgttctgtccccgagtagcccgggacgtgtggttgagccctccggtttctggttctttccctgagtaagagtggcaactgtcctggccccacctagttgaagggaacaggcacagcccttgtcgtagtgcccaacatggctcaggcatgtcccaacgtgtcttcccttcccccttccactctgggacccagttggacgactctgagatttagaattggccagtgggagcgttttcttcagtgaggattggtcactgctctgagcgtgacttcgtgtgcccatgagccatgagggccgtgagatgacagctgaacgccgaaaccagaaacagtgaaactgagctcatcttgccagcacggcacacacgtttccactctcctctgcctttgattagagtgagtcacagcatggctcacaggggtctggtcaggagtggaggaagtgagatctgatgtcttttttactgaagaggaagttgctctgttctgtgggggctgcaagggaaagagaagcagcagcccccccctccctccgctgcaggcactccagttcccggggtccagtcccctcacactccgcaggggatggcgtttcctaggaggagtggcgcactcagggcaccgcagcagtggggctgagcccaggccactggtgaggtgggggcttggggcaaactgactcagcagagctgacccctcctggaaaggacagcacccccccaggatcacccagtcgtgcgcggtgaccagtggtctcgttgggggttggcattggctctctcctgggcctccccgcaaggagggaaacagctttgcacactgctcggtgagggtcttgttggtgccgggactcgacaggt

SEQ ID NO: 16399 - DNA, 1058 bp, Homo sapiens
cctgaatatgctgcattttctttctttagcttttacatgtagcattttgttttgcttttgttatttttgttttgatatatgctttttggaccccaatagactgttgaaagaaatttaaaaattactcttgtagggatatagtatccttaaaaaataaaaatttaaaaaaatttaaaaaaattgctgcaatatctggctcgaaggttgccctatattagaataatactttagccaaatacacctgaggaggcagacactgtgtttataagcagacaataatgttctgaatccttcctgttcatgctgctttcttaattcatttctccatgtcatcaagaggttggataacttatttctaagctcaaggttaaaaatcatgtcacctttttttttttcccccaacacagacctcagaaaaattgcgattgaggaagtagcatgatcctaaatgtgttgctgaaatcaggcagcccgagcctctggtctctccagagagcccgtcttcacatttctctattcctcagcactcacccgaaactgaacagatggggagtggtcttgattgtcaagataaaactggtgaagaaagctaaatgctgagaaactgagcatctattgtcgtgtttaagcttagctgggtcctttctagtttgtttttacagcttactaggtgaagtagtttgcactatttttgcaataaattcatggaaaacctaacagttacttgttttgtttcttactgtgtgtatataaactaatactaaaagtttggcatagtgttttttcacctccttacataacccctaacatgcacagaatgctgtaaatctgataaaatatgatgtgaatgatattttataaagttattttgtatggtgtcaattttgttttgcctcatagtatgtcagcaaaaaattaaataaaagtcctcctatttacagctgcctcttccaaaaatcttcaattcctcacctacttctttaggcacttccttctgcacaggttatgattccagctcccgaggcagaagcgtgccttcagggatggaagtccagagc

SEQ ID NO: 16400 - DNA, 2473 bp, Homo sapiens
gactcaaatcctacagtatggagggtggcgttgcattgaaattccaggcctgagtttgatagtggattttaatgtagttgttaaaggtatgaattcatgttttataactgtagaggcaagcaagtttttattttttaaaaagttttgagagaataatttataagtttctgtgcagcaaagtggctaattactcattaaatacaggaaaagaatgtagtatctaaatccagctttttcttacctctggtacacttcagattacttacctaatacatattgagggcttttaacccttagttttatcaatttttctagttttattttatttttataaaataattgaaaaagaaccaaaaatgaattcagaagttccatagatggatttttgccccttcttaattttctcccacaatgaaaacattttagaagacattttgaatcaaaatgtattatgaccattgaaagttctctattttctaagaagctgagcagctccaagggcctcgtttcaggtggtactctatgtattgtctgtgggcttgtttctacctgtacagtggaaccatgtgaccatgtcttgtgcttgcaatatagaaaccatgcagtgctgttttgtgaattggcagtttctgtataaactcttatttatatacattggcctctctgtatgattttccatttgctacatgaattgtaaaattaattataaaattatagtacctgctaaatacaattctgaggcttcatgtcattgtctttagttgaataccatgctgtgtgtcttgaagatgtccacgcttgcatgatgctaggtggcaatgccactttaaattaagccttaatcagatgttaaatttgtgagtttcagagtatgcaaaaatattaggcagagtgagtgtaaactgttcagatcaagatgctgtatcataattcaagttatttttttctggagttaaagggaagcattcagtgatacacctctctctctctctctctctctccccctctcccccctccccctccctctctctgtctctgtctctgtctctctctctctctcttgtctagcttggctatggccatagcttgatgaaaatggaccattgtgcatttctgtgacagtcaaaaagacctgttctaaaagtcttgcgactttttcagggttttttttttttttcatgtttctttttttttttcccctccagtctgagatttctgtgtggctgatggagagtgtgatttgggcgtaggtcttatttgcaaacctgctcatgttctaagctttcttcaggtagtaccacctgtcatcgcttctgcatatgatttaaatggatttttgtttttataaaagtatcataaatttagagataaaatggaggggacccagctttctttacaatgtggatctacctcagttaaacagttgggtgctattactaagtctgtcaaattaaattggaaaaagtaaccaaacagtgagatacaactccacatgaaacttgaaattgtaatttccgtttatttaatgatatttttatttatttgtgccttttatgttgaaccccaatgcattgaaaaaattcagtatgaaacagtacatattttatttatattacaggtgggagaaaagtccaattggtcatggaatttgatagacttttccccagccaactgctacagtgtattataatcccgactgcccccctgtgaaaagaaaaaaaaaaatgtccaagagcaaatttaacattttacaaacaataaagtccaaactcctctatgcacatatttatagcttatcacttcattttctgtgccagtgaaggggtggccagaaaaaaaatcccaagtaccctcatcattgcttttctagccattcatgccccctcttcctctggcacattttctaagagtttatttcataagcagcaaacggactgttgtcgatttcatctctcctgacctacctggtggaggtgctaatggccatggacagaaaggggcgagccagagctcgtggctttgtggaggcagaggcctgcattcagcagcggccctgtgtgcctgtaagttaggaaggctttctgacaggtaagaaaatgagataggttgatgacttaccatgcttttatatttggcagtttacaattctagacttttcctactatggcgatctttttttacttaattctttggaggtaacaatattttggagtcttaagaatttgattttataccaataagaaataaaaattagggatctttcctgtagtatatagttttactattttaaagagatctctgaattttacaagagaaccaacattccttaatggcagaactttgaaagttgatttgggaggctttttgctgcaggatctcaaaaatagagagagagatgattctacttaaatgtttttaattttctaacttccatcaggttgatacttaagctctattttgtaaagagtaaatc

SEQ ID NO: 16401 - DNA, 1098 bp, Homo sapiens
gaaacttcctcagtgctcatgcgcctcacttgcagaacgtgagtatttcatttatgtttgaagcccttccccaaagtgaccgaggagttgcactctagctgccgtgccagcagtctcgtctgctgtgacgcttctcggtgcggatgcagtgcacctgtgactttgtcatgggggtgcccctgttacacacacacacgctgactcttttttatgaggaaaatcttcgactcaaaataattgcactgattttttgacaacttctttttacgatgtcccacttcgcatctgctgtacttgtttgagatgattgtaaatagatttgtggtaggagaagtgacatgaatgcaacacgtggctctgttgtggagacactgcctcgtattcagtattatgtgttaaagttgtgtggacttaactctgttccgccctttagcttcgtgtctgttgaccatttatgaaggacaagttcgcctcattttctttttcttctgaagggaagttctagatcggttactaggagaacatggtctcttggtgcctgatgatttagtcctaagcagactcgttgcagtcttgtgaacactgttgtggtctgtttgattcctcgtcgcttaccgtggctctccaaagcatggtctttgagttccacccagcctgggacagtccagacgggaggcatctgctccgcctgctactaggacgcaagggcctccttgcatctctgtggtcagagtcatcttaaagccatgaggttactgtcgtgtcaaagctgtcatttgtgcccgttattttgctggagtagcagcgtgtgctgtagcccccgtgtgtcactctgtggtcaggctaccctgtgtcacacccagcaagaagtttttcagccccagaccagtctgtgtgtgtgtccgagtcacaccagtgccattacggtgccctcgcttatgcttctttcagtatgttttgccatgttattgtctaaagtgaatgtattggcttagccaaatcactacagaaggtggttcctaaataccttttagtttaaaaaaaaatgcagataaaggctacctctgaattctcaatagattcatcatgtttgctctt

SEQ ID NO: 16402 - DNA, 1146 bp, Homo sapiens
tggccgcgtcctggcgaccctaccttcaacagagctgccacctatccatccttctggccctgcctccacacctctcacactgcagacaggcgtccccagacgcaatgagctccccgcctcgcagggacacccgacagctctccacagcctgcaaggcaaagccaggccctcgggaagcccccagatggagctctgctctgcaagtcagcggaactcaagcgtctctcccccatctcttggtccccaggcccatacccgcccctcctcccctccctctgtcctgcctcagtgtcatgtgttagggtctcgacagccccgtgtcccatctcctcccctggacccccttccatggtgtgaccagatcagccttggggccgaatgagagccacatcattcttgccattcatcgagcgtggttctgctgcacaaacaggtgaattacagaccccagagaaggggagggaaggttccaagaggcgcccacctgctggaactggccttcagagacaccgtcgcggtagaagatgatgcgggtgggcttgaagcgcgtggacttgtagaactggatgaggagctcgcggaccatggcggccaggtcttgtatgatctcctgccggtgctgctgcacgcgcacggtggcgcagtagcgattggggtgggcgtccatgctgcccaccacctgcaggaacaggcagtgagtgtggtcaggggttcccaaaactttcctttcctgggcatgtgcctggactctcgggaagatggggacgagaagtgtccccaccctggaactcatgtcactgtcaagtgacaatggctggctgggtgtgaactcagcctttaggcttttggtgtctggcaatagtgttcgtaaatacgtactgaagtacaaaagtttgccaagttacatagtttaaacaaaacaaaacaaaacaaaacaaaacaggccgggtgcagtggctcacacctgtaatcccagcactttggaggccgagatgggcggatcacctgaggtcaggagtttgagaccagcctggccaacatggtaaaaccctgtctctactaaaaatataaaaatgagctgggcatggtggtgcgtgcctgtaatcctagctactcgggaggctgaggcaggaaaactgcttgaac

SEQ ID NO: 16403 - DNA, 1265 bp, Homo sapiens
gctaatttttatattattagtagagacagggttttgccatgttggccaggctggtcttgaactcctgacctcagctgatccgcccgccatggcctcccagagtcctgggattacaggtgtgagccaccgcgcccggccagtgtaagtggccttcctaagcagggagccaagtcctttcttttagttgggctctttctctcctgccctggggccctaggtgaggcatttaaatcgttttgttgataaattggagggatgagatagactcactcaacttcccttcctgagggagggaaagcctggcctgggcgaggcgggcacagccgtgctggagtctggactccaaggagcttggcgtccccctcgggaccagggaccctcttctatcaccgacctcggacagagggggacacgcaaagctcagcacagctgccatggctgcacttgccagatgggggcaagagggctggtggcagctgctgctctcggggccagctgaggaaggggcgccggcagagctgtgtgtgcctctcatgtcccttagccgaggtcaagcgcgtgggagacacggtgctggggatggccacgcagtgcgtgcagatgaagaacgtgcagaggaccacgccacagaccctgtccaacctctgcctgaagatcaacgtcaagctgggaggcgtgaacaacatcctgctgccccagggcaggtgaggcccggcccctttacctccgcctgcggaccagggcacagtgggacgcttggcagggtggggtgcagtatgcagggggcaggggggcagggtcccttcacctgggcccagcaccgtcctggccacagcagagcaaagatgtcagacatagatctggctgctcacgctctgctggggaccaggggcgtctgcaggagtttgagcactgtggccgggtttccagacagagaaatttgtgcctcgaatcccagtgggcaaggcagagcagggcatgccttggatggccaggagatggagatgggcttccctggctcagcagcagcagcagctaccgtgtggaccagggccctctaccatgcttcccacaccaggctagtcatggatgctgcgtcgtgctgggactttagactgaaaagctcctcatgggagcacactgttggcagctcccaggccaggacaggatatgtggccaagcgctggccacctgccggtctcagaggcccagggctgaccgccggggacgggggttgggggtgatggagctgcaccctcctctgg

SEQ ID NO: 16404 - DNA, 1101 bp, Homo sapiens
aactactgggggaaaagatccaaaaggacagtgagctgaaaacctccctcactctgacagtgcctggcctgcacgtggggagagcttcacaagagctccaggcgctgctcagcagctttacggggacagcatcgcatcactgccctggggccgccacagccgcgaggcagcgtgagcgcggtttaaaggctgctgtgttacggtggcaagttagccgcatgtgacttttgagtgcacttacatgttacatgtatgtttagcacacttaacctttctcatgagttagtatgtgttaggagatgtagctctgaattctggcctcattcaggactttaagaacaattttgacctcaatgaaagtgctttgggctttgtaaaaatgacgcccttgtgttagagcctctggtcggcctgagttctctgccattcccagtgcccggtagtgaacggagccttctcctgcaggtccttcacagagcagctcagaaagatctcgagagacgccggcatgcccatccagggccagccgtgcttctgcaaatacgcgcagggggcggacagcgtggagcccatgttccggcacctgaagaacacgtatgcgggcctgcagctggtggtggtcatcctgcccggcaagacgcccgtgtacggtaggtgtgggcgctcccgctggctgtggggagccgtcgtggtctccgtgggtgtttgttcctgcctaagcccctctgtgtttctgctgcactgagaaaggtgctccttttgggcctttcaggaggctgaggaagaagaggtggcttgtcatcactgccacttctgatcactgtgttcagggcctccccgtcgtcctgtatgatgccatggtcctgggcagtcagcaccctcgggtggcacaggccttggcacatgggtgggcaccccgcccatcatacagcatgcgtgttggctggatgggggaacgtttgtttaacgcacagagcgttgcaccagggtcacctcctgcccgggactcagcctatgtgtaaccactctgtgcccacctcagaattttgtggagtttcgccaaagtccatgccagggggtcacccacagggccccacgctg

SEQ ID NO: 16405 - DNA, 1093 bp, Homo sapiens
gacctcaagtgatccttctgcctcagcctcccaaagtgctggggattacaggcatgagccactgtgcccgacccatctcttcctgattctgtcttcattttctccttctaatttacacaaatatggagccaaattattattttttaaaataactgtagttcattgaatccaattctctcttttgcccctacttataaatttccttcagatcctgtttggttttgtctacggtctgcgttacttctccatgctcactgcgagggtgggtcccaggagtgagaggggcaccaatggggccagcatgtcttgccctggcccggccaatggtacgtgacagggaaaggctgatgaaccctgacatcaaaacccataccagcaccctcacccccaccccaaccagagtcagccctgcaagtggtcacttgagctgcccatcgggcagcacccccaggccggagcctctgcctgtggggggcttacttcagatggacttccgtgcactggcgctggggggcgaagcacgcaatggcccacaccttgatctcgatgcccgtgtggaactgcttgttccgcatgtcccagacgccctggacaggggtcgcaatagctttattctgcaaatggcaaaaggttcagggtgagaaaaaaatggaaaacatattccttcaaccttagactttgtcactctcactgttggtccccctgaccaacaactgcttctcagggaaagaacttttgtgttgtctcctgtctctgacctgcctagtgatgcagacaactgacaggatcggtagatggatgggctggtggaagatgggtgggtggatggttgatgggtgggtggatggttgatgggtgggtggatggttgatgggtcggtggatagttgatgggtgggtggatggttgatcggtggataaggtaggtgggtggtccgttgatgatcggtggataagatgggtgggtggatggttgatgggtggataaagtgggtgggtggatggctgatgggtgcataaggtgaatgggtaaatggttgatgggtggataaggtgggtgggtggatggctgatgagtggataaggtaggtagg

SEQ ID NO: 16406 - DNA, 5847 bp, Homo sapiens
caggtagggctgggcagctccagcacctcgtcccacaggtagacgtctttcgcacctgcagctgctttcacgcccgcagccaccgaagactggagagagcccagaagtgccggtgtcaggacacagccccgctcacctggtgggctgggcacagaggccgtggggtctctgtgttcgcgtgacgtggggtttacttaacaggcatttctgttgtgaagcggaaggccgtggagcagcccccacagcagacacctgcacagcacttcatagcccagggatgaggcagagacggtcccaagcagagccaggccaccagcccctgagccccctgcctgctcccctggtcactccagtgcggcactgacggcctgtctctacgtcctcttcacaggtctgtaacattgtggcaggacaaagatgtattaaaaaattaacggacaatcagacctcaaccatgatcagagcgactgctaggtcggcgcccgatcggcaagaagagattagcaaattggtgagtgtcagtcccgggcagggctgccctgtggaatccagtccggttgccctggcacagaaacctctgatgcttggaacggacgcagctgctagagagatgggaggcctccacccactccgtgcgttttcttgtttccctttgccagatgcgaagtgcaagtttcaacacagatccatacgtccgtgaatttggaatcatggtcaaagatgagatgacagacgtgactgggcgggtgctgcagccgccctccatcctctacgggggcagggtacgtgtggggcggcggggaacgtgtggctgcggggcatgtctctgccctgcgacccctctcaggttctgagctatcgcccgcggtgtagactgtgttccatgcaggagaatcctttctactcccggctgagcctgtaaaagacgtgagatttcataaaggaatggctttccttggtcctttttaaagtttttcagaattatccttaatgttttcagaagataatttttattatcccatgaaagtttagagagcaccattctgtgtgtgacagacactcaccgagggtcgaattatttcccagaaggctgtactgcttttctattctttaacttttgctttggggatgtttggtaacagttttttgtccttgctaatttaacttctggttttgtttgttttgaggcagggtcttgctctgtcacccgagctagaaggcagtggcatgacctgactataggtcactgcagcctctaactcccgggctcaaacaaatctctcgcctcagcctcccaagtagctgggaatacaggtgtgagccactgtgtccagcccttaacttctcctttttatcagtgtgtaaccaaaggtgtcctgaacactgagccctccagggtctcctctcatttcctcctgggctcgcttgcataccacggttgcaagcataccatgtctgatgggagggcccagaggtgaccatgctggaagggacaccagggctctgcagggtcttagtgtcagaggtcactgactttcttaagcacctggcatctgtgtaagagtctgcctaaccttttacaccctagtttctacctaatggaattttattctcatcctcaagacctgtagcgaggttttggtttgttttttgtttgtttgtttgtttttcttgtcttattttaaaatatgggttctgagctgggcgcagtgagtggttcacatctgtaatcccagcacttcgggaggctgagacgggtggatcgcttgaggtcaggagtttgagaccagaaaccctgtctctactaaaaatacaaaaattagcctggagtggtggtgcgcacctgtagtcccggcttctcaggaggatgaggcaggagaatcccttgaacccgggaggtggaggttgcagtgagctgagatcacaccactgcactcaagcctgggcgaaagagcaagacttgtctcaaaaaataaaaaatacttaaaaaaaacagttctgttttttaaatgtttcagaattcagaagatacaaaagaattaaaggaaaaagtatcttttttcccagttctcagttgccctctcaagaagcagttggtgttccttctcctttgtaaaatcacccagggatgattcacccctttttgtgaaaataatagcattacctatatttctgtgcctcgctgttttctagctaacatttccttagagctcactgagaggctgctggccgttctgtgttgctgttcgtgtgtgtcttgtcctctagcactgctgcgtggcaccccatcacgtgggggggtctgtgtccctggtggtgggcatggccactgcttgtctctctgaagggagtctgagcagggcccttcagcccctccttggctcgcttgtcccccgaggccccagatgctgtataaacacagcccaagcccaggaggaagagcccgtgatcccccttcatgagttggggaggagacgccccgggagggcaagaggagtgcctggcccctgtgcggggatggggcttttgaacccagcaccgcttcacagccctgctggcttctgttccctcgggcttcagctgttagcaagggcagtggttgtctgaaaaacagaagagcttgtgtaagccaacgttgcaaaaatctcaagagtgtagggattaagagagcttgtaggctgggtgctgcggctcatgcctgtaatcccagcactttgggaggccaaggcaggaggatcacctgaggtcaggagttcgagaccagcctccggtcaacatggcgaaaccctatctctactaaaaaatacaaaaattagctgggcatggtggcatgcgcctgtaatcccagctactcgggagactgaggcaggagaaccacttgaacctgggaggcagaggttgcagtgagccgagattgtgccactttactccagcctgggcaacagagtgagacactgtctcaaaaaaaaggccaggcatggtggctcacacttgtaatcccagcactttgggaggctgaggcaggcagatcacctgaggtcaggaattcgagaccagcctgaccaacatggagaaatcccgtctctactaaaaatacaaaattagctgggtgtggtggcctatgcctgtaatcccagctactcgggaggctgagtcaggagaatcgcttgaacccaggaggcagaggttgcggtgagccaagatcgtgccattgcactccagcctgggcaacaagagcgaaactccgtctcaaaaaaaaaaaaaaacaaaaaacaaaaaacttgtaacttgtttgaggcagagtgtttctctgttgccctggctccagtgcagtgacgcggtcatagctcactacagccctgaccttccgggctcaagcgttcctcccacctcagcctctcgaattgctgggaccacagccacaccaccacacccagctaggtttttaatgttttgtagagacgaggtctcactatgttacccaggctcatcttgaactcctgggctcaagcagtcctcccacctcagctgggattacaggtgtaagccactgcacctgactgagcgtgtaatgcttctgttaatacatgaatacatttttccagatctctaaaacattataatgtgaggaaacattcctgtcccctactctacctacccctggtccattgttagtgcaaaaaaacaaaatatccctcagaaagcaatgtgtacagcaggagttctcgaccagggatgattttgccccccaggggacatctggcagtgtctggagacattttttattgtcacaacttgggggtgagtgggatcgcctacagggcacaggacagccccgtaacaaagaatcattgagcttcggatgtcagttgtgccgaggttgagaagcacctgtatagtaagagtgtgtgtgtgtgtgtgtgtgtgtgtgtgtgtgcgcgcgcgcgcgtgcatgtgcgtgtgttcatgtgcatgtgagtgcatgcgtgtgtgtgtgtgtgtgcactccctgtctggagccccaggctgtctgtgagactcttgcacacagggaggctggtgggaacaggcagtagttataaaaatataggaaacaaagcatttgtttctatcacgtgtctgatttctacagcaggcttgtattttgtacgaaagatgcttcctgctaaaaaaaacaaaaacctctccagagtaaatgacggcagcccaggcacagccgcatcctttagcaatgcccccaggcctaggagtgcctgtccctcccacacgggacccttcctggcccacccttcccttgagaatcacttgaagccagttcagagattccttaggtgacagtgctcagggctggctgagagctggctgagagctgacagcgcatttgcacagcccgcctttctcttctcaagtggaagtagctcccgtttccgacacagctgcaggcagtggcatgctgagtggaaaaagctatgggctcagtcccagctctgatctccccttcccacatcattggtgatagaggaggggaaatgagggaaagctctgtatagaacaggaggccttcctgtagcatggcaaggcctgtagcatggcaaggcacttctcttcctccaggctgctcatgaggttggatggagctttgggcctccctcctcctggcttagctcccatctgtctgttcattacttacccatccatcctccatctaactccatccatccatccattcatccattcatccatctctccatctctccatccacctacctaccttatccactcatcagccatccacccacccaccttatccacccatcaaccatttacccattcaccttatgcacccatcagccatccacccacccactttatccacccatcaaccatccacccacccatcttatccaccgatcatcaacggaccacccacctaccttatccaccgatcaaccatccacccacccatcaactatccaccgacccatcaaccatccacccacccatcaaccatccacccacccatcaaccatccacccacccatcttccaccagcccatccatctaccgatcctgtcagttgtctgcatcactaggcaggtcagagacaggagacaacacaaaagttctttccctgagaagcagttgttggtcagggggaccaacagtgagagtgacaaagtctaaggttgaaggaatatgttttccatttttttctcaccctgaaccttttgccatttgcagaataaagctattgcgacccctgtccagggcgtctgggacatgcggaacaagcagttccacacgggcatcgagatcaaggtgtgggccattgcgtgcttcgccccccagcgccagtgcacggaagtccatctgaagtaagccccccacaggcagaggctccggcctgggggtgctgcccgatgggcagctcaagtgaccacttgcagggctgactctggttggggtgggggtgagggtgctggtatgggttttgatgtcagggttcatcagcctttccctgtcacgtaccattggccgggccagggcaagacatgctggccccattggtgcccctctcactcctgggacccaccctcgcagtgagcatggagaagtaacgcagaccgtagacaaaaccaaacaggatctgaaggaaatttataagtaggggcaaaagagagaattggattcaatgaactacagttattttaaaaaataataatttggctccatatttgtgtaaattagaaggagaaaatgaagacagaatcaggaagagatgggtcgggcacagtggctcatgcctgtaatccccagcactttgggaggctgaggcagaaggatcac

SEQ ID NO: 16407 - DNA, 4564 bp, Homo sapiens
tagtcaggtcatgccactgccttctagctcgggtgacagagcaagaccctgcctcaaaacaaacaaaaccagaagttaaattagcaaggacaaaaaactgttaccaaacatccccaaagcaaaagttaaagaatagaaaagcagtacagccttctgggaaataattcgaccctcggtgagtgtctgtcacacacagaatggtgctctctaaactttcatgggataataaaaattatcttctgaaaacattaaggataattctgaaaaactttaaaaaggaccaaggaaagccattcctttatgaaatctcacgtcttttacaggctcagccgggagtagaaaggattctcctgcatggaacacagtctacaccgcgggcgatagctcagaacctgagaggggtcgcagggcagagacatgccccgcagccacacgttccccgccgccccacacgtaccctgcccccgtagaggatggagggcggctgcagcacccgcccagtcacgtctgtcatctcatctttgaccatgattccaaattcacggacgtatggatctgtgttgaaacttgcacttcgcatctggcaaagggaaacaagaaaacgcacggagtgggtggaggcctcccatctctctagcagctgcgtccgttccaagcatcagaggtttctgtgccagggcaaccggactggattccacagggcagccctgcccgggactgacactcaccaatttgctaatctcttcttgccgatcgggcgccgacctagcagtcgctctgatcatggttgaggtctgattgtccgttaattttttaatacatctttgtcctgccacaatgttacagacctgtgaagaggacgtagagacaggccgtcagtgccgcactggagtgaccaggggagcaggcagggggctcaggggctggtggcctggctctgcttgggaccgtctctgcctcatccctgggctatgaagtgctgtgcaggtgtctgctgtgggggctgctccacggccttccgcttcacaacagaaatgcctgttaagtaaaccccacgtcacgcgaacacagagaccccacggcctctgtgcccagcccaccaggtgagcggggctgtgtcctgacaccggcacttctgggctctctccagtcttcggtggctgcgggcgtgaaagcagctgcaggtgcgaaagacgtctacctgtgggacgaggtgctggagctgcccagccctacctgaatgacaggatctaaacaccaagggaagagttacagcacatggctcagggtcggaatttgatcctttcccaaggcaaggatttttcaaagagtcgtgatgttagaggagagtgaatgacgcaacggtgcagtgacggagcacctgcctcgcgctgcggggcctgctggacacgttacacacaacctcaggcaaggttcacaccaatcccacaagagagctgcagaccccattctactgaaggcaaaaccgaggtgtaacaaagcccattaacccacccgcattcctgcagcagcagaggcagtgccatttgtatctgactggggcctcggcggtttctcgaagctgcatgccccagcctgggacgccgccctcccaagcccccagagacacacaggaagagggtgacttgcctccaggggaaggtaggtgtgtttctgctcctgtccgacttgtaaacatgggaggtgggggtagcgcagaaccaacttgtgcctgtccttgaaatactgggccaccgtgcactccaccgtctgcccgctctcctgctgcagcgggaatctgaggagcaaaggggctgttcaggccgagggcatcccggagccccttcccctgcgctgcttttcatttgcgtttgctttttagggtgacgtgtgaggagcaaacattcagagcacttccgggagtgaaaaccatgtcatgtgctttgggttatctggaatgtttctgagcccctaaattctcattttgtttctggagttgggaaacaaaaaatacctacatgcatcattactcataaattatccacaacgtcacagtgtgtgtaaaggagtcaggacgaatgggcacgaccagaaaggcctgcgcgtcttccagcagaccgtggtgaccctggaagccttttacgtgccgcgcgctcccggtgcccagaaggcctgaagcccccaggacaggacgaggaaagcaggccaggccggttccggccgcacggtgacggcaggagacgcctgggtgcagtatgggtgagtgagggggaggcccacaggcacaggaagggttggcctctgtgtggggatgagggcacgggggctgctagtgcagggcaaagggccacgtggctcagtttctactgcacagaccccttcccccaatccagactgccgggccatctgcagcctctgccaggccacaggccctctcgtccttctgctccctcagccacgggcatcttggtacctccagtgcctggcaacaggcctggcactttccatggaatgatccatgaaataaacgaaccctaccggcctgggagacattaactggggcacaggggccaaatctatcacctcctcccgcaaagaaacaccagtacaacccaggacagcggtgcactctcaccccccactccggcctgcgtaccaaaccgtgctcttgccgtaatgatgggacacgcggactggcccagggaagggggcgtgggtcagggccacagacccgccacctccagcactaaggatgggacaatgaacacaaaagacccttctctcctctgtgaggctcaggaaggaagagggagagagagcctgggccggcccttctagcacccagggggaatttcatgatctgagtttattttcttaggtgaagtctggaatctactgagccatgtaagggacaattttgggattgaaaaacagcatgaaatggtcctttctggagaatgggcacagaatcatggctccagagtgtgcccgtcggagtgacagtgggggccccagccaagagagtctgaaaggaagggcgtgttacgtttggtgactggcgggccgccgggtcacattgcagacgcggtacttcctcttcatctgcccacagtgcgttatctccacctttagacctggggacacagaacacaggcatcggcatcggggctgtcccgacctgagtgcaggcgccacttgcgagaatcagttttcataggaatgtggctggggacccaagttatggggggctgcagggctcccctagggagggtgacccacaggtcacccccaggccaccccagccgggtccgtctcacctacaagagtaccacgtggtggaggggaggctcagcttagagcatggggtgtccaccctcgtgctgttctgcgccccccatgggtcatcgtgataacacggggtacggtggatggccctgcaaatggccttccaaaaggacgggttcagcgggcagggcttgtggagccaggggtgggccccccattctgttgctgatgggcagaaggaccccgggtaagtcctagaccccccccaatctgagtttcttggagtagaaagcaggctgactgggtacagacacctgccgggctgtgtaaggattaaatgaagacaaaagaaaacgcatcctaggttccagcgttaggaaatgctgatcacagccacgctgctgcttctagtcctgagatcatgactcagacgtgactgactccccaacctcatcctcaccccatggggttgtatttatttaggaaacccccactcccgctctgggaaatggatctaactcatctccatgctacctcatctgatggctacattctgccacccccacctccccaaatgcgcacaagaaccagaactgcaaaatgcggtcccggaggcggaccgggaaggggcctcccagccctcagccaggtgtgctgggacagttcattacctttaatttctttggtaaactttaccctttgggaatctgtcagaggtttttgttgttcttcaatacttttaaaatccaaaacttcacaaacaaactcgattactggctgtgccttgtaaaacgctgttgctgacactgtaggcgagaaaagaggcaaaggcctaagcatgactgtggggctgctggacgggcccatagtcctggaggggcctcataggccaggccagccatggtggggacacccggccggggttctcactccctactgaggctagcctcaggcccagacacgggcaggccagcagtgacaagcccaggccctagctgctggcctccctctggtcagggtgacagaaaggagctggctgattagttaaagactaaagtcaccctccgagaatgaagccagtgttgtaggattttctggttaccgtctggtgtagatatttctgaaattcaccatttccttttatgtagttctttttcaataaatgtataactgagcaagatcaaattctcattgctttctagagcttttcataataatcagctcccaaatgagaagacagatccttttcgctggccttcactctcgtctttttcacaga

SEQ ID NO: 16408 - DNA, 1100 bp, Homo sapiens
ctccccacggctggggctgggcctggctggggctggcacttggcaggtgcccaattctatctgcgcttggggacacaggccccaagaggtgaagagtagacagtgaggacagtaaggcgaggcaaagccaggacagggagtctggaccagaaacacgccaggtcctgggggcttgtgatccacctgtgcggtgtctttaaacgtctttcaccatcccccagtgaggccacgggtcccccagcctgctgctgtcacagtgtcccacacagcaggccatgcacacaggctggagtgccgtgtggtaaacgtggatttaaaaggaggggaaacggaactctgatgagggtgtggtgggcgcaggcgaagcccacccagaggcagctgttccttccggaagacacatctgacgggaggcggggtggggtctcttggttccaggtacacccccgtgggccgctccttcttcaccgcgtccgaaggctgctctaaccctcttggcgggggccgagaagtgtggtttggcttccatcagtccgtccggccttctctctggaaaatgatgctgaatattgatggtaagcagcgccctggggtcttcactgcagggcagggttgggcatgggctggggggtcaggaccccggtcggggggtggcatgtggccagctccacgcatggcctctgtcagagccagcgccgctgcgtgacacctggctggtctcacctgcagtgttgggtgggttacggcagtggctctcaggccagcgtgaagccacgagatggtcgcaccctcagaggctgtggtcaggggctgaggcgggcctgaggatccggggcttccttgctgctggcctcctgtaggcctgggtttgactgtagcctgggtgtggcctgtccctctcttgggaggcttagtcgctgctctgtgcaggacatccgctgccctctctgtgaaaaagacgagagtgaaggccagcgaaaaggatctgtcttctcatttgggagctgattattatgaaaagctctagaaagcaatgagaatttgatcttgctcagttatacatttattgaaaaagaactacataaaaggaaatggtgaat

SEQ ID NO: 16409 - DNA, 1189 bp, Homo sapiens
aaatggagaagggttgtcttttttttaaacagacatttgagtgaaaattgaaagcgttctattattgaaaaatgtttatttttctaaatctacattttgaactttactaatatggagccactgaaaacttgagttgggatgaagtttctgccgcttatgcatagtaaaaagcgcttcctgagtaaacgagcggtttaagcagcagcaagggaggggcaccgccttgacacttttgggctctttgccttgtctcccgtgctagtaattcatgctgcctcatctctccagtgtctgagacaggaagaaagaacaggaatggacatagcaagtttgatcaccaatgagttgttatgatacattttaagtacattattggcttgacgttgagacgcctcctctgtggaatgcaatattggcctggacgtgaatggaaacagcagaggggggcatatagtggcttggggccgcgggatgggaagggccgcagagcaagcctgctcccccgttaatgggtgttctctctgccattccagcacttgcacctcctgcgccgccgccccccatccaaggatatgccttcaagcctccacctagacccgactttgggacctccgggagaacaatcaaattacaggccaatttcttcgaaatggacatccccaaaattgacatctatcattatgaattggatatcaagccagagaagtgcccgaggagagttaacaggtattacgtttcatccttcatgacctgtgtaagtggtctgcgcggacagacacggcatttaaactaatcaactctgaaattctcagcagatccatctgggttttttccagaacgtttcagctgcatttgcttttcaaaaacagtttttcagagtcaaacctacggattgaaaaaaatatatatataaatatataccaagtttttgtattgagacacagtttcaggatagtgaaatacatacatcgtaaatgcacaactggaagaatttcgacaaatgtatatactgatcaccctagaaagttgcctcataccctcttccggttacccccagcccctaaagtcacggcattctgatgtgtgtcacatagattagtttccaggtctgtatagtgacacaccctcaatcccgactgcttttactcagcagaatttatgagacccacctgcgccgttgtgtgtattt

SEQ ID NO: 16410 - DNA, 1371 bp, Homo sapiens
ctgctcacgccctggctgtggatgccaaaaacttactcgatgtcattgaccaagcaagactgaaaatgcttgggcagacgagaccacactgagcctcccctaggagcacgtcttgctaccctcttttgaagatgttctctagccttccaccagcagcgaggaattaaccctgtgtcctcagtcgccagcacttacagctccaacttttttgaatgaccatctggttgaaaaatctttctcatataagtttaaccacactttgatttgggttcattttttgttttgtttttttcaatcatgatattcagaaaaatccaggatccaaaatgtggcgtttttctaagaatgaaaattatatgtaagcttttaagcatcatgaagaacaatttatgttcacattaagatacgttctaaagggggatggccaaggggtgacatcttaattcctaaactaccttagctgcatagtggaagaggagagcatgaagcaaagaattccaggaaacccaagaggctgagaattcttttgtctaccatagaattattatccagactggaatttttgtttgttagaacacccttcagttgcaatatgctaatcccactttacaaagaatataaaagctatattttgaagacttgagttatttcagaaaaaactacagccctttttgtcttacctgccttttactttcgtgtggatatgtgaagcattgggtcgggaactagctgtagaacacaactaaaaactcatgtcttttttcacagaataatgtgccagttttttgtagcaatgttatttctcttggaagcagaaatgctttgtaccagagcacctccaaactgcattgaggagaagttccagaaccatcccctttttccatttttatataatttataaagaaagattaaagccatgttgactattttacagccactggagttaactaacccttccttgtatctgtcttcccaggagagaatgaagcaaaacaggaatttggttttcttttgatgtccagttacaccatccattctgttaattttgaaaaaatataccctccctttagtttgttgggggatataaattattctcaggaagaatataatgaactgtacagttactttgacctattaaaaaggtgttaccagtaaagttcttgttgtaatatcctttcttttggttctgtttcttcagatggcttttcaggtgacttgtcagataagataacatacaagagagttcccaataattatcaggaagcctctcactaattagtttctttttttttatttaatcttctaaacaagtcaaggatgttaccacagaagggtagcgtggcgtaagttaaccttttcattccatcgtca

SEQ ID NO: 16411 - DNA, 1824 bp, Homo sapiens
agattgtgccatcctgtcctgccaagtgtacatctcgcagatcctggtggcctctgcccttgggggcgtggtcgacgccgtggggactgtccgcgtcatccccatggtggcctctgtgggctctttcctgggcttcctgacggccacattcctggtgatctatcccaacgtgtcagaggaggccaaggaggagcagaaaggcctgtcttccccgttggccggcgaaggcagggccggtgggaacagcgaaaagcccaccgtgctgaagctcacgcggaaggagggcctgcagggaccggtggagacagagtccgtggtctgagccgcactcccgtttacacacattccagtgggcgggtgggcgggcgggcgggcggcggggccaggccatgggcgggagcagagacaccgcggaaccctgcagatgctgtggccgacccggcagtgcgggccagagcccctccgcccccatagccacaattcagtagtcgtagggtaggtttgagctactaagcaaataccacactaaccactttttcgataattaaaagaatcatttgaaatattttttttaattgaaaaagatattttaatttcagctcttttattctgcaggtgtattattctgcatgtttttaaatgatataaaacatttatatagacaataagcaacttagaaaaaataagattttgcatttctaaaattataattgaaaacaaaatctgacattctctgctaagtcttatctgaatgcttcagataatggtagtgtagtcagtgactaaaatatttttatcaaatttcctctctgtagacgcctgcaggtattgacgtctgtcagatctcgtcacattggctggtgccgcagctgttggagagtatttttctttatgattattttagaaaaaaaattttcttttccacaatgtggttctcttagaagaatgacgtatcttcttttcctcagcgagttggacacattgtgcccagggcagccctgtccttgggcagcgaccgcacaccaaagctgggaggaggctggtccggggggcctgggcagaagacagtgatttgcaggggtggctcccagacaccctgcccagggatgggctgggcaccacctgggggcggagcgtgagctccagacgagctcctgcgtgcgcgtgtgagtgtgtctgcgcccagccatgtgaccccgctcgtcccgtctgaaggactctcctaggaggccaggttgcccctccagaccgctcccaacgtcagggggaaggaaacgttgactttcactgcactttgattcgtctctaaaccatttgctggggattcctgagagcagagctcccagcgggccctgcctcccaagtcccgccgcaaggctacctcgggtgtgtggatgtgcgagggcctcccccgcttgcgaaggggacatgcgtgctggaacctgtcggaactccatgccttcctcgcctgctcacctgctcgacgctggaatcgggacaggtgcaaagggacgcagacgtctgggacagctaaggcccgtgtcaccggagggctccgcacagtcgttctggtttcaacgaataagcaaaactcgggcaagtactgcagctatttggaaatgttttccaaaccacagtctctttagaactaagcctatttgaaacggtcggtgtaggcttactgagatcaggagacagggaggccccgcacatcacacagataaagtcagacaattgtaattaatacttttgctgcctcaagttgttttttaaataaagtactttgaaatgcatgagaatcatgctgcaatatgatcattctag

SEQ ID NO: 16412 - DNA, 1098 bp, Homo sapiens
tcaaggggcagttctgtcgggtcagaattctcagacccagcagcagctgcagtttcttgttttgttttcctactgctttctccttctccagcccctgactcccatcatgagggcagccccggccccctgttagagggagaggccctcccagagcttccccccctgtggcctggtgccaccggctcaccggctgctgcttcctcccacgcaggcctcggcggagccatcggctacgtgctgggtgggctggactggacccagaccttcctgggcagctggttccggacccagaaccaggtgctcttcttctttgccgccatcatcttcacggtgtccgtggccctgcacctgttcagcatcgacgaggagcagtacagcccgcagcaggagcgcagcgctgaggagcccggcgccctggatgggggcgagccgcacggcgtccctgccttcccagacgaggtacagtcggagcacgagctggccctggactacccggacgtggacatcatgcgcagcaaaagcgactcggcattgcacgtgccggacaccgcgctggacctggagcccgagctgctgttcctgcacgacatcgagccctccatcttccacgacgcctcctaccccgccaccccccgcagcaccagccaggagctcgccaagaccaagctgccccgcctggccaccttcctcaaggaagccgccaaggaggacgagaccttgctggataatcacttgaatgaagctaaagtcccaaacggaagtggctcccccacaaaagacgccctcggcggctacaccagggtggacacgaagccctcggccacgtcgagctccatgcggcggcggcggcacgcgttccgcaggcaggcctccagcaccttctcctactacggcaagcttgggtcccactgctaccgctaccggcgcgccaacgccgtggtgctgatcaagccgtcgcgcagcatgagcgacctgtacgacatgcagaagcggcagcggcagcaccggcaccggaaccagagcggggccaccacctccagcggggacaccgagagtgaggagggggagggcgagaccacggtgcgcctgctgtggctc

SEQ ID NO: 16413 - DNA, 1207 bp, Homo sapiens
tttcgtatgagaaaatgtttttctagaaagtaggtttggttatttgcacagacgtacccagagtgagtggcagagagctgtgtgatcttgggtcgggccctcggggcacacggcttgctcgggggtcgggcggcggtccacagggccatctggtggccgtcccctgactctctggccgggttgttttcctcttttgcagatcatccagtcactcgatggggattaccagcggaccacctgtttgtatcaccttcccacctctctgtagcaagaaaaatcacttcagcacctcttcagtaataatgatgaaactggtattaactgaatggcaattatggatttttaactctaattcacagtaaaccagcaagccatatgtttaaaatccaaccaaaaatcgttctgtgttgctgcatgtctcataccgttgtgagaagttgtgagatagccacttgtgcaaagaggaatgtaagtgttacctgcccgaggaacacagcagaagcagaaagagaagacgtcttaatttatcattacagatatatgaaagcattatttatatagatagaatatatagataaatacatatatttttggtggtaatgaaaatggctccgcagaatgccgacccggaatctatgcaagttcaagagttatccgtgcccctgccggacccgcagaaagccggaggcgcagaggccgagaactgcgagaccatcagcgaggggtccatagaccgaatccccatgcgcctgtgggtgatgcacggggcggtgatgtttggcagggagttctgttacgccatggaaaccgctctggtcacaccaatactgttgcagattggtaagtctcctccccgtctgtgcgcagtgaacgctgagcggagtgctagcggactgggcgtggctctgatcctctggaggcagaggatggtgcgtcctggagagccccgggcactggagtctttgtctcctctcccttcagcctgccctgatggtggttttcgtctcctgttttcagccaggtttggggaggagtgatcttcggatgttgacgttgaattacagttttggcaaagtggtagctcagcatctggggcagaattggcactgataagtactggctctcggccggggctcacctctcccgctgtccctgccaggccacagtgaacaacgaggcaaagggcagggtcgccagcactgacagt

SEQ ID NO: 16414 - DNA, 1202 bp, Homo sapiens
aataggtgttgtgtttttaaaggattgttaaaaaaaaaaaaaaaaaaaaaaggaagaagaaacaaaaaaggagaatgtacaacagagaccatctgtggcccgaaatcccggaaatgttcatcatccagctttacagagaaagcttcagtgtctggtcttgtcggtggactcggaatggaataatcaaggggtgaagcatttttaaagaaagccgttttcctatttagtaataaccctagaacagagtgtctccctctggtgctgttgacgttctgggccagggccttctctgctggaggctgttctgtgcactgtggtgagttgaaaggcatccctggcctccgcctataagatgccagtactgtcccctcctccccctgttgtcgcaagcagagatgtctcacgtcattgccaagtgtccctggagggtgcagagttgcccctggctgagaatcactaccttagaataattcatatattacttattacagacatttattgcctaactctcagctcttactggaacgactcttaggaacagagacggcttcacttcaggcacaagtctccgaggacactgtaatgggacaaagagccgattgagcaggcatgaagggtctgatgtttataattaagtcattaggatttcttagaaaactaattgcttttgttcctgcccaaaacccagctgatgttttcagtctttgcagacatgtctgggtgttacttcttctcacaaaaatgactcttcttacctggtggaagaaagcagttaaaatcattgaccctattctggtacaagattgacagactgaaaacagggaaaatcgtgaaattttctgttaggaatgattccgaaaaggtgggggcggaacaagaatagcagaatgttggtccttattaaacctgggtggtttcttacactattctgtttactttgcatatgttagaaatagttctggctgggtgtggtgccccacgcttgtaatcccagcactttgggaggccgaagcaggtggatcatgaggtcaggagatcaagaccatcctggccaacatggtgaaaccctgtgtctactaaaaatacaaaagttagctgggcgtggtggcatgtgcctgtaatcccagctactcaggaggctgaggcgggagaatcgcttgaagctgggaggcggaggttgcagtgagccgagatcacaccac

SEQ ID NO: 16415 - DNA, 1360 bp, Homo sapiens
gtgcctgggcccatgcctcgctgccctgtggccgccgctgctgccgctggttcttgctttagaactgctgtcttggcagctttcacttctcatgtaggcgagtcccaagctaatatttatcctccaaagtatcttaacaatgctagattgctgagtgtttggggggaactttattaatctttgaaagagttattgttacattgataaactgaggcactgtttacaatagccagattgtgtttggacttgcagcctttaattctgccgttagtttttgttcgcagatggaattgttttggctgttcttgtaaagactcctttgtccgtgtgggttttgtttgttgccggccagcgcggggcgtgtgccagggagggcagcctggccagggaggggtgcgcgatgcaccaggtcaggtgtttccactgcatgattggcaggcttctcgggaatgcggaattgtgtactcgaagcccccaactttttatgaattgtcggtttacaactgaaggcatctccttccagagggaaagctggcctccctcatcaaagacttgcaacgtatgtgaaagagcaagtgacagacgtaagaatgggggtagagggcattgagatgtggtccgtgggattgcaggtgtaaaggaaaatgacactcttagccgacttgctccttcaaacaaagtcagctatgagtctgtcctgcggatgttacttttcagtaaagccagacttgtcctggctcccctccagagccgtttccttcacctggcagccatcctgggcttctgagtaggcggatgggaggcaaggaaaggccgcctggcacggtggggatagagccagggccccgaggccacaggggctcccacgagcatcggcccttcctttccaggctgcgtgggggaaggaggtgagaggagaaccagcagagcctggaggtgggtcccgcagaatgtgggagccgtcacagaggtgggggtcttggggtgaaggctggagctggaaggtgtggaagccaggcccagccaagcctgtggagagaaactgtgcccacaggctgggggccaaggtgggggctggggctttgcttgtctggccttgaaggggacagagcaggctgaggtgtgctgccctggaggctggagccctggcccccagcagcctggcagtgaaatgtgcctgggggcagtagggacagagcccggggcaaaggatgcccccagcaggtctgagcagcccttgctgcatcctgcagtgctgcccactcccttgcgggtgcgtctgtgccttgttgagacgttagcaaggagcccagcttcctctctggtcagctgattgcattgcatttttctgctcactcac

SEQ ID NO: 16416 - DNA, 1130 bp, Homo sapiens
tgtgactgtgggctcatgacaggcatgaaccccttgtgggaggcggggccccctgtgatccctttctattcatttccttcgtctttccccacagatgctgtgtgctgtggacccacctggggttcatggagtgggccacggggcccagccctaagcactgctgcgcccagggtcgccgcgcctcctgctgaggggtccccgtgccactggctctcaccattgccctcgcctgccgatggcctctgctgcccagcctggggccagctctaccgcctgagccccctgccccactccaggactcaccgtaccccgatggggtaacgtgacacaggccccacacgtcagaggccgctgtccccacggccactgcccgtgacccctggcccaaggcagctggagttggttcagttcaagttcattcttcctctggcccttgggggcttggggcccacctctgagtgaagggggctgtctgcccatccaccaatgtggagagggcgcccccggtgtggggtccagctctggacactgcttggcggccgggttcactttgagtttttaagttttctttgctgagcttttttggttgttctttttattttttgcctctttatgactatccagctctgagagacgggagtttggagttgcccgctttactttggttgggttggggggggcggcgggctgttttgttccttttcttttttaagagttgggttttcttttttaattatccaaacagtgggcagcttcctcccccacacccaagtatttgcacaatatttgtgcggggtatgggggtgggtttttaaatctcgtttctcttggacaagcacagggatctcgttctcctcattttttgggggtgtgtggggacttctcaggtcgtgtccccagccttctctgcagtcccttctgccctgccgggcccgtcgggaggcgccatggctcggatgaaccgcccggccccggtggaggtgagctacaaacacatgcgcttcctcatcacccacaaccccaccaacgccacgctcagcaccttcattgaggtgagtggagacggaggtgtggcaggcaggtggcccaggtgtctgggaagcccggctgagctgccctcaggcctcgca

SEQ ID NO: 16417 - DNA, 1115 bp, Homo sapiens
attgccccttaacattttaaagccttgtgatgctgttatctaattgggtactcgtcaaggcctagtaaggatatgggatatgtagttctaccctacaagggaaggatagtgtctcagtccatgttggctgctgtaacaacctgccacagactgggtggctgtcaaaaacagaaatttacttctcacagctctcgaggctctgagaaatccaagattgaggcgccatcagggtaggactctggggagggccctcctctgggttgcagatgaccgttttcttattgtgtcctccatggtggaagtggcaagggacccctgcatggaatttttgggaagggtcctaatcccattcgtgagggcttcaccctcatgatctaatcaccccccaaaggcctcacctcctaatatcatcaaatcaggggttaggatttcaatgtatacattttagaaagacacaaacattcagtctgtaacagagcgagaggagacgggaagggagctagatttggaatcccaacatctgggttgagtcccaccacctccacaggaatgtgaccttgagtgtcataaaggttaaatggtgcaatcatgtcttaaggtgaatgagcaggaggaggagggttagaagcctttgtttccaatcccacatcctccccaatttcccacgccacattgactgctccatcacgggctgtagaatctaagcattgcagacgacaaacctgcatatctggaagcatcttcatcatctttaaaaaataaccctcatgggccaagcacggtggctcatacctgtaatcccagcactttcggaggccaaggtgagcagatcacctgaggtcaggagtttgagactaacctgaccaacatggtaaaacctgatctctactaaatacaaaacaattagccagtcatggtgacaggtgcctgtaatcccagctacttgggaggctgaggcaggagaattacttgaacctgggaggcagaggttgtggtgagccaagattgcacccatttcactccagcatgggcaacaagagttaaactctgtctcaaaaacaaaaacaaaaaataaccctcatggccagctctgtgcgaaggcgaggcaactggct

SEQ ID NO: 16418 - DNA, 1507 bp, Homo sapiens
cctgcagagggtcctaggcatgggagatcctgggtggctgcctggacatgttccacagaggtgaaggcacccgccctctctgtcttccgcagacccgggagcacctggccaaggctcagcgagggctgcctggggagggggtctcggaggtcatccagacactggtggagatctctcaggacgggaccagctacagtggggacctgctgtccaccatcgatgtcctgaggaacatgacagagattttccggagagcgtactacagccccacccctggggacgtacaggtgggctccccgagcggcattttggaagagggtgtcgggaaggtgtctggggagccctcctcgaccttagagatggatccccaaccctggccacagcccaggccctaacccatgtcataggttgaactctgacctttgtcacacatttaatcttggtcacacattgagccctgaccctggtcacacactgagccctgatcataggctgagccctgaccctggtcacatgctgagctctggtcataagctgagccctgatcctggtcacacactgagctctggtcacacactgagccctgaccctggtcacacactgagccctgatcataggctgagccctgaccctggtcacatgctgagccccaaccctggtcacacaccatgtcctgatcctggtcacactctgagtcctgacccttgtcacaaactgagccctgatcctgatcatacactgagccctgaccctggtcacactgagccctgatcctggtcacacactgagccctgatcctggtcacacactgagccctgaccctggtcacactgagccttgatcctgatcacacactgagccctgatcctggtcacactgagccctgatcctggtcacattctgagccctgatcctggtcacacactgagccctgaccctggtcacactgagccctgattctggttacactcagaaccctgacactggtcacccactgaaccctgaccttggtcacctgctgaaccctgaccttggtcacatgctgaaccctgatcctggtcacacgctgagccctgaccctggtcacactgagccctgatcctggtcacacactgagccctgatcctggtcatgctgagccctgatcctggtcacacactgagccctgaccctcgtcacatgctgaaccctgaccctcgtcacatgctgagtcctgatcctggtcacacgctgagcctcgatcctggtcacacagtgaaccctggccctggtcacacactgagccctgatcataggctgagccctgaccctggtcacacgctgagctctggtcataagctgagccctgatcctggtcacacgctgagctctggtcacacgctgagccctgaccctggtcacatgctgagccctaatcctggtcacgcactgagccccaaccctggtcacacaccatgtcctgatcctggtcacactctgagtcctgacccttgtcacaaactgagcc

SEQ ID NO: 16419 - DNA, 1095 bp, Homo sapiens
gagggaacggtccttattgggtttcaggtttccatgggcaccacaggtggtgtccagagatctggagaatgtggggctgcttactgggaggggggtggggagggggcaggacagatgtgtgagcataggaccaggtgctgaggccacggggcctgagccccagcattcaagcatcgcgtcaggaaggagggtcggccagagaccccaagagaagagccaggaagggcccaggcctggggaaggagggacagtcaggtggccttggccctgccagcctggtgcccctgctgtgtggctctaagcaggtgggtccccccctctggtactgtccccatctgtaaaatgggggtgacagtggctgcctggggtctcctgaggattctaaggctaaagagtgggtgtgacctgccctgcatgccgaaggcgcttaataagtgccagttttcttctgccacttcccagctcacccctactcctgagaggccggcagcacctctctgcacgcccctctgcacacgggcggtgctgatggcctgtctcctccccagctgctggctctccctggaggggggactgctctatgccttcgtgggacctgccgctgccgttgtgctggtactgacccgcccaggccccactccccacgaccccacctgggccccccacctgcctcctgggcctcggtgctgtctcatgccccaggctgtgcacctgctgtcccttcaggatggccctcatggccctcatcaccagggggtgggggtgcccacagccccactctgacctgcccttggcatgcagtgcaggggctgggccagggtagtgacccttcacacctgtgagtctcggcttgcctgattattgggtgccagctgtgtacctgccaggagatccccgcgggtgtggtgagtgagtggcatgggaggaagctggggatggacggatgatgcgagcagcggggagctgcaggctggacctgggttgtgggtgtctggccccagagcgccagatgtgaggctggtgaccgcggctgcttgccccttcgggggccccggtgaggaccttccctgtgtgggtccttgggctttccttccc

SEQ ID NO: 16420 - DNA, 1144 bp, Homo sapiens
actaaagattaaaaattaaaattcgtttttgcaataatgacaaatgtcctgcacctacccacatgcactcgtgtgagacaaggtccataggtatggccccctcttccccctcccagtactagttaattttgagtaattgcgtattgtcagaaaagtgattagtacaagtttttgttttgttgcttcaaaatttttttgtttaaaagcaaggcatgcttgtggatgactctgtaacagactaattggaattgttgaagctgctccctggttccactctggagagtaatctgggagatcttagtgtgtgtgtgtgtgtgtgtgtgtgtgtgtgtctcctctttctttgggaggagtgtgtgtggggtttattttttagtccttttttttttttaattcattaaccagtggatagcccttaggggaggaggacggattgattccacattccacttcctagatatggtttagaaaacatgttccccacctggggctctcaggaaggagtatagtaaatgcctcatttaataacagactcctttttgaaagttgccttttctctccacctttgagtagatccagtatttgatgaaactcatgaaagtgggtggagcctgtcttgcccctcctcttttctaggacacactatatgtgactgtgactttcaaagacatttgtttgccatttgctgattttggggggaagttaatttctaacttctttcactaataaatgaagaaaagtattgcacctttgaaatgcaccaaatgaattgagtttgtaattaaaaatttttttccctgtcagtcattgtctcacatgcttagcatcgatttgcagctcagtagtatatggtgttcctagaatgcagctgaagacctggtatgtagaggaaataccaggggtggtgctagaagatagacatctgtggaatgattcacatcctttcattaggaggatagaggccttcttcattaagaagctgggggtggggagaacacataacaacatggggaccagtcaggggagtccccttatttctgttttgcatatgaggaaccctacagcagccaggtgaggctctctagtttaataaaaatcatggaaagagtcttttttttttttttttttttgagctggagtctgg

SEQ ID NO: 16421 - DNA, 1629 bp, Homo sapiens
ttggggctgtccctggcccctgccatctaaccgtgctccccttgcccccccagtggtacaggagctgcagcaggccatctccaagctggaggcccggctgaacgtgctggagaagagctcgcctggccaccgggccacggccccacagacccaggtgaatgctctccccacgcctgacactgcaggggaccacgtggccctgctggcttccacgtcgccctgtgggctggccccagcagcagtgatgagctggcagccaggatactggagtcctcaggtccccaggaaggtttacagttagccctgggcaggtggaggcagtttttgtctttcctggggccctgcatgtacacagctgcggtacacaggggctgcccttcctccagtcaaaggagggaggagggccaggaggtggccaggcagctctgggccctggttggggcgtctcagccgtgcctcctgtcccttcccctgtggcagcacgtatctcccatgcgccaagtggagcccccagccaagaagccagccacaccagcagaggatgacgaggatgatgacattgacctgtttggcagtgacaatgaggaggaggacaaggaggcggcacagctgcgggaggagcggctacggcagtacgcggagaagaaggccaagaagcctgcactggtggccaagtcctccatcctgctggatgtcaagcctgtgagtgggcggggtggggcttcagggggccaggcactgccctggtgcccgcctagccggctcagcctgtgaccctccccctgccctctgggttctggggagactttaaagccgagtttagaagtcttgggataaacacaaacttggaggcaggaaggtgtgaatttggattgttttctgtgggccctttaaggaaacagaattgtggacacacagtggttgagggtagggtgcatgcaggtacttcctgggtgttctgagggtggctgaccccagcttttcctcccctttccccacagtgggatgatgagacggacatggcccagctggaggcctgtgtgcgctctatccagctggacgggctggtctggggggcttccaagctggtgcccgtgggctacggtatccggaagctacagattcagtgtgtggtggaggacgacaaggtggggacagacttgctggaggaggagatcaccaagtttgaggagcacgtgagtgagccggccggggagaggaggggagaggagactggggaccctggcccataccctgcactccaccccacggcagtggggagcgagtcccagagtgaaccccacctcagaggaggctcctggctccgagtgggctgtaggggaacagccctgaccgtcaccctccgcctctcctcaggtgcagagtgtcgatatcgcagctttcaacaagatctgaagcctgagtgtgtgtacgtgcgcgcgtgcgtgaggccctgccacgattaaagactgagaccggccctctggctccgtcctggtcatttcctgctcgtacctggcctgtctccctccctgtctcagccccatctctgccctgctgttcccacacagtcatcctggctgctgccaccctctgtggccatgtcaccttgcccccagcagacctccg

SEQ ID NO: 16422 - DNA, 1252 bp, Homo sapiens
tccagcctgggcgacaagagtgagactccatctcacacaaaaaaaaaataacaaaaaaactcagaaatgctaagtgtacttatttgttgaagaaacttgttacatattactaacatcttttttttttatgagaaatacttttcccataaccaaaaaattcagtgagcagaatggccttgcttgaggtttttgcaaatctctcgggtgtctggcttagtgggaggcagctgggccctcatacctgcctccgcacttcagctgtttgacataaacccagcttcgtgtgagtgaaagggaagggcctggggaccctcagaggttctcggaccacactttgagaactcctcgtctggaagacaggcctggggatgccatgtggggtgagggcttacgggcttggtgtcgctttgtggagaaccgctggtgtctgaagcgggtgtcagccccactgcaccttggtgcttctgggctgtcctgatgccgaggcccacttcccagccatgctgactttgcctctttcccctcccagcagaaaaatggctacaaacttcctagcacatgagaagatctggttcgacaagttcaaatatgacgacgcagaaaggagattctacgagcagatgaacgggcctgtggcaggtgcctcccgccaggtgagagctgcacgtggggcggctgggcggctctgctgcccgacaggagtggccggggcacacaaagcggattcagccaggccaggaaggcagaggcaccctggcccagtggctctgctgtgggtgctgggagtggggtctcggggcaggcggccttggccgggcccccgggccgggtctgctcagggccctcctgccggcgcctgtgcacttggtgtggggccaggcctggcactccttcccccgcagacatgggcgcctttgcctgtcgtcacagcctcaggcatctcccgcttttctggcccgccaagctctcgttctgtgcagtactttcttgctgtctctatgtgagggttcatggggttttttggtttgttttttaattaaattcttttttaataataaaaaaaagactggttctttctgcactgtctgcaggagaacggcgccagcgtgatcctccgtgacattgcgagagccagagagaacatccagaaatccctggctggagtgagtacccgcggcccacggacctgcgggctcctgctcggccaagcagcatgtctgatttttcctgatgctgctggttgttttggctt

SEQ ID NO: 16423 - DNA, 1148 bp, Homo sapiens
aaccaggtggcctgccaccacgtgacctgggggatctgggtcaacaagtcctccttcgaccaggctgagcgggccttcgtggagtggtctcaggccctgttgctggcccccgacggcagccgcaggcaggggactcccaacacaggccagcaggtggccgtccccgacctggcccaccagcccagcccaccggtcaatggccagcccccgctgggcagcctgcaggcactggttcgggaggtgtggctggagaagccccggtatgatgcagccgagaggggcttctacgaggccctgtttgacggccatcccccagggaaggtgcgcctgcaagagcgagccggcctggccgagggtgcccggcggggccgcagagaccggcggggccgcaacatcttagggaacaagcgggccgggctgcgacgggccgatggggaggccccctctgccttgccctactgttacttcctgcagaaggatgcagaggccccctggctcagcaagcctgcctacgacagcgccgagtgccgccaccacgctgccgaggccctgcgggtggcctggtgcctcgaagctgcctccctgtctcaccgacccggtcctcggtctggcctgtccgtgtccagcctgagacccaagtaggagaaacgtgctgggtgggcacccagcctgggctgtgggcacagggacagccatcccaggctggggctcctccagcttcctcccctgcccacctggggtgggggctccccgagacccgtgggcccagcagagttgaatgcaggagcaggctgagtaaaggtggtgctgcgcttgtgggttccagggacactgcttgaggttacaaagttccaggctgcctggatgagggcagggaagggctcagcacagggcagaatctctgccttgcccagggtccctctttggctgggaagctccccaagtcccctgtggctgtcacatgccagggctgagaagataaggctacttataggggcgggaagcattgaagctggtttctggccctagcgctcccctgcgatgagatgtgggagccagtgtgtccctgcctgtccatcctgtgcacccccagctttccttgtcacctgaaaccacctctgagggaaggtggtggcgtctcagatgca

SEQ ID NO: 16424 - DNA, 1242 bp, Homo sapiens
tggcctccaggcctctgcatgcctgccaccctgtccgtgcctgccaccgcccccatccgctcccgcagggcctccccacgctctgccgtggccctgcctcttcaccccccctcccccttcagccgggctctgtgggcctcagggctgggagcccacccgtccacctgggtggtttggggcagggctggcaccggcctgaccaacactctccccatcacagtcaccggactttgctgaggagttgaggtccctggaaccatctcccagccctggtgagttggggccgggctggggtgagctcccaggagcccagctgccctcagctcactgcccacctgtccctgccctccaggcccgcaggaggaggatggagaagtggctctggtgcttctgggcaggccctcacccggcgctgtgggccctgaagatgtggcactgtgcagcagccgccgccccgtaaggcctgggcgccgtggcctgggccctgtgccctcctagaggagcaggcacctcccccagacttggggtgggggccctgccagctccagcaccacccttgccccaagtcttttaacctgggtgttagcattttaaagagaccccacaggagttctggcctgtgactaactaactgccccaccccagccgagacctcggcgagactgtaactagtgatgtttgtacaaccaaagactctattttgtggtttaaggagaataaagttgactacattttacctcccgtctgcctgtccatcccccacccactagcacagacccttcctgccctccgaggcgaggctgagctccgagggctgcaccctcaccgtccctcccacgtctcccgctgcgcctcactgcgcacgggtcggccgggcaggctgcccatccccagcagggcctcccccaagtgcctgcagacccatgtccgccggccggggcccgggactgccggagtcctggactggcacacgccaccgctgcccccacgcacgcagcacagatgcagcaccgcgccccggggcacacgttttattgggactggggccagcactagaggcctgtgcctggcagctgcacgcgcactgggagcagcacctgcagctgctcagctggcggccactggaccttggtgacgaaaaagaggcggaagtgctccagccgctgctcctggaactgcgtggggctatactcaggcccgtccgtgggccgcagcagcgacaggtacctctcctgcaccgcc

SEQ ID NO: 16425 - DNA, 1237 bp, Homo sapiens
cgcctgagagccccgggcccctccgtcagcgccacgtggcctgcctggcacgcagcgagagggggctgggcttcagcattgctggtgggaaaggctccacaccctacagggctggtgatgcggtgaggctggggcccagggccggggagggctgctctagagctgacagccgcactccagcctcaccggcagccctgcctcctccaccctcccctgcagggcatcttcgtctcccgcattgccgagggcggtgctgctcaccgcgcgggcacactgcaggttggcgaccgcgtcctctctgtgagtggggatggggccccgccccacccacccatcccccctgccccgccccgcgccctctgtccccttctgcccttgggcctccctgattcgggcacgctctcacagattaatggagtggacgtgactgaggccaggcatgaccacgccgtctccctgctgaccgctgcctcccccaccatcgccctgctgttggagcgggaggctgggggccctcttcctcccagccctctgccacattcctcaccccccaccgctgctgttgccaccaccagcataaccactgccacccccggggtgcctgggttgccgagcctggcccccagcctgctggctgccgcgttggaagggccatacccagtggaggtgagacacaagcccccacccaggcacccacccagcttcagctgtgggcactggccttcccaggacctgctctcttatggccttgcggcccactccaggtgggaagccggcctgctcgccctttcccctgcagctccttgaggctggggctctgccccacagccagactcctcagtatggtccccttgacacagtctcctggctggccacatggccacagtcagcgaggatattgtcctcacgctgcgtgcctgcctgggcagcagaacactggtggcgcagaaatccccgtgggcattagggcagcccccgcccgccatccccaaggaccgggacggactcttgggagccctcccacaccctttccctgtcctgaccgaggcctgtccttgtcccgccctaaatccccaggagatccgtctgccaagagctgggggccctctggggcttagtattgtcggaggctccgaccattccagccacccgtttggtgtccaggagcctggtgtgttcatctccaaggtagggcggcccatccaggcggttctgtgagaggtgcacccatcccagg

SEQ ID NO: 16426 - DNA, 1188 bp, Homo sapiens
gggtctcctggagcccaagaaggagaaggaagaagaggagctgtttcccgagtcagagcggccagagatgctgagcgagcaggagcacatgagcatctcgggcagtagcgcccgacacatggtgatgcagaagctgctccgcaagcaggaggtaggcagaggggcagggtggtggcgggggagagggtaggggggcggggccgcagtgctcagctgtcttcccctcggccctgccccacagtctacagtgatggttctgcgcaacatggtggaccccaaggacatcgatgatgacctggaaggggaggtgacagaggagtgtggcaagttcggggccgtgaaccgcgtcatcatctaccaagagaaacaaggcgaggaggaggatgcagaaatcattgtcaagatctttgtggagttttccatagcctctgagactcataaggccatccaggccctcaatggccgctggtttgctggccgcaaggtggtggctgaagtgtacgaccaggagcgttttgataacagtgacctctctgcgtgacagtggtccctctccccggacttgcacttgttccttgtttcctctgggttttatagtgatacagtggtgtccccggggccaggcgcgctctgcccagcccagcctacagtgcggataaaggtgcggatgctgctggccctgaacgtccgtgtgtctgccgtcggtcctgtcaccgatcctgggcgtgtgtccttagggggtctagggcgaggaggcagggttgggggggtctctggacctgcttcctgttggcaggaggggcctgccgtgggcgagacctgggcagggggttggcgccccgggccccgtcccgcgggtggcggcggctgggtgggcggggctgcctggggcgccaggctctcgcgcgcgggctcgcagccgtccccgcagggtggtgctgagagaaggctgggcaccgggacaccgcgacccgctggacagcgcgcgctgccagtgcttttgtgccgcagagccggccgtccaaggcgggcgggcgggcatggtcgcttcccgggaggaggctgtgcgttaagattcgtggccaaatgccgcggggccaggggccgggctgaagaccggagggcggagggcgccgcctctcgtggattgtagctcccaatatcccgcgcgcggggcgggcccggctt

SEQ ID NO: 16427 - DNA, 1179 bp, Homo sapiens
cctttggccccatcaagagcatcgacatgtcctgggactccgtcaccatgaagcacaaggtcagcaggcttggtccgccccggccacttcgggctcgcccccacccctgggctcgcgcagcctgacaggtgtgtccctgtgtctagggctttgccttcgtggagtatgaggtccccgaagctgcacagctggccttggagcagatgaactcggtgatgctggggggcaggaacatcaaggtgaggcagggagccaaggcctcgatcccgcaggcgtgcagggctgcccctccacggaagccttttgtggccgggcctgggttgaccggtctttccatctcaccgcctcttccccaggtgggcagacccagcaacatagggcaggcccagcccatcatagaccagttggctgaggaggcacgggccttcaaccgcatctacgtggcctctgtgcaccaggacctctcagacgatgacatcaagagcgtgtttgaggcctttggcaagatcaagtcctgcacactggcccgggaccccacaactggcaagcacaagggctacggcttcattggtgagctggggtggctgaggcgggatgggggccacctgaggctggggctggccctgctcactgctgctcctgcccacagagtacgagaaggcccagtcgtcccaagatgctgtgtcttccatgaacctctttgacctgggtggccagtacttgcgggtgggcaaggctgtcacaccgcccatgcccctactcacaccagccacgcctggaggcctcccacctgccgctgctgtggcagctgctgcagccactgccaagatcacagctcaggtgagggcccacacagctgtcggcttgagggtgggcgggctggcccctgattccttggagactgattcaaggtggtcttgagtagccagaccagggactgagcacggtgaccttttgggttgcaggaagcagtggccggagcagcggtgctgggtaccctgggcacacctggactggtgtccccagcactgaccctggcccagcccctgggcactttgccccaggctgtcatggctgcccaggcacctggagtcatcacaggtgagtcttaagtggtaccagatcctctcctctcctgtcctggcatctctcggctcgctgccctcagctgcctggccc

SEQ ID NO: 16428 - DNA, 1844 bp, Homo sapiens
cagaagctgcgtgacgtgggcgcctactccaagtacctcacctgccctaagaccaagctcaagatctcctataaggacgcgctggaccgcagcatggtggaggagggcacggggctgcggctgctggaggctgccgcgcagtccaccaagggctactacagcccctacagcgtcagcggctccggctctaccgctggctcccgcaccggctcgcgcaccggctcccgggccggctcccgccgcggcagctttgacgccaccggctccggcttctccatgaccttctcttcatcctcctactcctcctcgggctacggccgccgctacgcctcggggtcctcggcctccctggggggccctgagtctgccgtggcctgaggctgcctgcgcccaccccgctctgcatgcggcccagcccggctcccaccgaggcgcgggggccgttttcaacgcttaaaggtgtcttcctcccaagtggtgcctaaagtttaaccaaaaagaccagactaatatattaatatatatctgctgtccagacagcctgtatcttgggggacagggctggcccagccctgctggccgcctcaccccctcgggtctcctcactcccttctacctgccactcacacagccaggtgccttggagggtcccaagctgggccccagcccaccctcctgtcttcccagggtagcccgcctgccagtcctagctgcacagggcagctgggcccaaccctgtctgtagagggccctggtgtttctagcactggcctgcacggtgggccttgctggggacggggggccccagtcagcctctctcccagtctacccagagaagccccttccccatgggaagacgaggccctcgggcccagcccccacagtgctgtctgatctgtgctttccagctcaccccccacactcactcctgagacccctggcctccggcgtcagcctccagcctctgttcccctagtaagtgccttccatgtcggcctctaaccccaggccccgaggacccagacccagtggggaggcggacgttccagccggcatggctgggaactgcagacctgtcctcctggtgggtccaggggcccctccagcttgtggagccccacactggggtgccgcctgcccgtctctctcccatggagccccagccccctttgggcccagggacaccagccaggctctgtgctgaccctcctgttgcacccagccctggtctcagcagcgaccacccctgcctccaccctctgagctttgcatgttccactaaccccgggcgggtggcaggtggaggtgtcaggctgctggcgcctctgcaagggcagaacactaacctgaccgtgggcggggccttgcggtatccgcccccaataaaagcaattccaaccttcccgtgcctccggccttgtgtcttggggtcaggtgtgtgtcagggacagggtggacattgcagccccaggctccaggctctgagctcagccactatggccagtcagggacgtacgtctgtgtgcagcagagaccaggtgctcgcaggagggcagctgagagaccctgggcagagggattcagtgtggggcagggtggtggccacactgaggccgggccccctgggacctgctgctggtcaggtgctgaccagtctcccagccccacccttcgcactataaggggctcacgtttccttatctgaggcggggtgtggtatgctcccatatcagtcactggctgtggccccttggcctccggggagggtgccacatggccccgggtcagttggttgctgctggccgggcagccctccagagaaggggccacaggcagtgggccta

SEQ ID NO: 16429 - DNA, 1185 bp, Homo sapiens
cgtgcccgtggacgtggcctaccggcgcggctacttcgacgaggagatgaaccgcgtcctggcggaccccagcgacgacaccaagggcttctttgaccccaacacgcacgagaacctcacgtacctgcagctactggagcgctgcgtggaggaccccgagacgggcctgtgccttctgccactcacggataaggctgccaagggcggggagctggtctacactgactccgaggcccgggacgtctttgagaaggccaccgtgtctgcgccgttcggcaagttccagggcaagacggtgaccatttgggagatcatcaactcggaatacttcacggcagagcagcggcgggacctgctgcggcagttccgcacgggccggatcacagtggagaagatcatcaagatcatcatcacggtggtggaggagcaggagcagaagggccggctttgctttgagggcctgcgcagcctggtgccagccgccgagctgctggagagcagggtcatcgaccgcgagctctaccagcagctgcagcgaggtgagcgctctgtgcgagacgtagccgaggtggacactgtgcggcgggctctccggggtgccaacgtcatcgcgggtgtatggctggaggaggcggggcagaagctgagtatctacaatgccctgaagaaagacctgctgccatccgacatggccgtggccctgttggaagcccaggccggcaccgggcacatcatcgaccccgccaccagcgcccggctgaccgtggacgaggcagtgcgtgctggcctggtgggccccgagtttcatgagaagctgctatcagccgagaaggctgtgacagggtacagggacccctacacagggcagagcgtctccctgttccaggccctgaagaagggcctcattccccgggagcagggcctgcgcctgttggacgcccagctgtccacgggcggcatcgtggaccccagcaagagccaccgcgtgcccctggatgtcgcctgcgcccgaggctgcctggatgaggagaccagcagggccctgtcggcaccaagggccgacgccaaggcctacagtgaccccagcacaggggagccggccacctacggcgagctccagcagcggtgccggcccgaccagctgaccgggctgagcctgctgccgctctcagaaaaggctgctcg

SEQ ID NO: 16430 - DNA, 1139 bp, Homo sapiens
caggagttgatccggctgcgggccgagacggagcagggggagcagcagcggcagctgctggaggaggagctggcccggctgcagcgtgaggcggctgcagccacgcagaaacggcaggagctggaagccgagctggccaaggtgcgggccgagatggaggtgctgctggccagcaaggcgagggctgaggaggagtcgcgctccaccagcgagaagtccaagcagaggctggaggccgaggccggccggttccgcgagctggccgaggaggccgcccgcctgcgtgccctggcggaagaggccaagcggcagcggcagctggccgaggaagacgcggcgcggcagcgggccgaggcggagcgggtgcttgcggagaagctggccgccatcggcgaggccacgcggctcaagacggaggcggagatcgcgctcaaggagaaggaggcggagaacgagcgcctgcggcggctggcggaggacgaggccttccagcggcggcggctggaggagcaggccgcgcaacacaaggctgacatcgaggagcgcctggcccagctgcgcaaggcatcggacagcgagctggagcggcagaaggggctggtggaggacacgctgaggcagcggcggcaggtggaggaggagatcctggcgctgaaggcgagcttcgagaaggcggccgctggcaaggcggagctggagctggagctgggacgcatccgcagcaacgcggaggacacgctgcgcagcaaggagcaggccgagctggaggctgcgaggcagcggcagctggcggcggaggaggagcggcggcgccgtgaggctgaggagcgcgtgcagaagagcctggcggccgaggaggaggccgcacggcagcggaaggcggcgctggaggaagtcgagcggctgaaagccaaggtggaggaggcgcggcgcctgcgggagcgagcggagcaggagtcggcgcggcagctgcagctggcccaggaggccgcccagaagcggctgcaggcggaagagaaggcacacgccttcgcggtgcagcagaaggagcaggagctacagcagacgctgcagcaggagcagagcgtgctggaccagctgcgcggcgaggcggaggcggcccggcgggcggctgagga

SEQ ID NO: 16431 - DNA, 1598 bp, Homo sapiens
ggctaagtactctggacttggtcccaatcccccagaaggccagtaggaagatgtgtgaggtgggcagggagggaaggggaaggacagggatggaggcagtggcccactgaggctgaggaagcggctgagggtggccgtcttggccggggcccctgtgaggtcagagggggatcagctgtgctccgagtcatggcaacgaccttgcaggatgtccggctgctggctgcaggcaaagtgccacagcgggcgggggaggtggaacgggacttggacaaggcggatagcatgatccggctgctcttcaacgacgtgcagaccctcaaggatggacggcacccgcagggcgagcagatgtaccgcaggtgggccccgccctgccctccctgaagcccaggtacacacggccccaggcccgccaacacctacctgagtcctctgctgccccagggtgtaccgtctgcacgagcgcctggtagccatccgcaccgagtacaacctacggctgaaggcaggcgtggcggcccctgcaacccaggtggcccaggtgactctgcagagtgtgcagaggcgccccgagctggaggactccactctgcgctacctgcaggacctgctggcctgggtggaggagaaccagcaccgtgtggatggcgctgagtggggtgtggacctgcccagcgtggaggcgcagctgggcagccaccgaggcctgcaccagtccatcgaagaattccgggccaagatcgagcgggcacggagtgacgaggtgggtggcgctgagcgatgggcagtgcgggggtgggccgggcccagccactgcagacctcaccgtctcatctgttgcagggccagctctcccccgccacccggggtgcctaccgtgactgcctgggtcggctggacctgcagtacgccaagctgctggtgagtgggggcagggccagccgggggaggtgggtagcccgcggcctgctgacacgcaccctcctgcccacagaactcctccaaggcccgcctcaggtccctggagagcttgcacagctttgtggcagccgccactaaggagctaatgtggctgaatgagaaggaggaggaggaggtgggcttcgactggagcgaccgcaacaccaacatgaccgccaagaaggagagctactcggtgagcggtggcccagctgccctgaaccccacagccccctccccagctgtgccctggccgtcccctatggtcagagaccagtgggggccctgggtcgagtttgctgggagcgtggcagagccgggtgtggccggccgtccctgagaccctttgctctggtgccaggcgctgatgcgggagctggagctgaaggagaagaagatcaaggagctccaaaatgctggggaccggctgctgcgggaggaccacccggcccggcccacggtggaggtggggctccctgggtaggggcggggctgcggggggggccgtgccgggtccccaggcggggcggggcggggcctgaccgggacctgctgtcccgcagtccttccaggcggccctgcagacgcagtggagctggatgctacagctgtgctgctgtatcgaggcacacctg

SEQ ID NO: 16432 - DNA, 1192 bp, Homo sapiens
agtacatggccccgggggcagggggctgtgggctgggggcacccccacagcgcctccactaggcaacttcagacacgttggggcagggaggagggcaggaggaacagggatgagtgccagctggccgcctcggggtggtggagttcagggcccagccccaccctggtgtccttcagaagcaccaccacttgatctcaagactggagggcccgcgggctgctggtcctcacagccaggtgcatgtgccctctgtggacgcctccggaggggcctggtggggagggtggctgcagggaaccccagctgcctggcaccctcagctctgcgcagtcctctgtgctgtgcccctgggcttctgggtgtgggggtggcagggtgctctcagctctgcccatgtgacagtgtatttttcagggtgagtgttgggggggtccatggttgctgggatgtgtgaggagccggcctgtgcacccgcctgtgtggtgtggccgctggtcttgtcccacccacctgaccagccacctgcttgtcccaggcccctgctcatcgacatgaacaaggtgtaccggcagaccaacctggagaacctggaccaggccttctctgtggcggagcgggacctgggagtgacgcggctcctggaccctgagggtacgtctgcgtggccttcctccctgtcccttcccctgctgcctgccccagagccaccgctgagctgcccttccctgcagacgtggatgtccctcagcccgacgagaagtccatcatcacctacgtctcgtcgctgtatgacgccatgccccgcgtgccggacgtgcaggatggggtgagggccaacgtgagtggggggcccggagggcagggggcttgggcctggacgccccgacgacccctgacagccgcccgtgcctgcccgcaggagctgcagctgcgctggcaggagtaccgggagctggtgctgctgctgcttcagtggatgcgacaccacacggccgcctttgaggaacgcaggttcccctccagcttcgaggagattgaggtgggcctgccgtggggggcggggtcctgggcctgccctgagagcccggcgtggttgccgacagcctcgtccctggcagatcctgtggtctcagttcctgaagtttaaggagatggagctaccagccaaggaggccgacaagaacaggtccaa

SEQ ID NO: 16433 - DNA, 1108 bp, Homo sapiens
actgtggatgcagctgcatgaggctggaatgggccttgaggagcccgggggtgcccctggccccagtgtaccccttcccccatcacaggtgatggcacccccttctgttgttggaatgggcttctggggtctgactggtgtttagtgttgcaacttagcctcagctggtgggatggtggtggtctttggggatcccctggccccagggtccatctccaagagcctgtgtgccctgcagggtgtggggctggcctcgctcgtggcacctctgctgatctcacaggccatgggactggccctctatgtcctgccagtgctgggccaacacgttgccacccagcacttcccagtggcagaggctgaggctgtggtgctgacactgctggcgatttatgcagctggcctggccctgccccacaatacccaccggtaagaggctgggctggttgttgggggcaggggtagaggtcccctggacatgcagacagcttgtgggttgcctctgagtcctttgtcttacagggtggtaagcacacaggccccagacaggggctggatggcactgaagctggtagccctgatctacctagcactgcagctgggctgcatcgccctcaccaacttctcactgggcttcctgctggccaccaccatggtgcccactgctgcgcttgccaagcctcatgggccccggtatgtatggatcagccccacttcccccaatgcctgtgccctcatcacagaccgcaccctcattcagtagccctttcccccaacctggtgcccatgcccccaccatggagcctaccttgatgttgcttctccacccaggaccctctatgctgccctgctggtgctgaccagcccggcagccacgctccttggcagcctgttcctgtggcgggagctgcaggaggcgccactgtcactggccgagggctggcagctcttcctggcagcgctagcccagggtgtgctggagcaccacacctacggcgccctgctcttcccactgctgtccctgggcctctacccctgctggctgcttttctggaatgtgctcttctggaagtgagatctgcctgtccgggctgggacagagactccc

SEQ ID NO: 16434 - DNA, 3317 bp, Homo sapiens
aagcgctaggacccaaggcgcgcatcacgcgtcgggccatgagtcaagggaatgaaggagaacagggtgctcagcctgggggcccagcctcccgctgtcacgcgctgcctgcggccgagacccctgcccgcgccctctgccgggctgccctccaagccgccctttctctggaggtcctcagcctgcaggggcaccctccacccggccatcgcgcagcctgggaaggtggagaaaaggagcgtcggggtctcggaggcggcgtgggaaacgccgggcggagcgtggcgctgtcacggcaacagagagacgcgacggggccccgccccaccgccagtttccacgacaacccgaagagcgtggggaggcaggcggtgccccggcccctgactgacgcgaccgggaccagcgcgcttcgtccccgcccacccgacaggccccgcccccgagcccggccccgccccgcgctccccggctttcgcgaggttttgactctcgtggcgccccaggggccgacgggagtggcggccgcgcggaggaggccaagatggcggcagctgcggcttcgcttcgcggggtagtgttgggcccgcggggcgcggggctcccgggcgcgcgtgcccggggtctgctgtgcagcgcgcgtcccgggcagctcccgctacggacacctcaggtgagcgctgggccgggccccggcctccgcgcggccccgcatctccgtgaaggtcacggcggggaggctgcgggcgcgggcctgggcagcgcggaagcggtaccggccacccagcgtccccggtcccagctgcctgccgaccttgagcgtgtgggatcagggctgggcgcccacctctccgaacggcagagagcccgtccccagcgtgggggttggcgggacgggctagctgccgtggcggggctggggctttcccgaatggcgcgcccaggacggctcttgcggctggctgtccaaactgggcccgcgtcctgaagtgaccccagcctgatctcggccagctgcttgtgaccttggcctgtcccagcacccttggtcacttcggtctgatccccggctcaggatccaggaacaccctctcctgagagcgaatcacggtctaggggtcagcggcggagagggatggggtgggtagtgggacagggtgtgcgtctggtgccctgcaggaggaggccattgctgggtggagaggtgggcgctgagagtcagatccccaggtagggctgggtggtgtcctggcaggcgctgagcggagatcttgcaggcagtggccttgtcgtcgaagtctggcctttcccgaggccggaaagtgatgctgtcagcgctgggcatgctggcggcagggggtgcggggctggccatggctctgcattcggctgtgagtgccagtgacctggagctgcacccccccagctatccgtggtctcaccgtggcctcctctcttccttggaccacaccaggtgtgcagctggctggctggctggcagcgggaggttctgggtggagctggtaaggtggaatcttcagctttcctaaccctttccctccctccagcatccggaggggtttccaggtatataagcaggtgtgcgcctcctgccacagcatggacttcgtggcctaccgccacctggtgggcgtgtgctacacggaggatgaagctaaggagctggctgcggaggtgtggggtctggggatgcctgggacccagggctcagggctcccactgttgagatggcagggttgtgatgaggctctcggtggcaggtggaggttcaagacggccccaatgaagatggggagatgttcatgcggccagggaagctgttcgactatttcccaaaaccataccccaacagtgaggctgctcgagctgccaacaacggagcattgccccctgacctcagctacatcgtgcgagctaggtacacgggctgcccatggggtggtgctggagagatgggggaagggctgacttgtgcttggaactaaggagccatggatctggtcctaggcatggtggtgaggactacgtcttctccctgctcacgggctactgcgagccacccaccggggtgtcactgcgggaaggtctctacttcaacccctactttcctggccaggccattgccatggcccctcccatctacacagatgtcttagagtttgacgatggtaagaggcctccagtctggcagtgggcatgtggaatacttctccactacccccagggatgctttccctgtgttcctgggtccaggaggtcctgcccacttcttgtctggggcgtcttctgtgcatgtctcaggaggcttttgggctccttcagttttgcgtatgtccggtggagggtactgcccctttgatgccttgggtaggggcagtgtctgcttcacagagggggggcatgatcccaggttggacatgagcctgagaatagccctcactgcttgtcgttggccaggcaccccagctaccatgtcccagatagccaaggatgtgtgcaccttcctgcgctgggcatctgagccagagcacgaccatcgaaaacgcatggggctcaaggtaaaagggttgggaggccatggtgggtatcagagaagggctgggagctgggcagggctcctccccactcccttctctgagccttccttgtctgcagatgttgatgatgatggctctgctggtgcccctggtctacaccataaagcggcacaagtggtcagtcctgaagagtcggaagctggcatatcggccgcccaagtgaccctgtccagtgtctgcttgccatcctgccagaacaggccctcaagcccaagagccatcccaggcctgttcaggcctcagctaagcctctcttcatctggaagaagaggcaagggggcaggagaccaggctctagctctgggccctccttcagcccccatcatgggaataaattaattttctcaatgtacatatttgagttattatatggaaagagtgcacgtttgcaaggaactctgataccaagacccttgccttcacaaggctcccaggatgtcccatgcagtgtggccagcaatgccctgcactgactggtagctgggagtccagacagtgggtgtgggacagaaagcggagaactgcatgttagaggaagtcagcatttggtggggtggggtgtgtctgagcacagagctgaaaagggcctagccaggcaggatgtggcccagggacctgttggaatgaacagccaagtgttaaggtgttgaaccacttggcccccattctgatggcagcagggaaccttggctgcatttt

SEQ ID NO: 16435 - DNA, 1173 bp, Homo sapiens
cctgaaactggtttccctgcctcccctcagtggctccacctacacaccctcagaggcaggcaacgagctggacatggagctgggggaggaggaggtggaggaagaaagcagaagcgggggcagtggggccgaggagaccagcaccatggaggaggacaggtgtgtgatgggggccatgacccgggtccttgaagcctggagtgggtacaacagggtgggggcctcctctacttggtctaagtggtggctcctgaaggcccactgtgtgccaacctccgcccagggtcccagtgatctgtatttgatgaggaggagccgaggccccagcttcatccagcttcaaccaatgcctggacctgtccacctgagaggcccctggggcctccccagctgctggccagaccctggcgctgccacagtcctggcactgcccaaggccatacctgcctagccctttggctccatcctgtggatgcccactcacccctcagactcctgctgcccatgctgtggccggacttgtcagcagggggcctggtgggaggagcgactgccctgcccaaatgaactgccacagcagggacagctggaccgcagagtttatttttgtatttctactgggcctgcacactccagcccaaagggtctgtggccggaggccccacgagcaggccccagcagtcaccggctctggtcttgggccggccccggtgcccacctgtacccccacctcgcccatttggccgcgtgcactgagtgtcactttgctgcagctcgtttctttccaataaaagtttctgtgacttagtgtggacctgatgcggtgtgggggtggggcctgcggtgtgggagtggccggcggcatctggtatcctagcaactgccgctgcgggccgtgaccgctaagtcctgggagctgttgggctctgggaccgcagttgctgaaatggaggcagaggtgtgggaggcagaaggctacaacctagttctggactcggacctgtatgatgcggatggctatgatgtcccagaccctgggctgctcaccgaaaagaatggtgagggggcctggcctcgccctccgggcatcccgctaggaagtgggtctcattcgggcttgggttccgtcccctggaacaaaactcccctgggcagtccctggtagggcagggc

SEQ ID NO: 16436 - DNA, 1173 bp, Homo sapiens; identical to SEQ ID NO: 16435

SEQ ID NO: 16437 - DNA, 1202 bp, Homo sapiens
tctccgagacgctgaagagcttctgcctggagcccgaggcccgcctgcaccctgccgggcctgctcagctgcccggagagccgccgccgctggaggagaccgactggtcgcactcgcagctgctggacttgggccccatcgacgcgctcaacttcttctgtgagcagctgcgggcgcagcagcggagttcgctccaggagaaggctgcgcacccacacccgccagagccctacacggtggcgccggtgcccgacatggtggtgccacctccgcgggagcactggtgcgcggggcctgcgccggcggggcctgcgtggggcagccaagcgtggggctgggccagctgaaccctcctctttgcctccaggtaccaccccatcctccggctgcaggaggccaagccgcagaggtccgcgaggtccgcgatgagactgaggggtgagtggagccaggggtggagactggaccccacccaccccagcccccgggcctcataagcctccgcccgcccccaggccccatgcggtcccggctctgtgcgggccgcaccctggacggccccatccggacgctgaagctgccgttgccgcgtgtggagccgcagcctttccccctggactggcctatgcccccgcgcccgctgcccccgcggctcctgcagccggccctgcagcgctactttctgccagcggacgcggaccctgacacctacagctgaccggactggtggcctcagcccgcctggctctggggcctgtcattggtatttggccaaggcctgcatcgggaataaagtccagagaatttctttctgcaggatgccgcctgctttggagggccccggggtgcgcacggcgtgtgggcgtgcggcctgaacccacagtggcggcggaaggcaggagccggaggcctggcggaggtggccatcgtgggcaccagcgttcccggaggggtggccggcctagggcagaggagacccatagcggggtaccatccgctgggcactgagcaaacgttttctgctcaagtactaggtgttgagatgcgggctgaccttagagaacgtgtcctgggccagcccacagcctggtgtggaggggagtccgggagggcctgggcggtcccaggatgagccttccgggtcgatgcaggtgagaccaggagtttgcagaccttgctttcgttacttttattctggcaaa

SEQ ID NO: 16438 - DNA, 1169 bp, Homo sapiens
ggcggacctgcaggcggcggcggtgcggcacgtgctggcgctgactggctgcggacccggccgcgcgctgttggcggggcaggcggcgctgctgcaggcgctgatggagctggcgccggcctctgccccggcccgggacgccgcccgcgcgctcgtgaacttggccgccgaccccggcctgcacgagacattgctggcggccgaccccgggctgccagcgcgcctgatgggccgcgcgttggacccgcagtggccctgggccgaggaggcggccgccgcgctagccaacctcagtcgcgagccggcgccgtgtgcagcgctcatggcggcgctggcggccgcggagccggcagactcgggcctggagcggctggtgcgcgcgctgtgcacgcccggctacaacgcccgcgcgcccctgcactacctagcgccgctgctctccaacctcagccaacgccctgcggcgcgggccttcctactggaccccgacaggtgaagcccagggcgcccgcgcgggcggggaggggacggaagttaggggggacggccctaagtgacacctcccaacaggtgcgtggtccagcggctgctgccccttacccagtaccccgactcctctgtacgcaggggcggggtggtggggacgctgcggaattgctgcttcgagcaccgtgagtggtgggtgtggcgggggtgcgttgccaggtgtggggactggactccggggctgctctggaccagtttccattcccgtctccccaccctcaccatccctcaggacatcacgagtggttgcttggacctgaggtggacattctcccctttttgctcctgcccttggctgggcctgaggatttctccgaggaagagatggaacgtgagtggctagtgtggagcctcagagttggccggagaggagggaggccagtggagggagagagaggtgtccaggccacaggctcctgaaactttgcagcagtgagttgctgagcacaggtgggacttacacaggcagagcctggctcagctgcccagcccagggacacagtggctcccacacactcacccctagggctgcctgtcgacttgcagtacctgccaccagacaagcagcgagaacctgatgcagacatccgcaagatgcttgttgaagccatcatgctggtgag

SEQ ID NO: 16439 - DNA, 1060 bp, Homo sapiens
tgctgactccttcttctcctagtcaggtctgctcttaagcccctctggttaatttttttttttttttttttttttttttttgagacggagtctcactctgtagcccaggctggagtgcaatggcgcgatctcggctcactgcaacctctgcctcccgggttcaaacaattctcctgcctcagcctcctgagtagccgggattacaggcatgagccaccacacctggctaattttgtatttttagtagagacggggtttctccatgttggtcaggttggtctccaactcctgacctcaggtgatccgcctgccttggcctcccaaactgctgggattacaggcgtgagccaccgcgcccggcccctctggttgacttttaatctgagttattatactcttcagctccataattttgatttcgtgcttctttacaatttttatctctttattgatactctctgataagatgtcattctcatactttagttcttcagatgtggtttcctttagttgtttgaacatatttgaaatgattgacttaaaatctttgcctcgtaagtccagtgtccaatgttttggcttctttggggacagtttctattgattgcctttttttttttttcccgtgtatggggtatgggtcctagcttcttgtttctttgcatatctctatttttttttttaactagagttttttgtttgtttgtttgtttgtttgtttttgagtctgttacccaggctggagcgcagtagttcaatcacagctcactgcagccttcacctccggagctcaagggatcctccctcctcagcctcctgagtagctgggatgataggtgtgcgccaccacgcccacttaatttttgtatttcttctagagacggggttttgccatgttgcccaggccagtctccaactcctgagcttgagcaacccacccgcctcggcttcccaaagtgctgggaccgcaggcgtgaaccagcgcagccggctggaaaactggaactctcatcggttgagagtggcagctctggagctcggactcccccacctccccagg

SEQ ID NO: 16440 - DNA, 1218 bp, Homo sapiens
caaggagatgcagctgtacaacagcatcttcagcctgctcagcttcgagaagattggctacacaggtgaggcgccccgccgcctgctgcatgccacacaggtgtgggttggggggctggcagccaggagtctgggggcagcaggctctgggcactgggcactgacagcgccggacagccgggctctggacaagctcccggtggacaggtggacacctcggtcgagaagacaggccggagactgagtggaaggaggggccgaggcagaccccaggtgcacacctgtgtggctctcacagcagccccgcccacctgtcctcgccaccctggcttcaccatccctgcaaggtggcatctcactgtggggctccagagcctcaagacagtcagggtctaaccagaaagtgggcaggtctcagggggcctgggagctaggggcctgcccctcggaccctggggcaagaagagcaccctgccgagtgaggtcctacctgcaggcagtcactgccccggccatgggcctctcaaggctggcacgaagccattcagggagagggctccacaacaagctgagggtgcccgactcaaactgtagaaccgggagtggacacccacagacgcccaggctggatgcgtgcgcaggcacactggatctcgtggctctctgggccgctgccaccgcctttgaacgtgtcggggagcaggagccaggccagagcctggcccagaggacagcgagaagcacctgttgatgctggggccactggaggaagctccatccctctactctcagcccacaccaggcggccagctcagagcaccaggcgtggcgcaagcagggtggtcgtgggcagccagtcccgccctgctgcctggactgtgcccagcgggatgtgggcccgagcaggccagagaggccgagggcctggggtctctgcggcagccacagcccgtggtgagtagcagccttagctgtcctggagataccggggcctcgtggagtctaggcaggctggggcactgtggctgtggccgtggccaggtgagaagccccattcgcgcaggaaagactggccacctgggaacccacgcctccacggagggacttgccggccacaggctgtgggctgcccaagaggactgtgcaggcagggctgcctgctgattggcagctccggatcaggcccggtgcctgcagacctggtgctcccctcgggca

SEQ ID NO: 16441 - DNA, 1199 bp, Homo sapiens
gccccagtgtgggagctgcatccgctccccacctgacagtgatggccaagagcccagtgttcctggagggctcccaaactctggacctgtaggggggtcagggcagtcgctggtccctaagggaaaagcgtgaccctcggccccaggtggctgaacccgtcactgccagggcgagctgtcacctctgtgagctgatgaggccttgcttttaggacctctaatctctgcaagaacccaagctggctctgcctgtttctcctgagcagctcgcagtgttcaccacactccagcacgactcgggacaggcacgtgcgcccctctgcaccagctggagtccctcaggacacctggctggagctgatgggcatgggcgggtgtgtgcgagcatgagcccgcaggtctgtgagcttcgtctccctttccttcttcgcagtgtactaatggtcacttgatgtgcgctggctgttttatccacctactagcagatgcccggctgaaggaggagcaggccacgtgccccaattgtcgttgtgagatcagtaagagcctctgctgccggaacctggccgtggagaaagccgtgagcgagctgccttcagagtgtggcttctgcctgcgccagtttccccgctccctcctggagaggcaccagaaagaggaatgccaggacaggtaactgagggtcaggggcttagccttacaggcggggcccaggactgctgggagcccaccctggtgcagcagggccctgtgcagggtggtctggctgtctctgctgtctgggccttggggaccacctgtgtagcccagtgacggccctgtgggagggtgcctgcacaggatggggacaggtgggttttgcacccagttgttatccggacatgagcctagccttccagtgctctttgtggctgtgggggagccccttgaagggcccaggacagcgtgtccaacgcaggacctcagggagcttggtgtgagggtacactgcccatggctacccatccagtggaggcagccaccaagtctcctgcagtgaggctgtgcaggaccaccactgccaaacagaggagagaaccacgccatggtgcggggcacacaggctcaagcttgcactcttccttcccctctctctccctttttctgcctgtctcctttctctccacatgctgccactctgacctcatcctggggggtgg

SEQ ID NO: 16442 - DNA, 1282 bp, Homo sapiens
ccctcgctctcccattggctctagtccctgcgctttcttgccccaagcggcgctcccattggccccgcgtggggctcacgtgacggggaagacgagggggtggtggcggcggggcggggggaagcgcacagcgaaaacaaagatggcggccgtgccggggtcggtggccgcggcggctgtggggctacgcgcgggccgggcccactgaggcggcggcgcagggagcggggctgcgggttcgcggcggcggcggcaggagagcggcgggagcgcgcggcgcccctaacttctagtcgggggagcgcgccggcatccgcccgccgggccggccggccgctatgtccggcgccgaggaggccggcgggggcggcccggccgcggggcccgcgggctccgtgccggccggggtcggggtcggggtcggagccgggcccggggcggccgccgggcaggcggcggcggcggctctgggcgaggcggcggggcctgggctcccggacgaggcgggcttggcgggcgcccggcagctacagctgcaggaggcggccggcgaccccgacgcgccgcccaagaagcggctgcgggcagccgaggcggccgaggcggcggcggcggcggcggcggccggcagcgggaaactggaggagcggctctactcggtgctgtgctgcaccgtgtgcctggacctgcccaaggcctccgtgtaccaggtagggccgccggccgaccccgacccggcccagcccggggctgcagcccccgccgcggggccccaggatccgcgtctcctcggaggccaggcctgcggggcccggcggccgggaaccctctctggcccttacagccacttcctcgcccagcggggctccagcggctgctccgaagctcctcgttgtctttctctcagggctttattttccgctcgggaccccccttttctgttttctgatccacggtacttcccgatctgaatcgcttgtcttccgcttacctctcccttcttttttctagacttccccacggtcccctgaacactctcccaacccacagcctcaaactgatccttagcccgcaactgctccccgcaacccacccggtcccaagctccctgggctcagagtcctgtgctcgagagctccttccccattcttccggcagccacacccccgagtttgtccctccactcctgaacatcctatggacgcctccttttctaccctcctgggtggaagaatcctttctcttggtccatttccagttcatcctgaagaacagtaaggag

SEQ ID NO: 16443 - DNA, 1400 bp, Homo sapiens
agccatcgggccctcaaccctctccccagagcctagggcctggcctctccacttactgcagggcaccgcagttcctgggggacggtccagcgggggacacagggcctccctctgggggcagctgcccacctcctacttgcctatctacactcccaatgtggtaatgcccttggcaccaccacccacctcctgtccccagtgtccgtcaaccagccctgcctactggggggtggcccctgaaacccgagggcccccagggctgctctgcgatctagacgccctcttccaaggggtgccacccaacaaaagcatctacgacgtttgggtcagccaccctcgggacctggcggcccctggcccaggctggctgctctcctggtgcagcctgtgaggctcttaagacaggggccactcctccctcccgctcccacccccaccttgttgacagggagccaaggcgaggcggctgtctgcgaccacagcagcctcgaaacaccaggcagcagccttgctgggagtccacggtgtttattgggccaccccacgcatggccgtggcccagctgggcacaaccctcaccctggtctgtcatgcctgtttttcctacactcagcggcaaagctgcaggagcagggctgagcctggaatagcccttcctagtcccctcttctcagcccactacccatccatcagtcaccagccgtcacctcccctcccgtgctccaggctgggggagggagagcccagtggtggatccagcctgaagtcctgccctctctcatctgtctggaaaggaggtagcacctttttcgggaaacgggttagggagtaaagactgcaccctacatggtcctggtggtgggggggataacagtaaaggaatttgcaacgttttaatgccatgcctgatttttgggtcaggagtggtgacttgggtaaccacttggcgggggggcctgggattccctgctgtgtgccgtgataacagcaaatggtgataaggagaaagccaagacctgtggcctgatgcagggctgggggcggggggtgatcacttcagcaggcacaacacacttcactggctgcggaggtggaggggtgactctgggagctcaggggcaatggatccaaagaggctagggagcttgtgccctgggagacggggtacagggactttactaccgcctctgccagcagagacctggcctgagaccccatgggcagggccgcgacccaggactagaggggcaggccctctgcgggcgcgagagccgagcccgagccgttgtcgggactggggcatggaggactgccaggggacggcgtaggggtgcagggggtcccggtgagcggagtgtcggtgctgagggaagaaggcgtcccggaggagcgcgggaccc

SEQ ID NO: 16444 - DNA, 1121 bp, Homo sapiens
cgctctttcgcctcccgagcggggcctgctcctccaggtcggatgcgtctcccaccagggcctgacgccgctccgaccggcccggggactcccagtccttcccggcccgcggtggcacctcccaggctcccggcctcggccccgggctcccaaatgcagccactgcctccctcggccaggccgccccgagcgaccggtgccccgccccttgaggccaggcagggccaggggcgtgcgccgccccgctcagacacccccccggccgcccgcgctcaccggtcccgcaaccgcagccaccgcctccagccccgcctagaccgtccgccgctccccgcccggcgccgcggcgccccgcgatgacgttgacgcctcccattggctgcttgtccgaggcccgacggactggctgcccaggggcggtggccccgcccccggcccgccgcgcatccgcattggctgtcggcccccgcgacggctgcgcgggagattcgctggacgatcgcaagcgcggaggccgggcgggcgcgcgcgccatggagcggctgcgggacgtgcgggagcggctgcaggcgtgggagcgcgcgttccgacggcagcgcgggcggcgaccgagccaggtgcgggctgcccaggggccgaggggctgagggcgcggcccgcggctgacgcgttccctttacaggacgacgtggaggcggcgccggaggagacccgcggtgagcgcgcggcggggcggcgggggcgagaagacaccgggtcggcaggggcccaggccccaccctgaccccgcctcccgctcgcccacgcagcgctctaccgggaataccgcactctgaagcgtaccacgggccaggccggcggcgggctccgcagctccgagtcgctccccgcggcggccgaagaggtacccaggccccgccgccccagcctcctcccacttccctgtttggcggagtggcgggagccacggagtcgcggccaggccgccgtggggcacagaacttgggagggggactgggcaaagtgaagaagggccgggcctcgctccaggtgcgggaggggtggctgggagcgcttctgccgccacaacagccttttctggcctgtgcccctgttgtctc

SEQ ID NO: 16445 - DNA, 1241 bp, Homo sapiens
ctgaagtccctctcctgcaggtggccgtctgcccggcccagcaccatgcacacgcttgtgttcttgagcacacggcaggtgctgcagtgccagccagctgcctgccaggccctgcccttgctgccacgcgaactcttccccctgctgttcaaggtggccttcatggacaagaagacagtggtactgcgcgagttggtacacacgtggcccttcccgctgctcagtttccagcagctgctacaggagtgtgcccactgcagccgtgccctcctgcaggagcggcctagcactgagagcatgcaggctgttatcctggggctgactgcccggctccacacctcagagcctggggccagcacacagcccctctgcaggtatggacttatctggagggtcgtcaggccaggggtgtgtaagtgggtcccctgaggaggcttgggtcataaagttagcaagagctcatgcaggagcaggcgcgttgctcctgtcccaaggtggctgggagggggtatgggcgctgcccctccaccccttcctcacaccattcctactcccaggaagcatgcgctgcgggtgctggacatgacgggcctcttggatgatggtgtggaacaggatcctggcaccatgagcatgtgggactgtactgctgccgtagctcgcacatgcattgcccagcagcagggtggggccgcagagcctgggccagcccccatccccgtggaggtgcgcgtggacctgcgggtgaaccgggcctcctatgcgttcctgcgggaggcactccgaagcagcgtgggcagcccgctgcggctctgctgccgggacctgcgagctgaggacctgcccatgcgcaacactgtggccctgctgcagcttctggatgcaggctgcctgcgccgcgtggacctgcgcttcaacaatctgggcctgcgcggcctgtctgtgatcatcccacacgtggcccgcttccagcacctggccagcctgcggctccactatgtgcatggggattcaaggcagccctccgtggatggcgaggacaacttccgctacttccttgcccagatgggccgcttcacctgtctgcgtgagctcagcatgggctcctctctcctttcagggaggctggaccagctgctcaggtgagcgggccccaccactgccctgcccctcccttctgtagggaccctccctggctctgcctgtctgtgacccctgtgtcccctgtagcaccctgcaga

SEQ ID NO: 16446 - DNA, 3353 bp, Homo sapiens
acaccttcagccgcgtctcctggtgcgcctgcgcgggggccctggaggaggagaagtaggcggggccggcggccgctggtgactacaagccccggcgtgcaccgcgctaggctggccgtggcgcgcccggaaggtgtcgcggccctgggccccgccccggaagataaggccgctcgctgacgccgtgtttcctctttcggccgcgctggtgaacaggtaggtcatccttgcggccttgcggcatgggcagtatccgccgccatcctcttccgtgaggcgcgctgagacccggaccggccctcctgagaggatgccggtgcgggcgcccgcggagagggtagggagtggtgggcgcggcggcctcgggggcggggtcccggaaagccgggctggcgggggtacccgggccgcccggccgcgctaatcgtgagtcgcccccaggacccgtcgccatgggccgtgtgatccgtggacagaggaagggcgccgggtctgtgttccgcgcgcacgtgaagcaccgtaaaggcgctgcgcgcctgcgcgccgtggatttcgctgagcggcacggctacatcaagggcatcgtcaaggtgcggaacgctggccggggcgggaggggaagggacgcccggccggaacgccgcactcacgccgcctctgcccacaggacatcatccacgacccgggccgcggcgcgcccctcgccaaggtggtcttccgggatccgtatcggtttaagaagcggacggagctgttcattgccgccgagggcattcacacgggccagtttgtgtattgcggcaagaagggttagcatcgcggcggggaaggaaggtcggggtggggaggggtctgggtgttgcctgaggagttaacgtcctaagccgatatgggaacctcgcaggcagaagcttcaggtggggacatccgcgtggccagaccagtggccaccggtgggtgccgagagagttgtaccgggaggctggatgttgaatgctgtgctcgcaacttcgcgggttgcctagagcgagggggttcgcattgtttcttactgtgctgacggcctgatgctgcttccccttgcagcccagctcaacattggcaatgtgctccctgtgggcaccatgcctgagggtacaatcgtgtgctgcctggaggagaagcctggagaccgtggcaagctggcccgggcatcagggaactatgccaccgttatctcccacaaccctgagaccaagaagacccgtgtgaagctgccctccggctccaagaaggttatctcctcagccaacagagctgtggttggtgagtatcaggcagcagttgaatgctgagggctgtgggtgaacatgctgtgagtgccggtggacagccagtggctagacttggtccctggaattcgattacctgttgttctaaaacttgggttctgtaagtttgagctcatcctgtagtctcagttgtcatcactgtacaacaggcacaacagtacctgctttactgctgttgaggcgttaaatgagattgggacgaagtcaccagggtcttggattctaccgtgggcttcctgattgctgcacttgcatgcagttggttaacagcctttttagagaaggcagggagagattgtggctttctcaaagacgcctactgagtgagtgaaaaaggatttgagtctaggttaactcactgtgctgtttgggaacatcttggaatccttgtgatgaactcagcctcgcacaggggaggctctgaggttgtgttcctggaataagtaaagctgagatggggcaggctgaatcaagtgtcttacgtcaggttgagtggccggcctgacgtctcacacatggtgaggggggtgcttccctgcgcttggagctcagccagcattctaggtgatggaggtgagggccttggcttgcctgcccattgtggattgaagaaactggatgtcagctcacagggtgcaaggggctccctagggtggaggcgagtgggctttttgctgggtagttggatgcagtattgggaaggtgcatgacaggagattgaggggaggtgggggtgctctgaccgactgggggttccctgaggtatctgatcccctacaggtgtggtggctggaggtggccgaattgacaaacccatcttgaaggctggccgggcgtaccacaaatataaggcaaagaggaactgctggccacgagtacggggtgtggccatgaatgtaagtaacccagaaatgcagggttgggtattgaagttacagtggccacactgttgggtaggcaagtcccatccacaggtgtccctgcaggagggggatctacggtgggaggagcagcaggtggtggtttgtagtcacgggactgttgatcctgctccagcactcctgaaggaggtgggctcaccctccttcaccgtttctccgcaagaaacggaggctgggaggggcagtgggggcctgagctggaaagagtcagcctgactggggttgtctagcggcacatgctgtggagaggggcttcgcggaattgggcccctgacgggtgggaccccgaggccgggggcgggggtggtggggaagaggtttctaaagccatctttctctgcctgcagcctgtggagcatccttttggaggtggcaaccaccagcacatcggcaagccctccaccatccgcagagatgcccctgctggccgcaaagtgggtctcattgctgcccgccggactggacgtctccggggaaccaagactgtgcaggagaaagagaactagtgctgagggcctcaataaagtttgtgtttatgccacctggctgtgcccacccccatggtttcaaagggaggggtccctgctgggaggatttctgtgggatccccctggttggtactgggagggagttagactactgaagtagaccaccagtgagtggtagaagcttgaagggaaagtccacaactagaaacggggtgcaggtaccctgggcaagacccttgcttccccacagaggggaccaagaatgtggcatccaggacctgacacttatgtgggtgactcagtcccatggcctgcagtgcttggatgtgaacactcatttcacgtatcaggaaacagaataggacacaatcgttgagcctggtgttctggaccataccctcactctgtcagctccctgctaactttctcagcacctgaggcagtcctttgcccagggtcttttagcgacaccctttccctccatactggctacagccctgctgatgtcagtgtgtttaagtcactgccagggatacctggcttgcaggtgtctgccttgcactgggaacttgggatgggccctgaaggaatgt

SEQ ID NO: 16447 - DNA, 2094 bp, Homo sapiens
gtagaacagagcacgcagaggataaaggagttccggcaacttacagcagacatgcaagccctggagcagaagatccaggacagcagctgtgaggcctcctcagagctcagggagaatggagagtgccggtctgtggctgtgggtgccgaggagaacatgaacgacatcgtcgtgtaccacagaggctccaggtcctgtaaggatgcagctgtagggacacttgttgagatgagaaattgtggggtcagcgtgacagaggccatgcttggagtgatgactgaagctgacaaagaaattgagctgcaacagcagaccatagaatccttgaaggaaaagatctatcgcctagaagtacagcttagagaaaccacccatgaccgggagatgactaaactgaaacaagagctgcaggctgctggatcgaggaaaaaggttgacaaagccacgatggcccagccgcttgttttcagtaaggtggtggaggcagtggtgcagaccagagaccaaatggtcggcagtcacatggacctggtggacacgtgtgttgggacctccgtggaaacaaacagtgtaggcatctcctgccagcctgaatgtaagaataaagtcgtagggcctgagctgcctatgaattggtggattgttaaggagagggtggaaatgcatgaccgatgtgctgggaggtctgtggaaatgtgtgacaagagtgtgagtgtggaagtcagcgtctgcgaaacaggcagcaacacagaggagtctgtgaacgacctcacactcctcaagacaaacttgaatctcaaagaagtgcggtctatcggttgtggagattgttctgttgacgtgaccgtctgctctccaaaggagtgcgcctcccggggcgtgaacactgaggctgttagccaggtggaagctgccgtcatggcagtgcctcgtactgcagaccaggacactagcacagatttggaacaggtgcaccagttcaccaacaccgagacggccaccctcatagagtcctgcaccaacacttgtctaagcactttggacaagcagaccagcacccagactgtggagacgcggacagtagctgtaggagaaggccgtgtcaaggacatcaactcctccaccaagacgcggtccattggtgttggaacgttgctttctggccattctgggtttgacaggccatcagctgtgaagaccaaagagtcaggtgtggggcagataaatattaacgacaactatctggttggtctcaaaatgaggactatagcttgtgggccaccacagttgactgtggggctgacagccagcagaaggagcgtgggggttggggatgaccctgtaggggaatctctggagaacccccagcctcaagctccacttggaatgatgactggcctggatcactacattgagcgtatccagaagctgctggcagaacagcagacactgctggctgagaactacagtgaactggcagaagctttcggggaacctcactcacagatgggctccctcaactctcagctcatcagcaccctgtcgtctatcaactctgtcatgaaatctgcaagcactgaagagctgaggaaccctgacttccagaaaaccagtctgggtaaaatcacaggtaggtggtaccctgaggacctgggaatgaggaaggatgggggaaaatgtctttccagaagctaaggattattttttaactgctggaaccatttttggaggagaaatggagaaagttttagagtggtaatctgtagaatgaaaactaagaatcaaaatccataagcacctctgctgatgcttattatctggtagcctcactggcctctggctgaggactaacgctggaagaaaagtaaactggtgttggctggcctagaggttgtcttctggggctgctagtttggtaagatgctttattctttgtctttcagttatttacttgctcattatttatagaactgcctttaaaaaatcctaccctgtttgtacccactattaccagtatattagcaattgaaatactggcataaaatgttttcagttaaaacgtttatgagaggagagactccattaattcattct

SEQ ID NO: 16448 - DNA, 1100 bp, Homo sapiens
gtatagctagcttttcttccagcaatagtcactcacttgttcttcagatgaaacccaagtggagtatttggccttcacgtaggaaacaggctgaacaaaacaagtattgatcactcccctctcaaactccggtgaaacatggaacagtggtcaattcttgacacacacatggcttttcacatttttccccaagacttatgatcattaagtagaaaagacagaattagtcacactatcttatctcactaccaagcaggtatagttgaattcaagttaaatgcatgaatgatacaactcagtattcttttgtatctgactgacttttcttctaagcactctgagtgtttgaatgaccaactcaaaagcaaggtccattttaaagactagagttgccatcagtgagtgatcaccaagctcattctatacttcttcttttccacagatatcagttgtaagcacagatgatgatctagcttgacttctgtgacaaatgttgacctttgaggtctaaacaaataatacccccgtcggaatggtaaccgagccagcagctgaagtctctttttcttcctctcggctggaagaacatcaagatacctttgcgtggatcaagcttgtgtacttgaccgtttttatattacttttgtaaatattcttgtccacattctacttcagctttggatgtggttaccgagtatctgtaacccttgaatttctagacagtattgccacctctggccaaatatgcactttccctagaaagccatattccagcagtgaaacttgtgctatagtgtataccacctgtacatacattgtataggccatctgtaaatatcccagagaacaatcactattcttaagcactttgaaaatatttctatgtaaattattgtaaactttttcaatggttgggacaatggcaataggacaaaacgggttactaagatgaaattgccaaaaaaatttataaactaattttgtacgtatgaatgatatctttgacctcaatggaggtttgcaaagactgagtgttcaaactactgtacattttttttcaagtgctaaaaaattaaaccaagcagcttaaccatggtttg

SEQ ID NO: 16449 - DNA, 1237 bp, Homo sapiens
aagtggaatttaatgagtaccggggcagtggggggttcacagctgcctacctagctgttttatggattaggttccatgctagattttgtttgaaagccactcaggtaagttaagctcataggaggaaatgtgctaaatgaattaggggatcactgtggattgcggtgttaaagtcagggtcactgggaagttctccttgtctctgattttgggccttccaagtaaatagctccttgtgattagactttctcccttgagactgtccctaaaatgtcaaagcctatggagtttgaataagaaggaagaaggtggaaatttgttacgtgcagaagtttaactacagctaggatgtttgaattttaaaactgcagttgtttgagcaaacaaagcttagaaggattggtagctcagtcaggctcatgtagtcatgcctatgagtatctggctgctttctcaaagtagtctaacggggtactcactcaggtctgtcactgcagttacacctgctgaggaattggctgtgcctttcctttccagaccatggggtcccaggactactccagcctaccgactaccaggacccctcctgccacggtgtattgaatccttcccagactgcaaaagcgctgatggctgtaacttttgacatggattctcacatcacccaatataagggtgtgggtggagagctggaggaactgggatgggataaggaggtgaatggggaaaaggcaacagtagagcttgcatttgtttggctaatacattgtgatttgtgttctctgtataaagaagccattcagagaaagggggaaagaacccctgctctttgtttcatctttgaaactaagataatgtgtacataatttgaggagtacttttataaagcttatagcagaagcagcaatctaccccattcctctgcacccctgcctcaccctccccagaactactgattattcttcgctctgctaaatgtctaaatacatctatcagttgcaggtattttcttttgatttcctattacaggaaatgcagattaagaacttttaccatcactgttccccactcctcttccctcccttcccagtagaattgcatcatgtatgatgaaatcagtgttcagggtttaccttattatacctacataaatgttgttaaatattgattcaagtagtgagcagccattacatttcctctactattttaatttttctggaattagtcatttattttc

SEQ ID NO: 16450 - DNA, 1189 bp, Homo sapiens
tagacctgagtttagtttaccaattttacttaaatagtaaaagccacttacaaagtgactgcctaggatttttttttcctttcatttgaaataattgataatatgtttttttaaaaagaaaaatgtgttttgtctcttcttttatttggttctggtttgattctttttctcccctctttcctttgttttttttttttaaataaattatgatgttgggattggaagccctgagtaatgaaaatctttggtaagaattgtttatgtagctcaataacgaggacaacaaatattctttagaagaattttgattctggggaggaaagaaaatataaaaactcccattgactgttgataaccaagtaaatttttccttcagtaaattagtatttttgaagaaacgatcgccttgttttaacttgctaaacaacaattttaaatgacccaataaagaatctattgaactttattcgtttaaaaagcatcttttgtaccaaagcaaatttttttctctactcatttccatcatcaatttggacctatggtggtgaccaatgcattggttacagaaactttaagtgagtgccttgagaaaacttggaaatttgtgcctgaggtggtaaacttttaattaggttaattgtagtgcttaccaatcagtaacttcactatcactcagggctttcgtaccttctaggtaaaacttctttcattgtgtttttttaagatactgtatttttttttaagtgccatcatttaaatttcacttagtaagtggcagattacattattcagtcccacaagcacagaaacatagtaacactaggagatatttgaacatttattttacaatcgactgaatatattatgtaaatgaggtaagcaacttttgtagagattgtatgtgtgagataatgtaatgttcttttccagtttttggactacagttgaataaactttttaattatttaaaaacatctttaccgaataacatgtgatggttttttgtataatgtatttgattttgtaaatacgtatttcctgatgtgatttttgtgagaaatgctaaatcttttagtatatcatgtcctctcaaaattggcaggagctaaataatagtttgtgggcgatttgtattgtgtactgtacaataactggggaacttttataattataaaaatatatattaact

SEQ ID NO: 16451 - DNA, 1711 bp, Homo sapiens
tagcacggtttatgcacctctctttagatggtgtactttaaaaacaaaagtaaaatttagaaaatggttttaacactgcatacctaaaattagtagtgtgcagcattgactgcctttgatttgtagtagacaagtaaaaatgaatacgttcttgtagaatgctgtaaaagttattcaggaatgaatacggttttagtgccgtaatcatgaatctttttatatgaatgcactgtctaaaagtgctaaatgcattttcaaatttttaaaaattcctcagatgatatatttgaaatgtctaaaataatgctgtgcttgaaacattagtgtaaaaggaaaaaaaaaatagtgtcactgtgatgttggtcctccctgtgtggacacaagtagaaagaaaaaacttggcaagtcacctttgtgtacaatttgaggcagtggttatatacaataaattgacctttattatatcccccagacacacacattcttggtgagaaaagaacaaccatccagaaattgagatgagaacttttgtgatctgtatgaatcacagcagatcatgggggaggaggattggcatgcagtgctgttgaaaattgggcttgttgttagatcagaacaacctccatgtatatggttagaacgaatcaattaatggaatcctagtatttctgcaagtttggtgatttttaaaaactggaatagaagcattaattcagtgcttagttctagtattagaaaacccctttgatgtaatgccttgtattaaccctttgagcattgtaagatatacaatgggggacaaaagcctttcagatcatttatttagacttagaccggtaaagtatactctatatccaaatgtctaattatgctgtttttttaaaggggggggtaggaagagaaagtgtttccacgccgaacacttgcattttatatacaactcttaatttttcttcaagagggcttgatatatttattcccaaatattcactgccatctaagtaagtgtactgtttacagaaaaaaaaaatcaacttttctagtatcacaccatagtctctagaaaaggaggacaaatacatgggcctggatagacctatgtcataactgatttctgcacattgaaggtacctagattgcctttaaaaggtataaagaaagggttaagtttcttttttttttgtcttttttttcccaaaatgaatcaaaagatctcatttatttagctttagaaagtacaagtgtaagtaaagccttaggaagaaaggagttcgagtggattaagagaatctgaactctttgggggcagttaggctatttggagttagatcgctcataaaatattgtttgcgaatttcacacagggcataattttatctatgctccaaaactttaatacgttgtcaaaaaattatatatagatagaatggagagcaaagcacttgattttaagctcatctgtcaggagatgctatgactactgcttctgatatctctaaatgtcagtctgcttacaccattgctgattttgttcaagggaatctcttcgtgcacttgattccctctgttccctgcgtgatcgaacatgaaagcagtgttgtctgcagatgtgcttgcgctgccctagctgggtgcaaataagagtgtaacctattctgatgtctggtgaaaggacatccatagcatagtgcaagtatgccgtaaacgttgc

SEQ ID NO: 16452 - DNA, 1291 bp, Homo sapiens
atttttctctgaggaaaaaatgagctgtacatttatcagttcagagtaaatgacagaattgcaagagattatgctaatatgtacataatttgtgtacataattattaaaccatgttaacaatgcaagcttccgttaaacattgaattttaactattatttgcataccaattcctctgtttaaagactactgattctgtatttgggaccactgcacagatgcattctgctgttaagtgggggctgttatagttagatactgaagcagaaaaaaaagacttgactttttttttttaagtgtacatgctacttatgctgagctggacatacaggaaaccattccatttggatgactttcttttattccaggtctttttcctaatagtagttcaatatgctgctattataaacgagaatttatagaatgcaaggaatgtagcaacctacataacgttatttccttcaaaactatttcctggtttctaaagtatgtggatttaaattgtaaacagaacctgaaggcagtgtaactggcacacctcactgttacttatccccaattctgtaggatttggataggtggctggatggaccattgccattgaagaatgtacatcagggatcatcgtacctcggctattacatggtgccttaaaacagaactgaagctaaggtttagtaaggtttattttgttcatgtgactaactcttcaatccatttgacaaagtgtgcctgtcattttcagattcctgaagtaaggacaggtgacatgttcttcaaaggaaatttagggaaaacaaaggaaaacaaaaagacaaaaatcagtttccctctttgagtgaccgtggatctattttttattcttagagctgaatattacttgattacaaatcagattgcttaagggtgtggaatagcaggctagttttaataccaacttgttaacataaaatcatatatgttttagaccattcttatttagttacaattttagaaagttaacaaagtaagcaggtacttatcgaagtgcatcttttcagtctaaatgtttgtctgtgtgtctaggtgctggtgagtccacatggacacatgagtgcccatggggcaggagtctgctataaagtcagaaggtgagatcctagagagttacacccagccccattttaatttgcatgaaaagccaaggttcttttaagcactcaaattatttaatgattaaaacacaagaaaggcacatctgttcatttaaatagttgtaaaaaactaatcagcaaaaataaatagataataaa

SEQ ID NO: 16453 - DNA, 1190 bp, Homo sapiens
ataaaatactactaatattaacgagaaaataagctacttttaaagtggtagttgaattccactgaatttcaggcttcagaagattaaagattacacctgcctctctgactgccctcggaactgtcaggggaagcagcagtacaaagagatcctgatctgacaaacagtatgaggcaatggcagagtcaggtatgttgtcagtgggttttaatctggaatattttcaggccagttcatgacactgttgactggccatgaatcttgaaagcttgagagctggagtgagaacacaggaaatgcaaaaacctttttccccaccatcctgtagctcagaaaatccccaacatctggctcacgtgtaaagccaggaaagatatgatttaccctggcagccggccttactgagagccttagctggttggctccatgtcacacaagaaaaacaccctataaggatttgctgaggattttattcacaagtggaaaatcttcatacacctcaaacgaaactaaagaaaatgttgtatgatacctcctgagggataaaagtgtttgaccttatcagaattggtcatggtagagattattagatgtcacactgtctgatcttttgttttccaccagccaaattaaaactggaaaagtactgagagagggatacctttacaaaggtagtgaagacactgttaattttttgtttttactcttacgatgaaaatttttaaaaaattgtcaaaagttgaaaaaacagttatgttgaataagtccatcatccagctttaatactgtttactccttaataatggaaataaatacagttgttcatattgagtttctgggaataactgtaccaactctatctcataaacaaccatctcctcctttacgctgaggatttgctttagtacctgtgtgcattcactgtttatgcatgaggaggaagggaaatgcagtttttttgaactcttctcagcagaacctttaacaaggaaacacatttctttattgccctcattcccaagagaagcaactatcattacacagacaagtcatttttattatttccttttatttgctttctttagttttctttcacatttcatataactgaaatgaatcactttttccccaaaaaattacttctggaaaacatatttttttacactaagcattagtctaggcactgtata

SEQ ID NO: 16454 - DNA, 1772 bp, Homo sapiens
cttggattttatcttagcccaagaatgtgtgtttagcacagaatgtaattaggggaaatacttaagggattgtcaatgcagtgttcttttagctcttaagcaatccgtatcctgctaaaatgtttatcttttttttttcttcctttctggctgctgttccaggtcccttatttcgcgtgagtctttggcgtccacgaccttgagtctgacggaaagtcagtcggcctcaagcatgaagcaggagtggtcccagggctacagggccctcccttcgctctccaaccacggctctcagaatggccttgatctaggggatctccttagccttcctcccgggacatccatgtccagcaatagtgtctctaactcattaccatcctacctttttggcacggaaagtagccactctccttaccctagtcctcggcactcatccaccaggtcccactcggcccgctccaagaagagagcgctgtccttgtccccgctgtccgatggcatcgggatagatttcaataccatcatccgcacgtcgcccacgtccttggtggcctacatcaacgggtcgagggcttcgccggccaacctgtccccgcagccggaggtctacgggcatttcctgggcgtgcgcggcagctgcattccccagccgcgcccggtgcccggcagccagaagggcgtgctggtggcccctggaggcctggcgctgccggcctacggcgaggacggggccctggagcacgagcgcatgcaacagctggagcacggcggcctgcagccaggcctggtcaaccacatggtggtgcagcatggcctgccgggccccgacagccagtcggccggcctgttcaagaccgaacgcctggaggagttcccgggcagcaccgtagacctaccccccgcgcctccgctccctcctctgccgccgcccccaggccccccacccccttaccatgcccatgcgcaccttcaccacccggagctcgggccccacgcccagcagctggccttgccccaggccaccctggacgacgacggggagatggacggcatcgggggcaagcattgctgccgctggatcgactgcagcgccctgtacgaccagcaggaggagctcgtgcggcacatcgagaaggtccacatcgaccagcgcaaaggggaggacttcacttgcttctgggccggttgccctcgaagatacaagcccttcaacgcccgctataaactgctgatccacatgagagtccactctggggagaagcccaacaagtgtacggtgagtttccgaagcgcaaggggtgacctctcttgaaggcccggcttgctttgcgtacgtgtgttttttcctaactcggcccatggagtttgcatgcgtgggggtctaggtatccatgagatggggttccccttcagcttgaggaaggggaagatttctttcatggttagtggctctccattgctatatttccttctgcaaaggtacacgatccatcccagcaggtgatcagtctgccacactctgtaaaatcttggaaaggagatgccagccaggtaccaactttgaatttccttaatgtgtatggatgtgcaagagcagaaggacacagattgcacatcagcaagctttagttcttttccaaagcaaatatgcagtgactttttcttccctccaataaccgggctagaattgggatggagagaagagtggttttgatatttgaaaaggaactcaccacttagcaacttggctagtaaaagtgtttcggcatgca

SEQ ID NO: 16455 - DNA, 1209 bp, Homo sapiens
gtcagtccctctgttagaaaataagtattactgttggatttgcagaaaagtatatgaaaggcagtgaaagttcagtgaaaggaacgtgagtgagctgtggtatcaggcaatcccaaattccagtctcgatactgccacttgtgctaccaacgtgtacaccttgaataagttttttaatctttctaatcctcactttatgtaccaggaaaatcttacattcattcagcaagcatatattgggcacctgttgtgtaccagcactctgtcaggcatggagaatgtactgatgggtaagacactgtcctctcttcaagtggctcagagcctgctagactcacagagtggcaggcttatgtgaggatatatgtgaaatcacttagcagaaaatctggcacatagtagtggcttaatatatttatttttctttcctgtttgtcctctgagcctttcatgaacatggggaaataaaaaaaaattcccaagaatttagcaatttcactcagttacctcccacacaggatctcttagcaggaattgccataatttggaatttgaccaacgaaatacatacttctatggaatctgtactggactgagtcagcaaacaggagctcctgttgcagctttgctcttgggcaactcccttatcctctttggatgtcatttctgtcaatggtacaatgagggtttgggattaattaggcatgatctttatcccttcggatccaaatgaactgattttacttctgattctccacttgcgtcaatgttttgttcgtctgtctttcttatatccaccttctcctgaccctcacactcaaagagatttttggagttgttcgcaaacaggaacacacgtgactttttgtttttaaccttggtttagttgcttttatccccttccttcctctcatctctggttttgcagcaaatggaagaggaaagaggaggaagacttggctgtctctacatcttaccatctgccctcttaattacccttaggtgattcttgagtcctctgtttcatgctgagaacacatgagactgaagaccctctgttcacttatgccttcatcagagtaactgcttttatgtgtagccacggaatccttaagtgaaattatagaacaccgaaaatcataaatagtgccaactggaagggacgttagtggccacttgggaatacataaaactgaactcctggaagga

SEQ ID NO: 16456 - DNA, 1402 bp, Homo sapiens
tgcactttatttttgttcggtttttgatgggagggaaagagtactgaaatgttttgtaaattttttttaatgtgctgctaggttttttgttttgttttgttctgaagagaagagtggtaccatatgttgcaggaagtcaaactggactttttgtggctactaaatttgcttttaatcttattgttctcaattttggaatcaagtatgaaaatctgcacaaatgcaatgtttacaagaactggttgattctgggaggcatctgctacagtctctttttatatggatatgtacatgtcctattctacaaaaatgattaaagataaaaacatacttgtatcccactgctactttagctgtcaaatttggtgtttcatcacattaaaagcaataaatcagtagttggtaatgtactttactaaataagttggggggtacaatttttaaaagtcttaactcttaaatacttgactttcggcaccatcagttaaatccttgactataatacaaatttgatatatacattacatttaccctcaaattattctcaaaactatattccttagaatttgattttaccctgctgactttaagagttataataatatcaaatgtgatgagctaatatagattttctttttaaataagaataacttcaagctcactctttcttaacatagtctgggatctctcagggagtaagttttaaaagaatactaatggcttgtaagaacaaacaggaataataatctgatttttaaatttgtagttattttactcatgttgccttttaatttttgttattttggtttattttttgatgtagccttttaaaaaaggagtcttaaaaatgattttttttttaaaggcaagagaaatcttgtagtgctaactgccttgagctgccaattacctatttctgagaatttggtgactcttattggtaatgatggcatttacaacatttggcatttcccctttttcagctcagttaccatagaatacttccaagctttactacttcctctgtaagtcatttcagttatgccaggatatttgatgattttgtttatgtagaattaggtaacaaagccaattatgctatccttattattgaaggattaatcttatgacttaacataagctttggttatatttgggtgtagtctttggctaagtacccattaaggctagtagcaaacacttggaaggtggctaactgggactgggaatacgtgtctcaacttgagaaaccaaatagtgcgaagggactcagggtggccagacctgtgaccttggcctcatttgtatcttgttttcgctgaggtgatcagacacttagtaccctagaaatggactggaattattgaatcttcttctgtaacatcacaatcttcctggtttt

SEQ ID NO: 16457 - DNA, 2572 bp, Homo sapiens
tgtaaatgtggaggtgtgtatatgtgtaggcgtgtatatgtggaggtgtgtatatgtggaggtgtatatgtgtaggcgtaggtgtacgcatgggctagaggacgggtattagcaagaggaaggccagaatctttggagggaatctgtgtggcttgaaaagcacccccaggattctgatctcactcttcaccatgttatccacaggaaactggagtaaataaaatagactttggctgctggtctagtgacaagctagacaaatctgcctgggaagaaatgaagacagtcaataggaaacccaataaaaccaacactttttattcccctttctgttaatattcagaagagtggaatagaggagaacataaatgttggcctgggcaaaaaggaaagatactcaagtattagaaagtagcttttgcaaaagagtaagtagaaaaaaaaggctgatgggtgttctggtatcttataggtcctgtttggaaatgtactaccaacttggtgatttgggctaagttacattacaaagggatgattttattagtaaaataagaaaatttgagctttggaaaggattaaacaaactataatatgtaaagcatgtagcacagcctttgacacacagtgcatgttcaataaataaaataaatgataggtgctgttatttttttaagcacccatttttgtaagccagagagcacaactgaaaccaaaatgtacattttccaatgcccagccaagtgcctttctctcctgattacacaaatctatacttaccaagactcctatatctacaatatcattatttacagaaaggctttgaaagagcttattaggaagactcagacctgtgtgtgtttgttttgtttttgtttcatctttaggaaaaaaggggtgctggaaacattctccggaacagaaaccaacaagatttggccctatgtatatgctttcctacaaactaaagttccacaaagaagccagaaagcttcagttactccatgaggagaaatgtgtgtaactattaatagtaagatgggcaaacctcctagtccttgcatttagaagctgcttttcctaagacttctagtatgtatgaattctttgaaaattatattacttttatttctactgattttattttggatactaaggatgtgccaaatgattcggatactaagatgcatcgtttgaaatcatctagtgtgttgtatgcagttatcctcaaaaacatcagcgatgtctgaacctttaaaacatctgttagagcaaaattaaaagagcatttggtagtaatctaactttttgttcagttaataagtggttgataaagtttccatatttttctggaaaagttaaaaaaagttacatgtcatttggagaaaatacgtaatcagaaatttgtgcatagattgatgccaaaaaagacatttccagcattgtggaacatggtgagacactatataaaattccagaaagaaagcaactggatttacagatttattgtgagacacaaattcactgctgcctttacactaagaaatgtatatgttaaccatatatgctgtatttattttgtcgttaagcatactttcagtttactcagaattttcaatttgctataaagatgtatcaattagcatatagaaaaatattactttaagatgacttgtttcctttgaaaatacctgtgtactgagggttatgatttgtgtcaaaaattgacataagtgcttttacaagcaccaaagttgaatgaattttcaacaaaatgtaattaaagtctatgttttcagttatgactcaggttaagaaatgtgttttaggatctacttgctggtttttctttttgatccaaatgtgtgatctgccctgataaataacaagttatagtaccatctcccccgccaataaaaaagagaagaaaaaagagaaacccgtggcactatgtaaataaagtaagcatactttgttgttagtaaatagatgaggcatgcctgggaaatgctcccttggcataaatagcaatcaatcataattagtaaacaggtgtaccaataaaaagaatttacatgataggttaacaaggaccaggaaagtgagtttcctgaaggagttctttgttcctgatcaaagaaattgatacctgttagcattcactgccaccatattttaaggagaaagaactctattggtgtcgtctgagcagccatttaaaaattggaatctaaaggatggttgctgatgtactgtgtggtctggtagaagtggggaaatatgagagatggaggaaaaacttgattatgtcttccatggcatatttactcttactttacttcgtgccaaatcaaatgaaacaagccgtcttacaagtcgttattgcctttaaaaatctgttccgtttttttcccaggtacttaaaatacaagtgccagtaagtggttcttatgtgttttggggggaaaattttatttcccttttcttctgatatttaaaaaattcatcgatctttcaagatgaaccaaggttttttaaaagaaatataggaaacacttcattctttataaaactt

SEQ ID NO: 16458 - DNA, 1371 bp, Homo sapiens
ttgggacacccatagtcccaggtagtcaggaggctgaggtggaggattgcttgagcccaggagcttgaggccagtttgggcaacatagtgagaccccatctcttataaaaaaaagagtcatcaccatatttctgtccattttctgctaggtctgaactaaataacttatgtgtcacgtacgaacttctaacctttccccccccagtttaatttatcttgctgtattgcgtgtatctctgcaaactatctaaatcttctttggaaactggctggctgaaaggaagtactatttaatcagattcgatgagaaggtcttaacttcagccctctaggtctgggagattaaaaccttggattctaggtggtagaggataatttttttttgaatgaatttctttttatttatttatttatttttttcctttttaggatagaatttttgcggcatttgaagagctttttccagattatgtttaaaattgaaaccaagccatgtggtgaagaactcaagggtggggataaagtgctgatgacctgtgttggcattggtttctccaaccttagcaagaccctcaagtgataaccatcacaagataaggccccaatgcctacagacaaagcagaagctgccacggacaccaatgggaccaagtccaaatggattaatccaggacagaatagccacttgcttaattttctgtgaagaaatatcaatatacaaataaaagacatccctgtagcatatggtttccagctgtttctccagtggcattgccattgcccaggaggggcccagtcaccatgagagctcccttgccttacctggaggaagaatgtgccttcaggccacagtcgtgctgctagaacagtctcgtagctgcagttcagctgtgcttcctcagcctactatcataggcttcctcagccctctgtcatatggctgttttgcaaacctgtggagtctgttactgttctttctgcaaggactcacctccttgagccttggtttttgttgtagggattaaatgagataatatgagtggcagctcttcatgagtcctgcagtgctaagcaaatgtcagaaattggtgtattagactatttatctttgatcttctgaatggattgctgtcatggacacggacacggatcttcatctggttcattgtatttatatgtgagggatggatggctgcggggctccaagtaagttattgggatgtttttatattccaggtgtgctgtacattcttattttattttcacaatagctctgtgatgtaagtgctatctccatgagaaaattcataaagggtgttttgttcctttgaaatgtataatgtaaagacattaaatctcctcatttaagga

SEQ ID NO: 16459 - DNA, 1209 bp, Homo sapiens
tatttaactcagtaatatctactttaatttaggtaatttttatgtagaagatataatttgaagatatatttaatgaaataggttgatgttatatgtactctgtaattgggaacccagtgtaaatcagtttccatttgcaaatgaacttttattaaaattgtatcgcaaaatgaatgaaaattaaaggaggaatttatgccatttatttatttattaatcattttagagactgggtcttggtctgttacccagactagggtgcagtggtgtgatcatagctgaagagatcctcctacctcagccccccaagtagctgggactgcaggtatgtgccaccatgcctggataatttttaaattttttgtggagatgagatcttgccatgttgcccaggctggtctcaaactcctgggctcaagtgatcttcatgccttggcctcccaaagttctgggattacaggcatgagccactgagcctggccaatttgtatcttgtaaatgcatatgttctgaaaattatgattaaaatataatcatagattaaaacatgataatgaaacttacgatgagatatttccttcaaatttttggttttagtggcggcatgattttgtgcacggatggataaaagtacctgtgactcatgaaacacaggaagaatgtcttgggatggcagtgttagatatgatgagaatagccaaagaaaacgatcaaaccccactggccatctataactctatcaggtaattttcttttgcaaatccttacacataagtgtgagtagagattttatataattcgtatatattttctgtgtttacccatgccttttgattttgtaatactagttaagtactccttatctaaaatgcttggaatcagaaatgcttcagattttggatatttccagattttggaatattggcattgaacttaccagttgagcacccctaatccaaaatgctctaatgagcatttcctttgaacatcatgttgacgttcaaaaagttctggattttggaacatttcgtatttcagatatttgcaagagggatagtcaacctataataaaaaatcatatgggtaagttttatatcttgggagtaaaacacactttgtaaggtgaaattatttaaagagttgtactacaggaaatatcataggtattaaatatctattatttgatttcatttattctgagaaggctag

SEQ ID NO: 16460 - DNA, 1123 bp, Homo sapiens
tagccatatttcaagtgtatagtcaccacatacagctcatagctactgtttacagatagcacagatatagaacatttccatcattattcaaagttttattggacaagtgccagagcattgttacctctacacttaatggctctagattgtcatactgttattagttgggtttattcattttatggtttctctacctctttttctttctttctgctatcacttctgtttccatcttctaatttgctgtttcaatatttgtagtttttaactagttttatcagttatcaagtttgtgactgtgagtgcccatagtctttcatttctttcaggatttctgattctagattgaaatatacatagataaagttgcagataaatggagatgttttgtaaatggtttcatgatcatttttgcatgagtattctctaaagcagttttaatattcatacacattgctttcccagtatgctctcttaaaaattaattgattctacctacagtttgcagtctgtgttggaagatctcctggttgctacttctgatggacttcttcatcttattcactgggaaggaatgacaaatggaaggaaagccattaatctttgcacagtacccttttcagtagacctgcagtcatctagaggtagctatactttctacatgaggttgaaccagttgtttaatgtttgatgtctagttaggtatcttctatggatgaacacttctttggaattacttatgcaaggggagaggtgggcagagtatgagaggcggggtgagagaggcatttaataggaaaggacagtttaattatttagggttgttaggtcattatttttacccttttaaacttacaggtttttctggcaaaaagtgagagagtaatttattatattcttaatcctatttcatgtgcttatttttttcatcagtaggttcattcctgggcttcacagacgtacacatcagagacatggaatactgtgccacacttgatgggtttgctgttgtatttaatgatggtaaagttggatttattacaccagtgtcaagtagatttactgcagaggtatgacttatttactttgaagggttttttgttattgtgtacttattttattc

SEQ ID NO: 16461 - DNA, 1208 bp, Homo sapiens
ttaagaaaaaaaaagttggtattcttttcatatgtctgcatgactcacactgagaaatttaatttcactttgcctctctatccttagtttctttgatgtgctctccttccctcttttcattgggcttttcaaatatagcatagaggtttgctgcctttctttctgtcagccacccatcacctgcttcctggtctgacttcttctgtcccccttttcctgttccctgtattcattctacaaatgtgtcttaagagccttctgtgttccgagggttgtggtgtaacacggaggagaagcgttgatactttatcttcattgtcaatcagaattagatcttggatctcttatctccttgtcagctttatcagtacctctgcgtaataaggatgtgaaatcctccagtaaagattattctgtagctttcttgtgtttccacttacagatggagcaaagacagtgactgtgctgagaacatgtatattgacatgatgctctggagacatgctcggcgcctcttagaagatgtgaggttaaaggaccttggctgctttgcagcccagctgggctttgaactaattagttggctatgcaaggaacgtacccgagccgcccgggtagacaactttgtaatagccctgaagagactccacaaagatttcctgtggccacttccaatcatcccagcctcttctatcagttctcctttcaaaaatggaaaataccgaactggtaatgtagacttcatgtcacttgtacaaggagaattgtattttactccgtgtatttacacattttgctattagttgatattcaaggaattattttcattccaaacttaggaatggataaaagccaactttttgtacatgagttggaatgcccactgtttgaccaaagatgtaaataaagtagaacctatgtctctaagtcttgtgaccttgaagtctaattcaaaaatctaatcatacttggattataaagaagttgagaactgcctgaatataaaagctaccatgcttatgttattgtgggaaggagttctggaatcagatagacatggacctcaaagtaagctgacagaactcattccaggggaacagtaaggccaccttctaaactaggagaggacaaactgaaagtgtatattttggtgaaataaaaatttaaagttttttaattcaggactttttatgaagactgttctaatt

SEQ ID NO: 16462 - DNA, 1889 bp, Homo sapiens
ccggaaagaggaggacacagcccaagcagaggaggaagaaccttttcaggatgggacttacgactgttctgtgtcctaacagtgaggttccatcacaaaggggcagtattaattagcagcagcgtgcagctcagtacgttgtaacatagttggatgatttaacaggagaactcagttcagagactcttcggtaagtattagtagattttaactaattctttcttgtctaagaaatctttttgactccataaaaatgtgatataaagcatctttcataaaaaaattttaagctgcagtgaaaagtaaatattgtacagatgtacatgagaatattttggttttactcaaaggttggtagctcttaaaccacaggaattgttttgccccaggtgagcttactttttcactacttacatcttctcacatttcccggttctgcattatgtccagattgctttttaaaaaataaatgctaaggtgcttgctatagtctgtcaggtacttgagctacctgtttgctcccttggatacagctggactctttaatcagtcctcctgaatagattgctaccctggggcacaatatgtgccagtgtgatggaaacattctccttggctttactagccagtcaaatcccagtccagaattgatggaagctatttacctgtgagttaatgtgcttgttttagcaagcttgattcccattagaccaatgtgggcagaggtctgagggggttcttctcaattttgctgttagataccactaaactattttgtattaaagaacagtatctttttgtgaatactcttgtgtaaatatattcaaaggcactgttcatattttagggcttgtattataatttgcaaggttttaatgctggattctgcatgtctacacatacaaagacagggcttgctcctctgcaaaactgaggaagacaggtttattggcttggtcatgaagtaacagaaatggtcacactgatcatgaaatgcagcaagttttgtgcaaattaacatagtctcttatttattgcttttgtaaattgaataaagatggacttctatgtaaatagactgctgaatcctgtattaccacggctactaaaaattagtgtgtaaagaatgcattcttcattgtaaacttaaagtattttatgtacttctagaaatgacttaaatttgttttcatacattatgaaaacaactgcatactccttaattgctttaaacacccatccactgtatgtaattctaattaccttataacagtattaagacagcttgtttgtactgtgcaatttgaacaaggaatgcaatgttattttttacaaaaaacaaacttgtttatttttataataacgatgtatttgatgtggaccaaattcgtaccactatctaaaatagcctcttttctcatagtgcagttgtagtttagaaacaaaacttggtcctctctccttgctttttaaagtaaatggctagatttagttgtcttagccaggtttcctttgaagagaaactcaaaaccattttgaaactgcttagttcagaatacatcgaagtatttaaaattactgagttgggtaatttactatcatttactttttacattacaagtgcaataatatttcacaaaatgaaactcccgaatgggtggagtatgtgattattggtacctggtccttctggtgctatttttatttaagtctttgtttcaaaccacctttccctgaatcttaaagataatgttttgcatgtgagtacatgcagcccagcaagaaactaaactgaactctcttctcctatcctagtccattaaggagaagaaccagcattgcttttgtgtttggtgtgaatattcagtcaataaaaatgatttaccatt

SEQ ID NO: 16463 - DNA, 1344 bp, Homo sapiens
cccttgagaatataactctgtgtaggtcactggaaagtgattgccatagggctgggagagaagcattgcactcttgaggctgtagcctgtgtcaagctgtttcttcaggcagcctctcaaatgtgctttgtctctctgtgctgaggcctggaccctgtgctgagctggtgactcactgtcctgacaagtggacacacagatgcactgctgtgctgctttcctgaggtggttttctatgcctgttttcctctgaaacatgtctgttacccctctccatcttaccaagttgaaaaggggaatatttggccacatacccctctggttttcgtaggttcttttggttcagaatattgtttgtgccagtacatgaccttaacttccttcctcagagcactgagctgccatctgggctattctggggtagaaggaaggctgggagtggtgggaattttataaatatttattctcttttctttgtttcataggagtcttgtgttatacaaggttagtccttcatggtataatcttactgatgcactgggcctatctttttgttttccagccagttgaatagattagtttttctcagtaacttactatccagcagactggctttcctgagacttgaggttgtggcttatactggaatgagaccactgtacgtgtaggtggttcagatcctgcgtaatggcagcatgaggacttaaaaggtggttttcattttgaagatggctatgtagcttgtaaggtgtatcacagcagtacctctcatggctttttggttccagcagtgagggcattggtgagatcaatggtaaactgtgcaagctttctttttatcattaggaaatgtgaaacgttggacaaattttgagttttaacaaggacaaaaagttgaaagaaaaggcacagttaacaaaaaagggtggctagatttatcttgggtgatggaggaaatgagagaggaatgctcttgaaaggtggtctgtggatctgtctgaatagaaagagcacagtaagtatgcattgccggagaaaacgtccttgaagctgcttgtctcatgtgtatgatgtgctttttaaatcatgcccctcgttgcctgcctaatctgtgactccctaaaaactaactgggcccatgtagatggggctgcaaccagagctgaataacatgttaggctcacacatgcatcagcactgcacactggaatcattgctcttcctggactttgtagaaatcagtctcaagtgcttcaagagtctggctcctgctacttttatctgtcaggtagcacataaggtttgcagggtttatattttgtatagaatcacagttgtggagaa

SEQ ID NO: 16464 - DNA, 1182 bp, Homo sapiens
agctcatagcaggtattcaataaataatagccattatttttctttatctgttaaatggagacagtaatagcacagattaagttgctgagttatgaagatctgattagattatgcatgtgaaagcaataggccgggcctcctctgcgtaatcttatttctaattttaagagccaggaacccacttttttggagcctgatgttctaatattccttccttacgaaagccaggtcattgcttttttcatctgcctgatgcactgtaagagccttgtgtgttctttcaaaagcgatctctcatttttctcgttttgggtttttaggtgtctttacatttggcaatctccgtcctacagagggctggaaaagccctgcgggagacggcatatccaccacccgctgctgggtcggccctgcagctgtgtgcacccgagaactgccaaagaagctgggtcttggcgcggcgggacgggccaatcagaagaagtttggccctctgcagtttccgtccgctcactaggaggcgctgcggcagcgacggcggcgtcggcggcggccggggctgtcgcgggttggggcggttgggctggcagctgaggctcgtggccatggagtggggttctgagtcggctgctgtgaggcggcaccgcgtcggagtagagcgtcgagagggagcggcggccgcgccaccgccggagagggaggcccgagcgcaggagcctctggtggatgggtgcagcggcggcgggaggacgcggaagaggagccccgggggtagcggcggcgcgagcaggggcgcggggaccgggctgtctgaggtgcgcgccgcgctggggctcgcgctctacctgatcgcgctgcggacgctggtgcagctctcgctgcagcagctcgtgctacgcggggccgctggacaccgcggggagttcgacgcgctccaagccaggtaccggccgctccctcctggcacggcccgcgcgtccgtttgcggctcctgcgcaggctccggggcaccgcacctgtgtgcacccgcccctgccggaccgctgggactcgctgacccctcccaggctgcacgtggggtggggtgaccttgcttgtccttcttctggggtctgaattgccgggacttggggcttgcctgtccccggttaagctcgtggtgcagattggggttgccaggta

SEQ ID NO: 16465 - DNA, 1144 bp, Homo sapiens
tgattcgcctgcctcggcctcccaaattgctgagattgcaggcatgagccactgcacccggctgtttataattttttcaaagtgtttatgtatcattttacattttctttttccaaatgtttctgtattattgtacattttctcgtaccaataatagatagtatgaaatacattgcaaacaataaactttgttttctattaaagagatagtgctttagtcaatattttaaatgcttcagtctcagatttttttttttaatgcagggaagagactgtcactctgattttatgacataaggagtatgagaaattgtgtagggaggataaaaagttagaacaaagctaagtaagtaaggtttaaatacttttatgtatttagcaaaagggattcttaagttgctggctaagggggtttattgcttatccagaagatttgaccttgtgaattgacttattcttctccaaggcacttgagagaaaagacaacgatagcagttacatctagaggctattatggattggaggatgagaagggaactgcatgtacctcaacaaggcgtcggtcaacaccgcgaagtttggcaggcttgacaagtggagtttttgaatctataatggttcaagttttgagacaggaagaacagctgagagcaaaagaagaaaaaaggtaaatgttaagaaaaaaattcataatttcagctgcataatttttatgtgcccatatcagatttctgggcccattttagtagtgttctaaaatgcattgttacaaaagtatgaattcataatgaaatatcgcaataaaatttgtttaaaatgtaattttaaaatttaaaaccacttatcttgaagctatacaaaaataatttctacagaatatttcagagtgctttctagatttctagtagtattcattctcaagtgaattataagttttaaattagaggaattttctataggtttgtagttttagaacagaatcacagacctttaaaatcaggagaatctccagagattatgtagttcaagcatgacataaattcacctctgcctgttcctccattggaattaatatcctggataactgtgcttactctgggctgatcaggaaaaagtgtgctcaattaatggtagcttctagggt

SEQ ID NO: 16466 - DNA, 1457 bp, Homo sapiens
agatatcaacagcacatagggatgcttaacaggggtggtgatcagggacacgcctcctgggaaatgcctcttttttttaaatggtaatgtagggttggattttaggttctcagaatatttgctgggctgatggtgtcttaggttgtgggactagcattgccacctcctttgccctaagagaaacctcccagaacatctcacagcatttccatcttttgtcctttgcagcccttcgtgaaaccagagaacaaattctggccaacgattgcccggattgatgacatatatggagatcagcacctggtttgtacctgcccacccatggaagtttatgagtctccattttctgaacaaaagagggcgtcttcttagtcctctgtccctaagtttaaaggactgatttgatgcctctccccagagcatttgataagcaagaaagatttcatctcccaccccagcctcaagtaggagttttatatactgtgtatatctctgtaatctctgtcaaggtaaatgtaaatacagtagctggagggagtcgaagctgatggttggaagacggatttgctttggtattctgcttccacatgtgccagttgcctggattgggagccattttgtgttttgcgtagaaagttttaggaactttaacttttaatgtggcaagtttgcagatgtcatagaggctatcctggagacttaatagacatttttttgttccaaaagagtccatgtggactgtgccatctgtgggaaatcccagggcaaatgtttacattttgtataccctgaagaactctttttcctctaatatgcctaatctgtaatcacatttctgagtgttctcctctttttctgtgtgaggtttttttttttttaatctgcatttattagtattctaataaaagcatcttgatcggaagaatgcctttctcttggtgtactttatagttttaccaccgttacaacctagattcagtgggagctgaagggcaatgagaacacccaacccaatagccattgttacatcatcagttttgccttcgactggctgaagaaacagttgtcttggtcaacagtgaaaaccactttgaccctttttgttggaactgagttagagtgcatgtaactgtactccagctatggaaggtcaatcaaatagcaatttatcttttctcatttaagtccagaggtaataagccaagcactggtgctccttcagttttcccgctctgccctcctttgcataaaattttcatccgcatggtctcaagaaggctgttgcatttccaggcgtctgacatacccattctagttaggattaaaagggaagagcaaaggccaggcgcggtggctcatgcctgtaatcccagcactttgggaggctgaggcgggaggatcacctgaggtcaggagttggagaccagcctggccaacatggtgaaaccccatctcta

SEQ ID NO: 16467 - DNA, 1127 bp, Homo sapiens
gttcaagaggaccagcccgttcctcacccatcaagtgttcaacaggtttgtgtgtcttgtgtgacttctgcgttttgtgctttggtaatcagctagggagttaggcagagtgctgctgctgatttcgcctgctgtggcctggttattctggctcagccgtggctcccaagtatttcatcctcataacgatcccgttcctgacttgggaaaagcacactttgtttcctggtggctctgctcccttggcagtcaggaagcagggatgaataattgccaggctgaagttcactcccaagagccctatatcctcttcttcccaaccttcaactcatacccacagtcagcttcttgtccaagacatcctctgaggtttgtgggggtctgtgcccttctctctgagtgtagttgacatattgtccgtggccaaaattgatctgcattttgaaagtagatttcggtgtgtcttatatgtcaggaggatgtgcatggactcatatctacttttggggcccctaattctgtgttttgtgttcacagctaccactctgaaacaaacattgtccggtacatgaagaaactggaaaataaagacatttcccttgttcacagcatgattccactggtagttatttgtggccttttttctcatttccaagctaccccaatcccacgtctcttggtcctacctaatatgctccaagagcaacaaaggggtggccatgctgggagaatggagggttgattgatggactatagaaaatcactaatgtgatacattttggatgttcttcttaaagggatcctgcaccatgaaactgaacagttcgtctgaactcgcagtaagtagctcacttctgtaagtggatactcagcaaggggcagtgttctagcttccacctaagcccagaactagtgaaatctactgggactgtgattctgtgattgaagaactattttaataattctttaccttgctattcaccaatcttgggagtaaccctgtatttctcacgacttcatcatttaaatgtatgggtaaacttattattttttaataaaattaattaaatgtatatggtatttatgcctttctatcctatccctcccccacccccacccccttttaa

SEQ ID NO: 16468 - DNA, 1241 bp, Homo sapiens
agggatgggagagagatagcagaagatatattttgctgttggtttcttgatgtgatatgtgatggtgaatattacctctaaactaatgtgcaaaaaaatcccaagaaaacccaaatctcaaaaccccaaaaacaaaaaggtgtgccaaggagggagagcacatgccggatcatctactttgaatcagtaattttttgctgacagccaagttgggagtgggtctgtaactttcatttccatttggcatcaggaagctatttggtataaatttctaccagatagttgtatggaaccacattatgctggtagtaatctttgaccaataataatggacatatgtatgtggctcttgaataagagttgttttatttttcagttttcagttagttagaatatacaatgtaataattttggtggatagtggtttgattagtaaatgctatctttcatggtttagtaagatttgatttctctctctttttttctctctcattccagggtgtggatgaatggaacatagctcgcctcaatacagtcttggatgtggttgaagaagagtgtggcatttctattgagggtgtaaataccccatatctctattttggcatgtggaagaccacgtttgcatggcacaccgaagacatggacctctatagcattaattatctccactttggagagcccaagtcttggcaagttacttgtttaatattcatttactttggagttttgaaatttgggcatcaggcacatattgaagaggattttgttctttgatttggtggattcagatttatgtgagctgtaaggaagtttttgactgtaatagttaattgtcttctattctgtctgggattgtgcttggaaaccataaaccccatggtaactcgtacagtcatgcactgtataacaatgtttagatcaatgatggaccacagatacaacggtcatcctgagtttataatgcaattgaaaaattctttttccatgtttagatatgtttagctaaatgaatactttgtagctaaatactttgtgttaaaattgcctacaatatttagttcagtacaggtttgtagcctagaagcaataagctatgccatatagcctaggtctgtagtagatccactatctagatttgtgtaagtccactccatgatgttcacacaatggcgaaattgcctaacaacatatttctcagaaactatcactgttattaagtgatgcatgactgtatatgt

SEQ ID NO: 16469 - DNA, 1261 bp, Homo sapiens
actgttgaatgaaagggttgttgtatgtttaacttcctcatttaaaagcctcctcaaaacacttctcccattcaggctgttcaggcaggttctcagacagttgatgggtgatggctgggaagttcattcaggagattagtagcaattagtttcagattaatcagaaaagaaacagaaaggtgggggaactactctgtctgctgtatgccgaggattgggatgagtgcttcaggaatgcatacttatctttcctttttttcccctgtatttttagctatagatccagcatcccacgtatttatctttcctaacttccctaaatattttctccatttatcagataatagattgaatccacatttgtttcaaattgaaatttattcctaaagttgagtaattttacaggttacaaaaacaacttatggtaaatctgtttgtaaagaagatcaacctttggtgatgtatcctttaatttttaagaattctaactctgactctgagttttagtacaagggctttttggcagaagaggtccatacttgcataagtcaaacagtaagaacactagaacttacacattaaaaaacctatttgatattttctcttaatcgacacagtgccacttacatttattgtttctttttaggttttttcccaagcagctcccaagggtgtgatgcatttcttcgccacaagatgacattgatttctccatcagtattgaagaaatatggtattccctttgacaaggtatgttagtattcatcttacacaaattaattttgtttgtgtaggatttgtatttaagaagtaatgtatctttaacttccagtagaatttttaggatgtgggtagagaaattcaaatttatgttttatagcatatcaattatttatctaaatcctaattagaaattaattttatttcaaatatatttactagagatttcatgttgctatagttcacttataattgtactgaaaataaaatgtagcacattctataaaataagaggaagcacttctatattaaaatcttttttatgagtaacataatttatgtatatgtgatctattttctaaaaatttcagagcaattattagcaatgggttgcttagaatcaatgattatggtagcactatgttgcttgtaaacacatttagacataatacaatcgagatttcattatggataaaattgcctgatgatttaataatctgatattgcttctgcgagttttctgaagattaggttctataaa

SEQ ID NO: 16470 - DNA, 1139 bp, Homo sapiens
taaagattagcattaattcttttggaaaacttttgctacttaaacaagtttgcttcatgacatttgtattattttaaaaggttgtgtgctatacccagttcataccttttattaattgaactaatcttttgccacatattgattagcttaagtactttaagcacatacatgcatattccagcatcaaatgaaataagaaacccacatttcagtattttgcagatcaagtgtagaaaaatatgtgcacgttaataggatagagtcgtgggcctttatcagctcttcatggcacaatgttgttgggcagctgtggtactgagtctgtccaggtatcattcaggaggtttacagttcagaatctgtttgtgatggatttaggcttttggctttcttgctcatctgtgtatttcccatctgtgagaactggcatcaccaagttgaagtatgtaagtttagggaacttttgtttatgtttaatgtctcctttcctgtaggtgggcccatgtcatgtgcgccgttgcggtcccagaagttcgattcactaatgtcccagaaaggacacaaatagatgtaggcagaatacctttacagaggttaaaattggtgagtggcaaagcttcttttttacctcataaattagtgttaatttcaagttctgaatttttccattaatgcacacattcccaaggtatattttctcctagctttcttttatttttctacccttattttcctttagcctaaatttatttattcttacaaattcttttcctgttatattgtaagtttgcatataaccttcctcaatttctgtctgaaatgaggaaaaagatagtaatacatttcctgaattaatgtgaactttcaaactataggttatctggtaagatttgtcagtactggagctgagccatctaactctatttaaattgtttagatttttctctcttgactctctttggttggtcttaacctagcaaaatgtatctaacctaatttcattatctcttcaccaagaagagacacacagagaaataaagaagcttttatttttacgaagatattttctcactcttgaataggtacaagtcacttaatatgccaaactctctggcttgttcagaaactgtgtaaaaatc

SEQ ID NO: 16471 - DNA, 1187 bp, Homo sapiens
cttcggctcacccagacacacgctgactgggggagaaactgttcaaaagagccagcagtccacctcagtgattgtgtggggttcttttccactcacttcagaagcagccccgttaccttttattgtctcacagaataaccatagcaacggtgcataattagctagagctcctggtaaatcggttttattattgtatttgagaggccgacttttgctgtttctgcacagtggcaacactttcatagatgttttattttcttctttgataactttagcacttacacaagtgaaagattactcagaggaagtattttgccaagaatgaatgaaacaaaagtgttttctcctaatggcagagggaacccaaccagcccataatgatttagttttcttctctagtgaaactaggtggtatgtgggggaagccgtggaggtggcctgttaccctgagtaactgtcccatgaactggctggaaacatgaacagctttacgcttcggtacattttttgttttcaggcttccttgtggctgttttcttgtttttctcttctttactatggaccgtgtgttttcaagtcctaaagtgtctttcacctctgcctctgccagcagccaggggaagcagtctcagcacagtgaaatgtgctgtgtgttgatgtcatcagaagtcatccacctcagtgaaaacagctgccagtgcattttaggaggcaagatagtagggaattgggaagcaaaaatagtgcctaccatagactttaggctttatctgattatcacagaaaaagccacatgccctcactcagcaaacacttactgaacagcagccaaatactagccacattgtttgctgtggggaacacatgtaaaattgggtacacagtccctaatatcctcacctttatggggttcccctgatggggagaaacttacttgccccttacctctaccactgccctcctcttactgagtggatgtgtcagggccacaggagtcccaaagaaggacccttaagcttgccgagggcagagacagtagaatagaataactttcacagaaatgaaacagtgtgtccaaagacagagaagcatggggccctgagccaggcaagtatgaccaggccctgcaactgatgccgtctgagcagagcacggggcaggcttctggccaggttatgtaggtctag

SEQ ID NO: 16472 - DNA, 1549 bp, Homo sapiens
ccttttagcctgagctggtgacctgggcatctgcaccctaaccccagctgaccgagtcagatctttgtccagtgttctgaagatcaaatgccgtgcccttttgcaatataacaccagctgcttttagtccacagcctctgacatgcgatttgaagacacgttttatggagcagacattatccaaggggagagaaagagacaaagagtgctgagctccaggtttaagaatgaatatgtggccgaccctgtataccgcacttttttgaagagctctttccagaagaagtgccagaagagacagtagtctgcatacatcgctgcaggccacagagcagcttgggttggaagagagaagatgaagggacatccttggggctgtgccgtgagttttgctggcataggtgacagggtgtgtctctgacagtggtaaatcgggtttccagagtttggtcaccaaaaatacaaaatacacccaatgaattggacgcagcaatctgaaatcatctctagtcttgctttcacttgtgagcagttgtcttctatgatcccaaagaagttttctaagtgaaaggaaatactagtgaatcacccacaaggaaaagccactgccacagaggaggcgggtccccttgtgcggcttagggccctgtcaggaaacacacggggacctctctctctagctccagcaggtggcacctcggtacccagcgggtagggcgataatttatatattttccacagtcagggaaggactctcacttatttgtttcaaattgcagtttttataaaacatttttaaaacacaaatggcatgtatgctaatgagatttacccgtgtgctatctgtatttcccttgtacagaacttttacatttttgaatattcctattacttttgattgtgtctgatgggaactgagttgttggcctttgtgaaatgaaatttttggctcttgagaaagaattcttatgaattgttatgcgaattttatatatttaaagagggagatctggggctgttatttttaaacactttttttcataatacatattccgagtagatatttataaaatatatgtttctttcattatgtgtttgtaaaattagagtttaaataaatatgctttgatgcatagttttgaactaatgtaacatgatttttcttttttaaaacagcctgaaaatgtactagtgtttaaaaataaagatttccattttctccagtcctgtctctgacttgcttatttgtctgggtttaaaccagtagaaaaacaagtttattggagagctggctatcaggacatactgcggcccaggtttttcagaccctccttctgtcgctgactttttccatggttgtggcacatgcatggcgatatttttggagacaaagtcccctgcctgcctacttcagtaccaatggaagtgttttcttcaacttcttctaggccctgaatacatctcagacccttgagtctggatcacttttcgttccaggattcctggtccgcagctgtcattagtaggaattagaggtcctccagtccct

SEQ ID NO: 16473 - DNA, 1176 bp, Homo sapiens
agcacatgattatgcacatataaaacccaactccttgattcacaggcctctggataggagatatgacatgcccaaggtctcgcagttcatgtgaggcaggaaacttaagagagccagacttctttaaggagactgaaaggtgattcatttagtgagtagcgattacagaatttctaaaacagtgggggcggggggggcggcggggaggagggctggaattgtcctccagcgcatacaaggttgttgctgccagagaaatccagcaggaaagagcagcattctttcaccttttccgcctctgaagcggaggagaacttcatttcccagcagcccttaagattcctccgcgcactgcgctagcgtcccggcattctgctttccggcgctctgccttccggtgcgtcgtttacgccagtttgaaccaaagacgcccaaggttgaggccgagttccagagcatggggtctcggttgtcccagccttttgagtcctatatcactgcgcctcccggtaccgccgccgcgcccgccaaacctgcgcccccagctacacccggagcgccgacctccccagcagaacaccgcctgttgaagacctgctggagctgtcgcgtgctttctgggttggggctgatgggggcgggcgggtacgtgtactgggtggcacggaagcccatgaagatgggataccccccgagtccatggaccattacgcagatggtcatcggcctcagtgagaatcaaggcacagcacttgggcgggttgggtatctgcggggtagaggaaggaaacggagcagccacgtgggcggggaggcggggaggcggggtgctgccgctggtcaggtggtgggggcacctcaaacaaggtgggagaggaagttgttggaacgcctttctttttttttttttaattttaagttagtatttcttgagaacccttattagactcagcccttttaattctcagaatagctgttagaagtaggtatgattatagtatttactgtggagcaaaccgaggcaacgaggagtattgtgttcatggtcaggaaatgacagtcacttgatcccaggtatatcagatctcaaagcccatactttttctccaggtcctggagaaagcctgagcgagggcccttgaccttaatttaagaaatttgccttgaatcccagat

SEQ ID NO: 16474 - DNA, 1143 bp, Homo sapiens
ctataggaagagcaagtggaaacactgtagagtatctaaaggacaataagcccaactacaaacttgaccgcatcatcaaggaatggtaccctacgttcactgatgccctgcgagacctggacaacgccctctccatgtgcttcctcttttccaccttcccacggactggcaagggccatgtgcagaccattcaccatggagttcatgcactacatcatcgctgctagtgccctgccacaaggtcttcctgtccatcaaaggcatttactaccaggtcaaggtcctgggacagcccatcacgtgaatcaccacttatgccttctcccatgaccacccaacagacatggactacagggtcatggccaccttcaccgagttctacagcaccctgctgggcttcatcaacttccacctctaccagtggctcaacctccactacccactgaagctcgagggtcaggcccaagaagaggcaaaggccagtgagggcacccatgcattggactctgagagctccatggagaaaatggctgccctcactgccagcctggcccgcgtggtggtgcctgccacagaggaggagcccgaggtggatgagtttcctgccaatggggagatgtcagcacaggaggaagaacgcaggaaggagctggaggggcaggagaagcacaagaagttttctgagggcctaaagttcttcctgaaccaaggggtgccccgtgaagccctggccttcgtcatcagtttttggggggaagtgtcctgggacaagtctttgtgcatcggggccacctatgacatcacggactcccgcatcacccacaagattgtcaactggcctgggcagcagacctccatcattggcaggtgctacatgcagccccagtgggtgattgactcggtgaacgctaggcttctcctcctcatggcagagtacttccctggggtgcagctgcccccacacctttcaccttttgtgaccaagaaggaaggagattacatcccacctgaaaaactgaggctgctggctctgcagcagggagaggacccaggaatcctgaatgcacccgaagaagaggagaaagaggacgacaacaatgaaaatgatggtgatgaagggggagaaaatgaagaggaggagga

SEQ ID NO: 16475 - DNA, 1220 bp, Homo sapiens
aaaatgtttaccaaaaaactcaaacaaatgagcagtgcctgttcaatttcacagtctctgttgagttcagttgtaaatatgtttcaaatgacattttcttgggaaaaaaaatctctacaacattgtagaatgtgaggggtaactacatcccaggcataggtttctcaaagctgcagtagattatgtcttcatcaagctgttaatttgtgcttatatcatatagaacttttagcatcctgggaagagctgcccccacctcaatgatatttctctgagaacaacttttgtaggactgtgtgtttctttagatacatttagtacaactgtaggtgacgagtagtcagttattgcttgctagctacacaccagggttgatccattttaaaacttttggcattttgtcctcatgggccataaatacagaaccttgtattttaattaaatttttttacaaaaggaggcacatgcacaatctccatgtaacaaacctttagcagtaggatgtattatacgacagttacttaatttctagagttcaggcctctgggatcaaccccagactgggccagaatgttagtgaaggttttattgtgcccggttggaggataacgttctttgggtactttttgtgggttgcaaatgaactcaattgccacaagttttaaactggtgtaaatcaagcttgacttaatgtgattgttactgttatatccagcctatactgctagcagctgctcatactgcagtcaattactggaagcggatatatttcctatgcaaaaactgtttaaacaataaaatgagctatgctacagactctggcctcatgttttatttttctcctcatcgtctccttgctgttctgcctacattaatgttgggtcagtagtgtcccagaaattgatcttggcccttaactttgggggttttgtagcactgatttaattattagcatctgggatagttaatatttcagttcaatatttaaccgtatatctgtgtatatctatataatccttccttgcagttcctaataaatacagtcatcccaagctttctaaacaatgacagtaaaaaaaaaaaaaaagaaagtgcagttatagaatcgcagacctcactctctgagaaaggcctttgagcaatacgttgaagacgatgtgtgccatgatgactggactgtggtctctgtgagagaaaaaccacagggcatcaaacactga

SEQ ID NO: 16476 - DNA, 1214 bp, Homo sapiens
gagaagagcgaaaggtcttcttaatgaaccgcctaccttgtagacagtaatttgtacactgtatagttttgttaagaattttttttaaattaaaattcccatgtttgtaaagctaactttttaacaattataatggaactatatgttgtttccatttttaaagtaaacaagaatattccttgtttagagactggacttgagttaaaactctccagtctcttaagttatgtattaaaaagaaaatctgtccatgttaggagttatttcacagattcctgtgcttgaaaagcataggatactaatcctttaaaaaagtgtaaatggagaaaagttatattttatgaaggttattttgttgtatttagtattggaaaagttggtttccagagcatttcagaatgtcgaagcaccactgtctttttattagtatatacggcctttagcaaaagtttttgtgattgttacgtgatggtatttaaggttaagtttcacagagcattcaggataggcagaaaactaaaacagtgctatgtctcacataacgtgtcctcagggagcagaatcttggatttgtgacttgtagcttcataaggactcaacgaaagagattgcacagggacatcttcagcggtgtgacagcaggacatgttctttacctagattcaaattctatgtactgtgtgaaatgatgaaggctgcagaaagttatcccatattcagtgtacagtattcatttttaatgaaacaactctacaatattgctggcagataggccccaagcatgacattcaatatagtttacatgttcctgtcaaggtcttttgttaacattaaccagctgcatgctttctggactttaagaaattgggtttctatagaaaactttttttttttttttttttttaatgtgcaggctattcaagttcaatagtaaaagctcaaaaatgaatgttctactccatgctgaaggagctgaaagctgccttcttcatattttgcactttctggtagttcccctgttttttctaattccctaaaattgtgtgggtggagtggagccctgcagttggggggtaacatggaccactgattttgccctttgaccctgcacaatgacctttgcatcagccaaactcattgccatgacaactctttgtactgtgtccgtgccacagatctgttggtcacattgttaatagtaaaggggacaagtt

SEQ ID NO: 16477 - DNA, 1155 bp, Homo sapiens
aagaggaagactggacaaaacaacacaaaggcagaaaggaaagaaactgaagaaagaagataatagaccagcaattgcagcacttacaatcactaattcccttaaggttgaaactgtaatgacataaaaagggtcgatgatatttcactgatggtagatcgcagcccctgcaacgtagcctttgttacatgaagtccgctgggaaatagatgttctgtctctatgacaatatattttaactgactttctagatgccttaatatttgcatgataagctagttttattggtttagtattcttgttgtttacgcatggaatcactattcctggttatctcaccaacgaaggctaggaggcggcgtcagaggtgctgggtgacagagccatgagccagccattttataagcactctgatttctaaaagttaaaaaaaatatatgaaatctctgtagcctttagttatcagtacagatttattaaatttcggcccttaacccagccttttccagtgtgtaacccagtttgaaatcttaaaaaaagaaaaaatgaaaaaaaaaggaaaaaaagaaaaaaggaaaaaaacagtttgaacacaaaggctctatggaagaaatgcctctatgtaggtgaagtgttctctctgcatgcaacagtaaaaattaatataatattttccccacaaaagaaacacttaacagaggcaagtgcaatttataaatttatatctaaaggggaatcatgattataagtccttcagcccttggactctaaattgaggggattaaaaagaatttaaaataattttgaacgaatttattttcccctcagtttttgagggcattaaaaaggcattaaatcaagacaaatcatgtgcttgagaaaaataaaattaatgaaaacacagcacttatgttggtttagctgcagcctccttggaggtagaatttatttatttaaaattactggttgcatcaagaacccatagggtgtacaaaaggttctataaaatctgcattatagagacaaagaggcaggcaaatccatgtcacaagggtaaagcttacagtttacaaactgggaacgccagggtgtaggatataaaaacgcactcttgagaaaacaaatgtaatcagggtgctgaaaacttgcatggtg

SEQ ID NO: 16478 - DNA, 1102 bp, Homo sapiens
gagactataacaatgtaaggaatagtcaccatatatacttactacctagtggccaactatttaaaggtgcatcagctttcttcctggatcagttacaagtaattgatttttgtatgtgtgcttatgggaagtactttttttcaaaaacattcctatcagacttgaggccattttcacaggtaaaataccgagctgattcattctacatgatacaggcttctccttcatgatagtaagatttgatttcctttttagcaaaacttttaagaaagacattttccatcccatatcattaagaacatctgcttaaattccatcattaaaagctgtcactttttcctggcggactttcagtctgctttacatttagaatcatataccatcattgattattttatattagacaactactatctggtgaaaaagtacgtctaggaacagggcccttctatttatccaatccttagtacctccacaggacagttactagagcatgtaagtgtgagacacccacactgaagtatgagatctgctttactggatagattttttagggggaataaactagttgatttgaagtcaattattatttcttttctatcacttggtgttcactcagacaaaagagaagagaaatgaagacactttttttttttggttgcaaatcccacttctctgggtttcttatacatggacagggtgttcgttctgatagttcacaatttttatctttgtttttgttcttccttaatcagcctacacagcctcaggcacatctcaagccaatcgatatgtgggactaagcccaagagacccatccttcctacatcagcaacaggtgggcaagtttcacccaggtgtgacggtgtagccacgctttcgcttccgtgcttctccatgttgcctctcagatccggactcagaagggggctcccggggcttctgagaccaaaactgatcatttcatttcccagaattttttctcattgatcctttgtttctcacctctttgagtagagtttctcaaattggctcatgaccttttccatctctgtagcatatattgataacatccatgagtaatagtgtttcagccaaagtg

SEQ ID NO: 16479 - DNA, 1037 bp, Homo sapiens
tttaaatgcatgtggctgaatgcagtaatttttcaagttattgagtagtagagaattcaccactattcactgtctcccagagatgaacatataaaagaaaaaaaattctacttcatatatgtaagaataaagcaactaaatgatacaaaagtaaaaacttccaccagaatcagagatattccgacaagtgaattgtgagtctaacacgggaggacaaagctaggctcttgcaaggacagagcacacgtggatcatgctgtatgagctcactttgtgtccctggaattagtgtttttttgtgtgtgatctaactggcaagtttaatgaatagccaaaatctatgttattcttgaggctcctaaaattatgtgtgaaccccaagttctgtctagtattatatccctaaaatgcttttaatagtggtatgttacaagtggcataagaagatcctgtttttaaatttgtcaggcattttattattcagtacataatatgtatagatctgagtgctgttttccttgcattgtctattatttttaccttgtctttcccctaagagaatttgaagaaaatcttcaccaatatttctagtgttgatggtaattaggaaaatagtagttgagagatgtaagaatagtttgagaagagtgagtaaaatgggtgaaatgacaagtgggaaccatgtagctgagatgtatttgtttagatgaaaagtctacactggttcttaatgtgaaaatcaaaccatgtatctaccttaagaacaatgttgttgtttttaatttattgtagcgatttagtttttttcacgtaatatttctattttctttgcagattgtttttaatttaaattgtggaatttttacttctcaaaatgtattaagtactgtattttttgaaatcttatttttaaataaatattttttaaaaacgtaggactgtttttatcctcttacctttcttacttaggaaaattaacccaaattctagatttcagcactaccaatgtaataggtcacttttaaaaattttataca

SEQ ID NO: 16480 - DNA, 1831 bp, Homo sapiens
gaaatcatcctctgaatttattataaatcacagatttcattgtgctctatatttagtcattctcagttgaattctagaatattccacagtacagtataagaaagtattagaaccaacttgcttgaactattttgaaccagtgttgtaattctatatgttaatcagtatttagcatttctgctccttttgagatgatgatggtttaacttcaggaaagtgacttttctgacttcttttattatcattgtgcaatttttagcaacaaaactcactatatctttgtcagttcttcagatgttacaatactgcctgctaatttgaaacagaaataacaatggtattttaaaaagtcattgatattactgatactttccattatcattatattttttactattattatgttctttttgccttgtccaccctagagaataggtacaaatgagtagtgagtatccacaaacttactaagatggagagaaggctagatggtgcatgaataatcagcatctcagcaacagagttgactggagccagtttctgacatcagagaatctctttgctgtaatcattttagccttatctcttatttataccatttttatgggaagagttgttagtgcatataagcatttagtttgaattatttaacttaaagaatttatattgcggtttctcttcagttggtcagatgccttttataaatattttagttttaaatataattgtgtagagtatgatcatgtgaagtgttaaaaataatgtggaaaactcagctatttaatgcagaggagaaatgaataggttgaccaaagtttgaaaaaactggcaccttttctggaaatctcttattgcaaagaaaagatactgagtgtatagaaaattttgtcaccagaggaaaaataaacaatatataagggtggctttcactttaacatttgggatattttggagttcttgatacctcgaaggtctccatttctattggtattttgaatatctgtaacatgtaatgtcgttcttataacagttcaacactgatttttttggtatcgatagctttatatataaacaaagatgcggacaaaatagcttaacagaagttgtgggcttttttgtggctttgcctgcctgtttgaccaaatacagggtttaattgtttgcaggctgttaactaaagggaaagcttacctgcgtattgcaagctatatattcttgccagtatacattggatgatattttaacctactggtgcctgaagttcgtgttttataacctcaacaactataaaacatcctggtgctattcactttagcattgagtgacatttttaattcctgtaccaaagagttaattttctttttggttgactgagttttcttctcacatcgttgtgtatttataaagtagaatttaatgttactaagaacagtttgattaacagatcttattttttgcatgctgctctggcaatttaatggattttaaatgtttctcatttggatttttttttaggtaggcatgtatggattttaattttgtattttaatatagcttggctactttaaaaggtagtttgataggctgaaattacaaaagataattgaagcacttttcacaagttgttttatttctgcaacaatgaataaaaaggtaagaactctaatttatataaatgaactatatagcttattgggcactttagtgaatactgaaacaaaatactaagatgaagagttaaggttcgttctcattacaaatcgagttcagcgtgtgtgtgtgtgtgtgtgtgtgtgtgtgtgtgtgtgtaatctttagtggctttaaagaa

SEQ ID NO: 16481 - DNA, 1161 bp, Homo sapiens
ttgtgcaagctaatttggccacatttggcctggtgacagaactgttcataaggaagtaatatatagataaggtaggtagatatcagttgaatgccttatattgtatacattcctttcaaataaagaccttgagaaaacagcagagccaagtgaagatcacctaaagaactttgtggctaatttatacttcatgtagtagcagtgggtactgggcagggtctctttcccactctgatgatttgtgctcttatttttcctagatttacctcatctagggcatattcttttccctcttcctctttacctttcctggtcctgatccctctgtactcagttcccctaaattattggactacaaactaatatactagaaaagcatacacttattttatttgaatgcagaaatgctatctatcagtatatatacataagaatgtatattacagtatatctatatatacttaacactgtaactttcagtattccccagttagcgtacctaactctcctgtgggttttgttaattcttattagactactagagaaaaaccaactggcagtttgctaagcatatctactggtgttgtttctgcgccctcttttggctaattgatgtaattatactggctctaaagatttactgccccataagtaaatagtatagccacattctgaacatatcaaaagtacaaacttaggaggagtgtatgtacaaaaatgtaaaattttatgaaaatgaacatgtttttatgatgttatttctagttcataagaatgtgatgactgctttgcttcatttatgtacgttcccattatattcttgctgtcaatcaatcacaaatttatatcagattaggataaactaagccattttatgtattttattttaaaccttattttggcagagtaattccttagaattggaaaagctgttactttgaaattaccaatttattacaaaacatagaaatgtattgtagctacaaagacaaccaagcattttctgtgttttaatgaatatctaaaaaactacatttagtttattttactcagttttgaaatgatttttttactggctctattgccttaaaataactaagagattaatgattctttgtataattttccttttctttgttcttttttttacatttcgcagag

SEQ ID NO: 16482 - DNA, 1149 bp, Homo sapiens
aaaattttcacttttaaacagtaaccaaatctaaatttaattattcaggttttacaaaagttgatacaccttcttatagtataggtaaattttctttttcaaatccaatttaaaataacctttccttttaaatgtgctgcaacgtttttaaaaatgcagcagcataggagtgaacaacagcaacacaaaacgggcattggtttcttaggagtggcttgcttacgttttcttcttttttcttcaccaaaaccaacatgaaagtaccactgaagtaaaacaccaactacctaccttactataaaggaaatgttaaaatttttttcacaataattttttcaattttcactattactgttgtaattattgattgtgattaaaatatttgctcccaggagaactcctgaccagtgggcatgtattcctattttatcctaagattttaatgagcaaaaaggggagagaatttgcaataacttcacaattaccttttctagtgcagttatattagaatgcatatgtttttaaaatgctagtataactagatagtatataatgtacagtataaagaggaatattgtgcttttgaaaagagtatactttttacttttatttatgtactagtagatgtaaaatttcacattgaaggtttatatatattggccaactcatatagaaattttatttataggaagctactactaaaaaaagtcactaactttgtgtacctataatccctaaattaaaattaaattttaattggctggctgtaatttgcattgagagaccttttactagtagctagtgttaggaagtgaacctaaaataagaaaatataatgatctgtgtttatcattagccttgtacaaatgtaaattactaatagtgatgttcttttgcaaggcatagaacatttgtatgaaaagacatttagtatgctttgaaaaaaactcagcttttagtttttttccattagaatactgcaaaacccatatatctttttaaaaaatttatgtactcacagtctttcccttgaagagaagattgaaaaagtctactgttcataaaccatgctaacattttccttttagctagttttgaaagtaaggaacaatacctgggaaataattaaacagaaggttaccattgtca

SEQ ID NO: 16483 - DNA, 1134 bp, Homo sapiens
ttctcttcattttgtccacgttaatgatttctagatatcttggtcacttgaactttagtaatatgaatcatgctgtgtattcaaactttttagcagagaaataataaaattccttttgtaaaccaaagattgtacaaccatctgtgttttgttttgttttgggtttttcttttctttctttctttttttttttttttttccccaaaataggttcaaaaaacaaacaaggctaacttgcacctaagattgaggagttttgatgcagtagagtagtaaactcctgtattttccagcttgctattgtaaattaaaatacctatttttgaaattttaaaatatttatacattgatttcaatagaagtataaaagagggagaggtagttcttttaagataataaggaagatgtgttatggctcaattcttgattattattgcgactgtaagcaatgtaagcaactctgaatggtttttaagactttctttttctttttaggacctctttgtttttagacatgaattggccataatgagactagcagcctttatgggcattactatgttagttggaataactggactcttttacactcaactaattggcatcatcacagtaagtatatttttaatgtaaagtaacatttatgaatatattacctaattatgaatgtaattctcaaaagttataggaagtttagaaatcaaaggagaaaattacccatgctttttaatactttcatgtgcctatgtaattttaaagtagttataatcaagtacaaagtatacacaattttgtatcctgtttttaaaagctaacaaatacagtgtttttatatgactatagacatcacgtttatagttttttattgatacacagtatcttacgtatttatggggtacatatgagtatctgttacatgcatataatatataatgatcaaatcagagtatttggggtctccatcaccttgagtatttatcatttctatatattaggaacatttcaagtcctctgtgctagttactttaaaatatacattgctgctgactgtagtcaccctactgtgctactgagcattataacttatttcttctgtgtgtttataaccattaaccacactctcttcgtcccccg

SEQ ID NO: 16484 - DNA, 1617 bp, Homo sapiens
tccctcttccctgctaccatttctaaaatcttttcccaccccatgtgattctgatgtgtccacatccaaagcccccactccttcccctgttgttctgtcttttttttttttttttttttttttttttttgctaaaactgttatgaacgatgactctcttctttttggttcacaagtcataggtatgcaggcctacattgctgctattcttctttcccatgaaaaagcctgtgttacactaggagcaaataaggttaatatgcaaagtaatgtggagacagagcttgctgatagagagagaaagaactgatgctattatttaagtccctagatccactcaaggtagtagggttgttgtcagggttaaatgagttaataatgggagtgctgcagccactgccgctgattccagatctcattgccacacgccccgacgactgcctgatgtgcattcctgattccttttggttccaagtccaatgtggcaactctcaaggatcagctgcttcataatcttctaaaggaagaacagaccgcccagaataagattacagttgttggggttggtgctgttggcatggcctgtgccatcaatatcttaatgaaggacttggcagatgaacttgatcttgttgatgtcatcgaagacaaattgaagggagagatgatggatctccaacatggcagccttttccttagaacaccaaagattgtctctggcaaagactataatggaactgcaaactccaaactggtaattatcatggctgggacatgtcagcaagaggaagaaagccgtctcaatttggtccagcgtaacgtgaacatctttaagttcatcattcttaatgttgtaaaatacagcccgaactgcaagttgcttattgtttcaaatccagtggatatcttgacctacgtggcttggaagataagtggttttcccaaaaaccatgttattggaagtggttgcaatctggattcagcccaattccgttacctgatgggggaaaggctgggagttcacccattaagctgtcatgggtgggtccttggggaacatggagattccagtgcacctgtatggagtggaaagaatgttgctggtgtctccctgaagactccgcacccagatttagagactgataaacataaggaacagtggaaagaggttcacaaactggtggttgagagtgcttatgaggtgatcaaactcaaaggctacacatcctgggccattggactctctgtagcagatttggcagaggtacagtgaagaatcttaggcaggtgcacccagttttcaccatgattaagggtctctatggaataaaggatgatgtcgtccttagggttccttgcattttgggacagaatggaatctcagaccttgtgaaagtgactctgactcctgaggaagaggcctgtttgaagaagagtgcagatacactttgggggatccaaaaagagctgcaattttaaagtcttctgatgtcatatcattttactgtctaggctacaacaggattctagttggaggttgtacatgctgtcctttttatctgatctgtgattaaagcagtaatattttaagatggactgggaaaaacatcaactcctc

SEQ ID NO: 16485 - DNA, 1134 bp, Homo sapiens
gataataaatgagttcaccctttttttttctttttttccctgagacagagtttgctcttgttgcccaggctggagtttaatggcacgatcttggcttaccacaacctctgcctcctgggttcaagcaattctcctgcctcaggctcccaagtagctgggattacaggcatgtgccatcacacccggctaatttttgtatttttagtagagacagggtatctccatgttggtcaggctggtctcgaactcctgacctcaggtgatccgcccacttcagcctcccaaagtgctgggattacaggcgtgagccatcatgcctggccgagttcagcttttattcacattttttccccaaagtgatttattcttcaaagtagacagttatgttctatagagtgttttgttttttctttaagaaaataatttacataaacagagattatggtaaacattttaaatcttaggctgttggttaaatttaatggtttaagcactgttgggttctctttaattaatatttgcagaaggagaacatatgtgtttcactgatatgtatggtccagaaaaattacttaattctcaaaaatatgttgcattctcatattgtgttagggaaaattccataagtagtctatttttttttttcttttgctgactgttaacatccaaacacctgaatgaaaactgactcatttctgtattggtgtttaaaaatattgatttgcagatgttcacagaacacttgcattttttgattcacattgctaaatcaaatgtaaaggcaaatatgtatatttaataaatgagaagtatttttttattactgaaatttattctcaaagcaaatgtattttgtagatgtttcatttgggagattttgctttgccttaaaacatacaaaataaacctgtcttgtggtctgcccacctcaaaacctctgttaacttgacatgtagaaggagttcagaattctttgataatgtgtggttttcacttttgtttggattaaacaaaaataaaattagagtccatagcactttgtaaactaatgtgaagtttcttgttgaatcataaaagctacctgtatgtactttataatttaatgttctgttagtaaaaattgtcagcatttta

SEQ ID NO: 16486 - DNA, 5210 bp, Homo sapiens
tttattgttattgtcttcaggaacaactacaaagattactccctggagtccagactacacttcagaattcaggcagctcttcacctctggagaaaaccttcctcagattgatcagaacttgaaggatggaatttttcctcaattagcatcggcatctgctatagattcaaccttatattaaagtggaaaaatgatcttgtgaataagagacaaaaaaacagtttttttggtcaatattttctatcatctgagagatttactgttggtctacataattttttttcctatggaatggcattctatattatctagaaaattcttatattttgcctcccccaaaagaatttcatattatttgaattagggggcgaagaagtcttttgaaagacttgcagatgcaatagtctaattagattatttatttttttaatgtgaaaattaatattgtttagcaaatagcttacaagttgagccaattttggatttgttgggtagttaaacttcagagatattttgttgcctgtatttaaatttcagaagataaataaatatcattgcatttaaaatagcttaacagtgaccttcagaagacttctgaaaaagacagtctgagaacatgaacacggatcgatataatgtacttcatgggttgaagagacctttctctataaaggatgatgcagtattcagttagtggttttttactcttcatttgattaaaggtggtgacgttttggagagactgattttgaatgtacttaagtctattataataacaaaattcaaaacccctgtgtatctaaagggaaggaagtgtcatattttaggaatttttcttaaccttagcaatgagagcctaaaatacatacatggattatttttcttctaggaagtaaatttcctgctgctttaaatgatatgtaaaatatcaataatttttacacttaagatgttggtaagacctagttttctaatctctctagcactgtgatgtctccttgtagataatctggaccttgcttagtcctttagttgggaaacagaatcagggcatagagcagaagagagcttgacactccatatggtcctggttctgctacccattagcgattagtgaggagacctttagggagtccactgtgccctgtgtgtcaccacattttcttctgtgaaatcaagattaaagaacagatgactttcaaggtctttttcagttttataactgtgagtctatgtattaggtatttattttcaacaaatgactttaaaatgtcgaatgcaaaccattcccacttggagtgttttatttttcaatcatcatcattgcccccaactccccacatgtatgtgttgtggcatccagagtgagaaaagacaatttatgagttgatgaatctgggccttatttctatttccattttgaagaataacttgtcatagaagcctctgcagtttaacagaaggagccacatattgggagtcacgagttcatctctgtgggttaatagttccatgacacggagtacgtagctcagcttttcaggggttcagttgccccactatggatagcggtgtggtatttggtacttgtgagggctcaattagataaaacatatgatagctttttgtaaactgtaaaaggctatacaaaagtatgaattattataataattatggttttttatgtctggattacagtatcaacacaaaagtattggctgatactgtggtttgtgttgtaaaatgaaagaagtgtagaaattcaaataccttactgtgtattcatgtgtttgatgttgacagtaggctacccaggttatatgaacctgctcctgccgttccctgccacatggacctgtatcaagcagtgtgtggcttgttttcttcaaggtactgattcttgaccaacactgaggatgtatatccaatgaaagatagatatcaatggcggtagatatcaatgtgttattagtaatacaactttaggtacagacaaaatagaaaataaaattaactgtcattataattagtagtggaaaatacattaaaaattatttgtgtatagctttggaaaaaagttttccaaaaaaagctttttggaaaaaagctcttagaagagctttggtaacattatttttgaaagcgcacactcacattgtgactgtgggtatactgagcatatattcttacattgttactgtgagaagctgcaagtcagtgctgcaagtcagtaacaaattctcttttggggataaaatgaaacagttttaagcttagagtggccatttttattttaactctgcattactaaacaaatataaaagaaattcatctccatttaaaaatcttttttgttatttatattttgttttatttttgtttcctattctttatgcagttacctgatactatggacagtatatccagtggatcttttagtactgtaatatcaaaatgctacaaatatttatgtttcctgctatgttcaagatattgtagtggcaccaacttcttgggcatcagctaatattgcattttggagtcattagggtgttctgtgaagaatgaatactgaagtgacagttttatctagttttttgaggggcatttatgatggggttgggttgccattgtgtctgacagtgcaattcatgtagttcctggcataattgccttttttttttccttaatggagaggcagggttctgattggtgctgtataaatttaagtaactttgtgctttgtaggaatggtgacaaggaaggcatgatttccccctgacaaggaatgaaaggtgaactgtatcagctcttatctggacatatatgttaatgttttctatgctccctgatacaagaagtttccaagttatataggaaaattaagtccattgatcctgtctttatcctcagagggcagaaatgagacaagtggataaaggctgtaggaagctgaattccagattaatcagtgccgaggaagatttttcattatcggaaaacccaacagtctaaaatcaataaccagttcttctgcaaaggggtgagtttaagcagggctaatgtgactgtcatttctgcctgtcctgcaagcttagactagttgaactttgaggtcactctatgattcttttattagggcttcaaatcagcagggagtgtgtaaagaaaaaatgctccccccctaccatttcaaataaaagtgaatgttttctctttcaaagctactattagaggtagttgtgatagacactaacaatccccggtgttaatactttccactccttttattttattttaatttaatattattttattgagacagagtctcgctctgtcacccaggctggagtgcagtggcgtaatctctgctcactgcaagctcctcctcccaggttcacgccattctcctgcctcagcctcccgagtagctgggactacaggcgcccgccaccacgcctggctaattttttgtattttgagtagagacggggtttcaccgtgttagccaggatggtctcgatctcctgaactcgtgatccactcctttttaaagtgagtctagtctgttgatcttcataaataggagggttttcctccagcttggacattaaaaataatttttaaaaagatctttgtggctaactggaaaatcttctggaattatctaatgcttcattcatttccctccatttctgttttttttttttgtatttatactctgcatatttagaaatcttaaattcaaatacatttagttaaaatgagttgacgaagactccagtgatgttttaataccctaagattttgtgattccttgggcctggaatggatcttagaaaattaccttgccctcatgagcctgtaaaccgtgttgtttcccctcagtcttgctctgtccagtacagtagcccctcgccacacatggctgcggagcacccggaatggcttacagcacatgtgggaatggtgctgaatgctgaggaagcattcactcatacgtgctgcacttcttaaaggcctcccaatagcctgctttgcggagttctggcttttacttgctgtctactatgatcacctgatttgtgcttcacatacatatctgtgaagtttgctttttctatttaaagtgcccttaaactttcatttgatcgtgtttatctgcagatggtcagtgtcattggcatatttgaacattattctgccctccctccgccaaactccttatgtactagattaagaaattttatttttgagatgatgattttaatttgattttacagacattcttttttacaaagtacagttgttagagttatagaagagtgattcacatctttgagaagatagatttcatgattaatatatatattttttgagacagagtttcgctcttgttgcccaggctggagtgcaattgcacgatctaggctcactgcaacctctgcctcccaggttcaagcaattctcctgcctcagcctcccaagtagctgggattacaggcatgtgccaccatgcccagctaattttgtatttttagtagagatggggtttctccatgttggtcagtctggtctcgaactcccaacttcaggtgatctggccgccttggcctcccaaagtgctgggattacaggcgtgagccaccatgcctggcccaatattttctaagataaaattattctgagaaatctagtggaatcttttccattgctttgttattaatgtttcaacactgactttctcaactaggccagtattactatttaaaggtttttagaggctggcaatggtggctcacgcctgtaatcctaaaactttgggaagccaaagttggggggcgtcacttgggaccaggggtttgaggccagcctgggcaatacagtgagaacctgtctttacaaaaaaaaaaaaaaaaaaaaaaatgagccgtgcatggtggagtgcacttgtagtcctagctactagggagacttaggtgggataattgcttgatcccaggagtttgaggctacagtgagctaagatcatgccactgcactccaccccaggtgacagagtgagaccctgtctcaaaaaaaaaaaaaaaaaaaaaaaaaatatatatatatatatatatatatatatatatatatatatatatataaaataaaggtttgtggacacatgttacccatttagagaataatttatttttgaatgtgtatga

SEQ ID NO: 16487 - DNA, 1198 bp, Homo sapiens
gaatacgttttctgcatattggattacattactggaccgtcacatgtttctaattgtatgaaagatcctaagcccagtgaaatattccagtgtttatatccagtgatattcttggaaacattttatgtaaacaactggcagacatttaaaaatatttttctttacttaaaagtaacaacaaaagtttacattaaacagaattattattcatagtatcggtttaaaatatttatttctgtatctgtattctattaccttccaaaagaattaaatgcttgtagatatttaataaatatttgttatatgaatgagtttaaatttttggtaaaaatatatatactgaattgcttcacagtataaaaggcaaaagcaaaggaaaatgatctgtaaatattgtcctgaggttcctagaaaccgaagcaaaacacatgaacattgtttggggatcataaaggacattgaataacctcatataactgcaaatggttttcatttttcctcattaggaaatgatgtatgtctggaatggtttttcaatagtgagcaaaagaaaagacctttctgaaaatctgttagtaactgttgaaaaagctgaggcagctttacaaagtcaaagtaagtatacacagtaagcaccgaggagcctttgtctctgctccatgactgctctcctgtcttttccctgtgcacatctgccaacattaatttgtgtacatcccaaggacaaagagcttgagctgcaggggtctgggtgattgcagtcaaatgcagggaggaatgatacacactgcaactgcatgaaccttggaaacagcttactaagggaaaaaggccaggccagccataaaagaccacatattatatgattccctttacacgatactcagaatagggaaatctataaagacagacagcagatgagtggttgcctagggatggagtatggaagttaggagttatgatagctttctggggagggaggtgatgacagtgttctacagttgactgtggtgatggctgtacaactctgtgaatatcctaaaaaccattgaatggttactctcagtgggtgaattgtatggcatgtgaactgtatcttaaaactatgacaaaaaagatgaagagaggaagcccagcattggaattttagcgcagcacaaggaaacgtgcacttccctctgggttgagtttgctgtga

SEQ ID NO: 16488 - DNA, 2375 bp, Homo sapiens
tgggattagactagatacaaggtctgacaactactttggtcatggctcttgtgaccagcctaacttattccaaaatcttgtttgctcttggcctttggctggcgaggagagggattattttatataagcctttatttttgaaaaaatatatcagaatctctctgtcaaaaaatacatttccagcggcctttattttagcacttatttcagagccaaaggccgtgtgctgcccctttttcaacagaaaacagtttgcttgcaatctgcctgcaggctgccctcttgtgttgaaatagggaaatgcatattgtccccttcaacctggaacattttgttctgcctgtgtgggtttacattggaaagtccttggtacttgagtttttaagaggttacttttcaccacccatataatttcagtgattatggtgaaggaataaaggttactgtgcaagtcaggacatgcatttactaggatttcttatgatcagtatttccattgaattaaaatgtctgaattccctgtgttcttcccagggctaaggagagtatgtaccatgccttgggctacagtaccattgtggtgttgcaggctgtcctgaccttcgagcaacaggacatccagaacggcatttctgccatgaaggacgctttacaaacctgccaaaagtatgacgagtcattaaatacttaagatgtgactgcaaacttttatgcctgtgtgacaaaaataatgtcatttgcctgaccaaaagctctgtgtttgaaattggccacagttacagaaaagaaattcagcctcgaagctgaaggattcccatttggcatctacatattccacttttctttttgatagcctggggtctgagctacagagatctgggggggatttcggggggatttcagtgggattagcagcaagcatctctcaatgtagatgacattaggtactgcatgccaaaccaagccacacaaggaacattcttgttttaagtgggagatgcaaattcatgagggaatgttttatttgtttaagaaggacctgtttttgaacacttttgtttggtgaaaatgagatagatttttagttttattttaagctttactttgtgtgtataggaagaccctatcaaaatttttttcaaggggtaagttattttgatatcttttaaaaaatgataggtgtttcacagtatggaagatgcttggtttgtggacatttaggaatattcaagaatccaggaatggctggctgcagcaccctgatcagatggatgggaggaaatgacccctgttgctgtcaattgcttgatgtgccccccataggactagggcagaaggttcatgatcagaaggttaacatgggtgaaattacatcctgatgtaattgtgttgtaagctcctcaaatgaagagagcttccaaatattgcactttaacttcatttttaacctgtggagaattttaccacaaatactgattttagttatagggataagggaaggtactttggaggttagttttcattggtgtgtgtgggtttccccacgtggtgttcagtagcacagactgagttcccacaaatggctagccagtgctgcatgtagagtgttggaaaaggatgatctgtgtcctatagacttcagggtttagagtttcagctttttgactctttggtgtgatagtgactgaaatgaacgtcaaatgaaaatgagctcagcctgattttttttttctattttctatctccctttttatttattcaatgtagatacaggaaaaaatacacagttgtagaatctttctcaagtcttctttctagaggatccctggagcaactgagtgaaggtaaaagtcatttaaaagatcacttttttccttgattttaatagttaaatgatcatctcataaaattccatcctgaagtatataaagtaaatggaatgtctttttctcttccctatcatactcaccctctggaagaaatcattgttaatagttcattttgaagccttttctgtgtacatactcaaatacataaataaggtacacataaggtttttgttgttgctcatggattgttcattttttttttgcaagcatagaatcacataataggtgttgtcctacaatgtgaatttgacattgacacttccccagatcgttacatgtgagtgtttaacagctgtgtggtattccataggattgatatactgtactttacttggcttttctctatggtttttattttttcactgatatgaataatggtgtcctagaatccttatacatatggattcatgcattttaaaaagttatttcataagatagattcctaaaagtggaagaaccaggactgacagtttgaaaacttacaat

SEQ ID NO: 16489 - DNA, 1144 bp, Homo sapiens
ctccagctcaggttaacaaacagacattctcctgaaatgtttcctgaaatgttcaatcttgagtctcttgaaaccctgttttttgacagctgtttttctagtgaaacttttcctccccctgtacctggatacccacttccttcccttcaagtctgggtaacacatatgcttctgcagacaagtatcagttcttcctgtgctagctgcttgccttcttatctcagtttcctgcccatgggtgctgttaccagtcatttagtgtgaatctgatactgtgagttcagtgaagctcagagtttccatctagccatctgttgacagccgaccaatctccagtcttggatgccccagtagcatctcaggcggagtctcctgaagttactttgtattcacttcccaaagatgagtacctggggactcctgtgggtgcttttgaggcttcctgggggagagattttccttttttgagcctcccattggccaccaccttagtcagcactctccttttctccccctgtgcttcgtggatctgtgctgcctcctgatgcaccaagtccgtttatacccagagccaccgcggccagttgctgtattggtgatgtcatcacacctctctaaagggacttctgaagtggggagtgcctggcagttcctaatgccatcatgcatcttcagctctttatttaaagactaggtgtgtagtaaatgctttttgttgtgatctgtggatgtgtccccttggtactgctgatattatgctgtcatatacatagggcctacgtattttaaaatattttggtgaaatgatacattgtatgtttgttggatctgaaggtaactagtgagtgacaattttcagtctgacttaatgtgttgagtattgtgttaggtgctggacaagcaaatgcagctcctgcctcaggttatggtctagtggagagtggggacatgtgtgttctgagaaccacctggtggaggagggatgccagggtactttgtgagcacagaggagggcacctctcctgggagagagggtagtcaggaatgatttcctggaggaggccatttcttagacattctgagtcaagaagaatgagtaggggttagccatggagaagtgatgtggggaagggggagctcttga

SEQ ID NO: 16490 - DNA, 2311 bp, Homo sapiens
cttatacagttttaacttacttagatttattctagttaagccataagttcaacgtgtaaacttgttttcattaaagaatttttctatcaaactctgctagtaaattactttcttgctatttacaagagtaagtgatggaattctgggtttgctgccaaggaaataatttcttagttaactggtcacagaggttgtgctgttttgggaaacggggtaactaaacagtaagctcaagatgataaaaaataaaggtaatatttatcttttgttcaccctccctttcttcccatgacccaccagatctatagttttacaaagaagccacagaatattccaattctagagatagagcatcattctcataatttatgtcagcttgtacaggctgaccttgctctaactagttgatgtatgttcgcttcaagcataattgctgtttctttaatcataactctcaagaaatggtgtcataggctgatttacagataacttctcagaactcttgataattattcataagacttaagaactttcaggatcattgaaattgttcattggctcaatttgtgtgtgtggtcaaaactccacagcttgacaaggcaccaaaaggtaattttgagatagataacccccaccccaccccaccccaccccaccccacccctccaaaaagtacgtgtaatatgtatgttttaacacctcttttgggctggtatgtgtgtgtatgtacgtatgtgttttgattactggataaaagagtcatacatcagccgggcgcagtggcacgtgcctgtaatcccagctcctcgggaggctgaggcaggagaattgcttgaacccgggaggcagaggttgcagtgagctgagattgccccactgcactccagcctgggagacagagcaagactccatctcaaaaaaaaaaaaaaaaaaaaaaaaaaagagtcataccatgaccaagcagaactgaccattgaaggttttcttagctgcttggagaaattgcagatacatctatctgaatctgagaactgactgggatttggtatgtgaacaactggagagaaccatacactttataattaatattatatccagtgatttcaaataatatgatagattttgctgatacagtactgctgtctgtgttcctactcatacacttacctggttacagatgttaggtcaagatgaggtctgcatctaatcctgtataagagcagagatttttcatagggtgctgtgagggctttgctaactctattttgtccgattggccagaaaaaggatgctctaatggaaatagcaaacctgtatcattaaactctttagaaacaaagaaactggtttaataggcagaaatgtgtttatgtttgtgtcgtgtaattctgcaacacaatgttagagatgactgacctttctcctagtaaaactagaatgtctaattgtccttaaatggtactgatgcctgaagaatgtttaaagaaatagctattgcttctctagtaacttctgtgcatgtgtatccactattatataaaagtcaaattcaactaccaagcaggttgacatgttcatgacaacattttcagttgcctatcttcattagctaatgtgttacatgtaatttgacaggcgtgttacatttgattgaaataagcataaagaaaagctgcctcgaaaaaagagaaaagctgtcttaaatcaggggttttatagctccagaaatatacaaagttaggaatttcttttgacttgaacttggtgggatacctgtataactgatacataacacacgggcaaactgtgggagtaacctggttgattaacttttctcctcagtttcaccagggaacaataataggtacctgagtctttgatgaaaaacttaaccttaagaactagcaaaataacattctcaaataattaataaagaatcccagtagcagaaatgttttaactggcatgtttcttctttgtccgctaaaatgtattgacaccacacatggaataatgcattatgacaataattaactttttgaagtttggtgttttgagagtatgaaatgaatgaataagataaaatatccttgcatatgcatgtaagacctataaggaacgcagtattgaaaataaaggaatcaaaatttttacccatggaattttagggttgggtaaatcattcatttatcttaaatctatggtttgctggcagttatcaatctgctcaattttagcattgttgtatacaagaaagtaaaaatttaggtataacataagccagcctcttaagttctctatactgattatct

SEQ ID NO: 16491 - DNA, 1167 bp, Homo sapiens
cttctcggaatccctgcctttttctctcccatgcaccccctcccttttggggcttaagctcggtggaaaaagcccggagaaagatggggcgggcagacgggcgatttctggccgggcagcatccctgcttcaggtggtggcgtctcttcggtggcggggtggaggacctgctccagcgcggaggcagcgcactggcgggggaggagcgggaggcggccgtcccctcgctctcccacccccacccgccggttcccctccccctccccttgcggcccctcccttcggggttcttcgctttaaccgccctcggtgctctccctagcaggcgcgtcgggacgccccgaggcatcctcccccgcccgcgggcccggtagctgggcccgcgtccgccgcccgcatccccgcgccgccgcatctcctcgccgcctcccgggcttcggacccccggtctcgcccccgaaacatgactcgcgatttcaaacctggagacctcatcttcgccaagatgaaaggttatccccattggccagctcgagtaagtgatttgtagccctcgcgcttagcagtgctaccctcctctccagaggcctgctgcccaccgtgtctctttattttttcttctgtcctttctctccctcgctttagtctcatttgtaacctgacctttcattttagttttttgcccaataatctcccgtgtaattatgaaaatccagacgtttctacatacctgtgtatttccctatggtttattggcagacttggacagattttcttcctaggaaatatttaaatgcgttgctagttaatattccattgtaggtgaaataatgaagagtgaatttttgtttaaaaattagtgaaacattgacatttccatagttttggatcaagtacaaaatatcaatggaatttgtgcagattacacacaaacacttggatgtcagagaagtgcgtatgtgattaaattggatttacagggttttaaaaaaaataccttgtacttgatgaggccttctggatttgcttgtttaatacagattcaggactggatattcttgaaagtattacagtagtttagtaccgaggaagggccagaaaattcatttctccttttttatttgagatgtttatgaccttgaagaagttgttttacctttttgtttc

SEQ ID NO: 16492 - DNA, 1193 bp, Homo sapiens
atccaaatcttttttaatccaaatgattttaatccaaatccaaataacaggaggttaaaaaaaaaaaaaaaactaagcatttttacatgtacactgaattggatcagcattattgttcattataatgctatatatatttttggagcaacatactatagttgtcataaaactatctttattcttctcctctaaagtgctgttgtaaattcatttgacctttactgcaggaaaaaaaaaaatcttttttatataggatatgaagaccaaggctcagtctgtaacaaatagtggaccattacaaaagaggaaagaaaaaagccagggctgagcagcaagaagcttcagttcaatttcacctcgtatctttctaataacatacttgtcactttattaccttccagtaatgtgaacgctgctgacaagactgtcacactaacagcagacaacaccctctctgcttcagcccagctctcctggctacttattgccctggccctgaagggacacaaactaatagtgtgctttccagttcagcacttggccatcaaatataaaaggatgcgtaattgcctgtttatccccttgtgaaggagaaattgactacaagggctaggctttcccatcgagttccctgatgtacacacacatccacaatcagtcagtctctctctctctctctctctctctctctctctctctctctctctcccctctctctctccttccctcttattctcccctcctaacatacaagcacatacacacacctactgtatctgtgggaagcccaaggctgcctctcgatgccctctccagctattaagtggacagtaacaagatgacttcttaaataaagggtcagtagagagatgctgtctgtgacggcatcctttgcttctttgaaaacttaagtgttaacaattccatcttgagagtaatgggtgtggccctataattagagcaaattttcctgcaagtcagtggcataagtaagattatattgccccctaatctgtagggaaaagattaaaatatttttcttccccttcaaaaagtgcacatgttgtaaactggttacgcacagtggtcatttttttttcttatccttggcatcaaaccatggacgtaggtgtacaaatgcatctttcaatgacccctccaaatccatagtgtaacatgatagattaactttt

SEQ ID NO: 16493 - DNA, 2727 bp, Homo sapiens
ctatagtatcactatttaataaggactaaggtaccatttttttcatttatattggatttcacagcaagagttcacatcttatactaatatatgctaaatagttgcatagtatatagatcattgttgttaaaaaagcagtactgaaggcattttagatcacagagccccagtggtctacattttgtttgctttgacattattaaactcaatctgtttctctaactgtgactctaattactacatttgcatggcagaaaagtttgctttgtgggttgacttttattaacagtgcttgcatgttgttttctgctcttgctcagtgttttatgagcacacagagcaccttcagttgcattgaataattatgcacaatcaataagtttttgtgtttgtctttgttgtttctttgatgtggcctctaggatgctgctggcaaggtgctggaccgctgggccatcatgtctcgagaagaggaaatcatcacccttcagcagtttctgcggtttggagaaaccaaatccattgtggagctgatggcaattcaggagaaagaagggcaggccgtggctgtaccatcttcaaagacagactcagatataaggactttcattgagagcaataatcgcaccaggagtcccagcctccttgctcacttagagaacagcaatccttccagcattcatcacttcgaaaacatcccaaacagccttgcatttctgcttccattccagtacataaaccctgtctcagcaccactgctagggttgcctccaaatgggctactgttagagcaaccagggttgaggctgcgggaacccagcctttcaactcagaatgaatataatgagagcagcgaatccgaagtttctcccacaccttataagaatgatcaaacacccaatagaaatgccctgaccagcattactaatgtggagcccaaaaccgagccagcctgtgtctctcccattcagaattctgccccagtcagtgatctaaccaaaactgaacacccaaaaagctcattccggattcatcggatgagaaggatggggtcagcctctaggaaaggaagagtgttctgtaatgcatgtgggaagacattctatgacaaaggtactctcaaaattcattacaatgctgttcacctgaagatcaaacatcgatgcaccattgaaggttgcaacatggtctttagctccctccgaagtcgtaatcgccacagtgcaaaccccaatcctcgccttcacatgcctatgctaaggaataaccgagataaagatttaattcgggccacctcaggagctgccacccctgtcatagcaagtacaaaatcaaatctggcactcacaagccctggccgacccccaatgggttttaccactccccctctagaccctgtcttgcaaaatcctctccctagccagctagtattttctgggctaaagactgtacaaccagttcctccattttatagaagtttactcactccaggggaaatggtgagtcctccaacctccctcccaaccagtcccatcattccaaccagtggtaccatagagcagcaccccccgccaccctctgagccagtagtgccagcagtgatgatggccacccatgagcccagtgctgacctggcacccaagaaaaagcccaggaagtcaagcatgcctgtgaagattgagaaggaaattattgataccgccgatgagtttgatgatgaagatgatgaccccaatgatggtggagctgtggtcaatgacatgagccatgacaatcattgtcactcccaagaggagatgagcccaggcatgtctgtgaaggacttttctaagcataacaggacccggtgcatttcaaggactgaaataaggagggccgacagcatgacttctgaagaccaagaacctgagcgggactatgagaacgagtctgagtcttcggagcccaaactgggcgaggaatccatggaaggggatgagcacattcacagcgaagtgagtgaaaaagtcctgatgaatagtgagaggcctgatgagaaccacagtgagccctctcaccaggacgtcatcaaggtgaaggaagaatttacagaccccacttacgacatgttttacatgagccagtatggactgtacaatggtgggggtgccagcatggccgccttgcatgagagctttacatcgtctctgaattatggcagccctcaaaagttctccccagaaggtgacctatgttctagcccagaccccaaaatctgttatgtgtgcaagaagagtttcaaaagctcctacagtgtgaaacttcactacaggaacgttcacttgaaagagatgcacgtctgcacagtggctggttgcaatgctgcattcccctctcgccgaagccgagacaggtcagtaaatctccattggctgctcctgctgggggtggagggtgccagttttcagtcatgttggacttcacactaaaagaaatccaacttagatgtttttggtgcactgtaaagattgtccacagtgatcatgtgataactaggctgccatgctcatgaaggattgttgcagttggtgcttgtgatgattaagcatgcagaatcatgtgccatcttacccgtaatgcacgccatttttctctgtgctctgtgtatacgtgtgtgtatgtgttttcatgcatctaggtgtgaataagttaactatgtacacggttccctgcttccccgtgaacctt

SEQ ID NO: 16494 - DNA, 1181 bp, Homo sapiens
gtgtgcacaaattactttgaatataattgtatatggcgtttttgtaaaagtaggctataaaatgtgtgtccgaaggctgtggaaccccataatgctctattagtgtacaagtcattttatctggctaaaactcaattgtcttgtagccctcaaggcatcaattttagcattattgctctcaacaacagtatattgaatattatgtcagttaaaggagaataattatcaaggcaggttagggtggctgttagtcttaccacatattgacttggttagcagttggctacagattgtgttcctgggcaaatgaagatgtacggtaagttgaactagtcaagccaggatattaatttaactctctgtgggacaaagcctgcatcctttatgtgtacacagctactcctgccttctgagatacctttaaatgtggaagaatgacagttgtctgatctgattttgaatttttggatgtagggggaagaggggagcagaactttcaaaagtatgtggtttaagaggttattattagaaaaagggagatgatagtgatgctacagatacatttaaaaggctggcacatcggtcaaggatcctgtactttttttataaagttaattttcacctatgtgagtgtctatataattcacaagctagccagttgggtataaaatgcataacataacttggactacaactacttaagaagtcaggtaatatattaagaacccaatattctcctgtgtacttattaaagtatttattcagaaagtacagaaagttagcttttaagcattttccagaaaaccacaaaaatgggaatatgcaattagatgataaaatctaaatacaagggagaatatgatgtttttctactactaaagaataattctggccaggcgtggtggctcacgcctgtaatcccagcactttcggaggccaaggcgggcagatcacttgaggtcaggagtttgagaccagcctggccaatatggtgaaaccctgtctctactaaaatacaaaaattagccgggtatggtggcatgtgcctgttaacccagctacttgggaagctgaggtgggagaattccttgaacccgggaagcagaggttgcagtgagccaagattgtaccattgcactccagcctgggcattgcagcgagactccatctcgaaagaaaaa

SEQ ID NO: 16495 - DNA, 1257 bp, Homo sapiens
tgtcagatattatgtgttatatcagaaagcattgttgagaaaaattcccggggaagggccctagcttccccttgccctgtgcaccgtgattgtggtgctgcctggagtgtgcataagtgtgtatctatctgtatatctggagaggggttagtgcagggtgtcatttggtgcctgacagtggaacagtgcagttgactcttagctctgctatccaatgacatgcagtggctgagagtttgaagctgatggttgggtctccagtgccgcctgcacacctgacaggcagctgttaaactgagcaaaggcaagcttggggagtcacaatctatgcataaatgatagggatatctgtgcagaaggtgcgaaagaagctctgaccccctccctcccccaaatctcccccttcccaaatgaaatgcacagttcagccagcttcttaactacactacactcctgctactggctgccaagaggctcaaaaaatccaccttcacttttcagtcagaagaggcagaagtggatgtgagagaaagagagacacagagagacagagagccaaagagggcaagagacttgactttaagagactcctgtactgacaactccatgcagttcggaaccagaacgactacggctgaaccagggttcatggggacatggcaaaacgctgatactaacctcttattcagaatgtcccaacaggtaagttactttctttcttgattttttttttcttttttttaagaaaccttgaattgttatgggcacttttgtttctggtgtttttctttctaaatactttttaaaatgtggtcacttcctagttaggctcttgttttgtcataactgtgttactggaatgtgcagggttacttcatggtttccctaagggcgtcttaaaagaaaaaggggaaaggataccgaagtaaaagaaagcagagacattgttgaaaagtttcacagtacaatctgggtcaggggaagacttaatttatttctttgttttctgttgagaatgaaaaaagccacctcccaacaaatgtatctatcaatatgaatcacttcgtccaaagtgtttgctctctcggagtaggttccgcaacctaaaaaacagtcatcaaatctcggggcccctcagaacagccctactgacttcatgtggctggaggcagcttcgttcagacctgagaagagagacgaggctgtgcaggcttggctgccagcgccgagggttgctggaggagtcggcgtgcgtgg

SEQ ID NO: 16496 - DNA, 1183 bp, Homo sapiens
gacttgtgggctcccacaggagtcatggtgatggatgatatcctcttagcctggtgggcgtggcatgtgctttttaaaacatcatctgagaccagccagtagtcacagaactgctgtttacacagttctcaggaggctgtggtttcttagaatatgaccatgagccatttcacagaaaaaccatcccaccgaagatattgtctatcaccccaggggccatctgaaggtctctttgcatttctccatgcaaagaggagaaagcttttgctttcacactgtcccttcccaaatatgtgagtcatggaattgtcaaagtaagccttccctcaccagcaaattgtctcctgatctgaatgaatttgtctcttaatgcatccatagaaaagtgttaattgtgggttcaaagcattctctgcaaataggcatctcagctcctcacacttatggctatttctgacgtatagccagttttcttccctccttgctattaaagccagagcggtaattccaaattatttttcagtaagacagttaatcagcattattgtgagagggactgaaaagaaattctccattatgaggaattgggaagaaatctggtatccaagcttaaatttcttgctatacagaaactatgtatgtatttaggctatttctgaagggcacagggaagggggaacaaatatcttcacttcagttttatttgtgaattacatgtttcatgaatccatttggcacagagacacaaggaagaaaacactagtaaccatctttccactagttcatatactgagaaacagtaaatacctttcctttccacttttaccctgtgttctttgaacatcatttgtgcagattctgccctcaatgaggaccaaataaagatgatttttgtgcttagcagtttaaggtatatggctgcatatgcaaaactctttcccaattcagtcgctacttttacttctgccctttctatccatcgtcttcattttgtgtgtacagtgctgtgtgtaagcttatcagtgtgtttttttatttgtatcagtcatgaaagtcctgttaggtatgcagagttctatttatctagctgtacagactctttcagaggtttaacgtgctgcttccgatgtgccacctgcagtagtggatcatgtggagtgaaaggcaaatcttactgcttaat

SEQ ID NO: 16497 - DNA, 1095 bp, Homo sapiens
gtctgccagcaatctttagcatctgtcagcctgtgaatgtgtccctctaatcctcctttgcatggctatcttcccttctgtgaatctatgaatttgcttccagcttttcttgtgtagggtgttcttcaggttgctacttcaaggtcaaggtctgattcaagcccttcctcttccagcagtgttgccctcaccatctcaactcattcaactcaaccctccttgcaatttgattggatttactgccatttacattctacaatacttactatgtggctgttctaagtagagtgctacagcatcttatctgacgcatagccatcttcccctctgtgcatgtctgtcatggtgtcaaatttcccctttcataaggataccattcctattggattaggatccaccctagtgacctcattttaacttaattatctccataaaggccctatttctaaataaggtcacattctgaggtactaggaattaagactaatatatcttttgcaggaacacaatccaacccataataaggagaaatacttaggtttgtagggttttagtgagtaatgccacctacaaatcagtaaatagagacatttatagcctgattggatgaatgtcaaattatttccttaatcccaaggcacttgatcctaaatcttaaatgccttgtggtctacttgggatgataactagggggaaaaaaacatttaagcaaagagaattgtgtcagattaaatgctatagcagtttacttagaatagctgtgtagtaagtattgcagaatgtaaatggaagtaaatccaatggaatctcaaggacggtacagttgatgtgagctgggatggtgagggaaaccttgctggaagaggaagggcttgaatcagtccttgatcttgaggtaggaacatgaagtcaggaaaagctggaagcaaattcacagatgtgaaagagaaacatggtgtattgggaagccaacaagtggctgtgcctggcagaaactcactctgtataaaggaggtaattctagaaaagaaaaagggttcatttagtggaaggtttttaatgtgaagatgctaatcagttaatataaaatagaga

SEQ ID NO: 16498 - DNA, 1732 bp, Homo sapiens
atttgttgaattggatacaaaactaagatggaagagattctttctttttctgtattttagtgaagaacacaggtatatccatctatcatatgttgcatgatttgtttttttaaatgggtgtttatataaatataggatgaaagacaggttatacattaaaatgtccctgggaggcaagttttaaatagcttttccagtgcacttttttttatactttctttatggcctctaaattttctggatcttttattctgagtatatgtcacattcataatcaggaaaacaataaatattttaataaaagttaacttggaaaataggttcattgttaatattttactttcccttttaggtagtatatcaaatgtgctgttttctactcaagatccagttgaagatgcagtctttggcgaagctactaatctcaagaagaatggtgatagaggagaaaaaagacaaaagcattttcctgagaggagttgtagttttagttctgaaagtcgagcaggaatgttgcttaagaagagtagtttggattcgaattcaagtgaaatggctatcatgatgggagcagatgccaagattctcacagcagcattgacatgtcctaagacttctctacttcatattgcaagaacccatagctttgagaatgttagctgtcacctacctgatagtaggacttgtatgtctgaaagcacttggaatcctgagcacagatcatctccggtgccagagatgcttgaggaaagccaagaactccttgagcctgtggttgatgacgtacctaaaactactgcaacagtagatacatatgagagtctactaagtgatagtaacagtaatcagtccagagacttgaaaacagtatccaaagatctgaggaataagagaagtagtttatatggtattgctaaggtggttcagagggaagatgttgaaactggactagatcctttgtctcttttagccactgaatgtacaggaggaaaaactcctgattctgaagataagttgttttctccagttattgcacgtaatctggctgatgaaatagaaagctatatgaacctaaaaagtcccctaggtagtaaatcttctagtatggaattacacagagaggaaaacagagagtctggcatgactactgcatttattcatgctctagagaggagatcaagcctacctttagatcatggttcaccagcacaggaaaatcctgaaagtgaaaagagctcacctgcagtgtccaggtctaaaacttttactgggcgtttcaagcagcaaaccccctctcgaactcataaagaacgttcaacttctttgtcagcactggtgcgttcttcgccacatggctcgttgggttctgtagtaaattctttgtcagggctaaagctggataatatactctcagggcccaagatagatgtcctgaaatctggtatgaaacaagcagcgacagtagccagtaagatgtgggtagctgttgcgtctgcctacagctactcagatgatgaggtaagaaagctttatgtgtgtagtctgtctgctattggagtgtttatagtatctttctagaaatatatgtattcttgttcagagatttctgtgcccaggctggagtacagtggcatgattttggctgtctgcaacctctgcctcccggctttgagcgattctcttgcctgagtagttgggtctataggggtgtgccaccatgcccagctaattt

SEQ ID NO: 16499 - DNA, 1233 bp, Homo sapiens
ctttggtaagttgcttccgaatgccactttataaagttagaggtattaccttggagggggggacgtagagtaagccataaaatatacgtaaagtttacatcaacataattcttgccctgcatcatgcatttggcaatatgtcacatagctgtcctcataatccccaaagtgccaaaaagggttgtatctgatttgtttgttgctgtttgatattttatcttcttagtgctgttatctctaataaaacatcggttagaaatgcgacttgaaagacatttgataattgaacttgacaagttgggaatatagacaaaactcactgaacagagaaaacgtgcttaagttcaaattggttttcataattatactttctcatataggtgtgttcacagaggtcacaatcctgtactgtataattttggaatagaaatagtaaatgtgtcattcattgtatgctcttgcagggttatgtggtccgaatcagtggtgggaacgacaaacaaggtttccccatgaagcagggtgtcttgacccatggccgtgtccgcctgctactgagtaaggggcattcctgttacagaccaaggagaactggagaaagaaagagaaaatcagttcgtggttgcattgtggatgcaaatctgagcgttctcaacttggttattgtaaaaaaaggtgagggttacttgtgttcaattttcgttgaaattgatttaaagccagttgtccaaatgcttattcatttgcagtatccagacttacagaccaatggatttgtttctctaccatcaattcaacattaaacattctgatttaggattcttaaggaagttgttgaattaaaatctcttcaactgtttcttctaaggagagaaggatattcctggactgactgatactacagtgcctcgccgcctgggccccaaaagagctagcagaatccgcaaacttttcaatctctctaaagaagatgatgtccgccagtatgttgtaagaaagcccttaaataaagaaggtaggagggattatgcaattagggcttgcttaattttggtaatttgtctatcattttgtgtgcatatcagaagataaatatgtgcctttggaaggccttagcactattcacttggagtttttacagaaaatatttgggggtggccagcatacccagttggtgttaatccttgcttattatatccagtgccttgtagagtgcagtaatttcgttgaaaa

SEQ ID NO: 16500 - DNA, 1197 bp, Homo sapiens
atgattttatataggggtgtgtgtgtgtatgtgtttgtacttaagtaaaagtagttttgttatttctcggctggatttttcttatgtctattaagtataatcactgtctattgagtcagtaactaatttttaaaggagtcttgaaatgctatctccccctaactgctcactcacagttaaatattctgttcatgacttgaaagcagacatcagtttaaagggtatgaaaagcaagacaggttctcactgggaatttctaaggcttaatatacctttgacttatcaagttgactgagacagtttaatgctattcatggtatgggaccttgttgctataaatacgaatatttatcacttgattccatatttgatcgcccctccattactctctctttgccttttgatgtttgctgcgtattgcccaaactttctcttcttcactcctctagatcgtgaaccttatagaagaaactggacactttcatatcacaaacacaacatttgattttgatctttgctcgctggacaaaaccacagtccgtaaactacagagttacctggaaacatctggaacatcctgaggatataacaactggatgcatcaagaactattgtgttttttttttttggttttttttttttttggttgtgattttttgttcttgttgtttatatgaaaacactcaaaatgatgcaaccaaaagggaaaaaataaaaatcaaacaaccttcagctttatttttctttaaagccagtcatcatctcttgataaaggagaggttaaagcaaaccagcctcagcggaccactcttctctccaaggaaatccccgggaagagttagcctggatagccttgaaaacaaacaaatcaaacacaacacaagaaaactcaaagaatgtgtatggtatcatgtatctctctgtggtggttcattccacaggacgaatgcatattcaacacactgccttattacataactgatctatttattatcgcatacagatattctaagtcgttgagggaatgacaccatcagacattataagtacttggtcccgtggatgctctttcaatgcagcacccttgccatcccaagcccagtgaccttactcgtataccgtgccactttccaccaactttttccaagtcctttaactcgttgcagtctgtattttccaccttttgtttttccagtt

SEQ ID NO: 16501 - DNA, 1137 bp, Homo sapiens
tgtggcaagggcattgtgggtggtggtaaggtgcatgtaggtgatagaggttggtagtaggagagaaggaacatcttctgaaaataactgttattgtcattgaaggcttatggcataaatagtatttggagttcaactcaggctagctgatatactattagtgtctggttaaattgtttggttagagcaatgtgctagagccaagttttagctttgttgtgttgcttgaactcgggtcatacctctgcctgcagccagccttgttttatagccatgataccaggtgagagagagttgctgtatcaaaacacatccattacctctcttggaaaattgacttcattttattctaggaacagagtgacaacagcatcatctttataaaggaaagctagcctactgtgaacaaattactcattgatgaatgaccaaaggtgtgtgtgtgtgtgtttgctgctcatcagaattgtcttctaatcactggtttggtttcagactcctgctttgaacttgctgtgggagaagtgttgcagtgacaatgtagtggttcgaacagcctgctgtgaaggtctggtggcactcgttgctcaggatcatgcagagttcagctatgttctcaatgggatactcaacttgattccatcaaccaggtactttttcctcagtgtttggtcagttaatgatttaagtttttaggaaaaaaattcactaaatcactattaagagtcagcattcatcctacttgccagttgtttttcttgctcttaaaatgtcatgagttgctgtttcatatatgaaaatatcatgctaatttaaaccctatagtttcagaatttgtggtcatttgcggtacttaagttttggggctctacttaaatttgtcgttgccctttttaagaagaaaatagctaaacagtttataattcaaaaatgtaatgcagattcctgacattttaagaaagaaggttgtccataagcaatgcttcttccacagtggtatagtttatacattgtagtggcattacttggccaggccttggcattagtgtattagaaaataatggcatttatttctcaaatattttgtgatttagggatgtcttccccctgatttttcaaagttaataatgttttgtt

SEQ ID NO: 16502 - DNA, 1199 bp, Homo sapiens
aggaatggaaagaggccatatgtaagtgtgacttcaacatagcaaggaggtagggtattagacattaactctgagggggagtcagggctagattataaaaggtcttgatcatggtcagaagttgtgattttattttatgcacagtgaaaagcaactggaaggtgttagggacaggaatgacaaaattctggcctctgggcagaggaaggtttatagaggatggtcaagaggaaaagaattcagtaaactagtttttacattagtttgtatgaggaggacaaaagataataagtagataaatagcagtgaaaaatggagagaaactgatggatttgggatagattttgaaggtggaatcagaaggacttgctaatggattacatgtaataagtgagggaaagagaggaattaagcttgagcaacttggtgccatgttctaatttggaggaagactaagaaagggataggtatcaagaggtctctttttaccatgtaaggtttggccagaaatgtagcttagttgtttgtatatgagttaagaacgcatgtttctcttctagcttattgtatttactctacttttggtctccttttatcctcttttagctttggaggaattttttacatcacttgtgaagcaagaaatggtgaatatgcctcgtgggatatatcactctgcattaaaaggaggtgcccgctcagaccaaggaaagactgtagcaggaatccccaattttatattgaaaatgtatgaaacaaacaagcaaccaggactgaaacctggccttgcaggtaagggtagtacatagtatcaaaaatacaggtttttcatgtaatgatttaacttccactttcaagtaggatataatgggccatggcagggtgttgctgctgctactaacatgtggataaattataaaaatcatcgcactttaaaagacatcgcagaactgtagaagcaaagacaaatagatggatttaagtttcagagtcagcataacattttagaactgttttctccccaccttgggggatacccactcagcccagaggcatggcctgttggaagaaagagaaactagaggagcttttagtgattgcctgggactagggcgacaaattagagatttttctcacaggacatttgctgaattttgaatttgcaccaagagctaaagagctaggctgaaagcttctga

SEQ ID NO: 16503 - DNA, 1145 bp, Homo sapiens
ctcacatcctgaattttagtcttttctctccttatgcagctgatcacagtatactcaacatgcaggtaggggtgttgcagggaaaactacagcatttctgtaagggcacaaataaagctggtttatgccttttcctcttctcacccataaagtttaagtcaaactatttcctgccttttgtttttatctagggggtgtacagcactagcatgggccacagatacatgttttgatgtcaggttttcattttgaggggagaggtatgtgtacttgtcatggatgatggggcacaccatctactaggcagcagaatttgaatccagccatctcaccaaggtttgagagctctgtaaacacccgtggtaagtgaagagcaattgtgtggatttcttatgatcctaacatcttatcttttttggcttccaagcacgggctgtatattgggagttggacttgttctgtccctcatgagccacagcagccaaatgcagtcccgcgttcacgtagcagcattgctccggaagctgtctgcgcacgtagatgacagcgggagccagagcagaacgtttcaggaggtaagagatggaggctacatttttttcccctctgctctcttttgttttcttcttgccacttattttggacttaccatattttggtaaccctataaattaaattcttcctcaaagagaaaatctgaatgacaaacaaccaatattagatcataaggttttcatattatgtggcagtttaaatcaacttaaacctaaatgtggcatataagataagagcctttagtgaatacaaaacctaactcagcatcactagaaggcactttctaagaagagctgcaatttctggaagaaggttaaatcgagatttttagaattgtgctcaagccaaatataactttcaaaaatgcccaggaataagcttcagaaactgctgatcaaaaggcgtttgattttttaaaatgtcagctagcataaaatattattgagaaaattcgctttaccacacttagagaaaagtttttttctgttgtggtgcaaaaatatgcagaattggagttcatgtgatccagttcatgggtgttaaccatgtttttagatggaacatttcaggcatgtgtcatgcctgtctct

SEQ ID NO: 16504 - DNA, 1174 bp, Homo sapiens
aatgtttaatggaaataccatattcatgtagaaaagagcacaaattgtgaggagatttttacaaagggaacacagccatgtagtcagcaccctcatcaaggaaaaaaacatcaccagcatcccagaagtcagctttcattttaattctgcagaatttcccattaactgattgcagggtaacttaaaaaaaaaaaaaaaaacaactttccccccaacatttataaatggttttctgccattaaaatcctgccaaaatatcgatggaactccctagtcttgaacattagccaagtgagaaaaagacaaattctgttctgacacctttttgatcaaaatgaccttttcaaatgcagccatacctatattttgtccccttagccaccctgctgtccttgagagttctcccagagtttaagaagaaagctgtatggaccagagcatatggttggtgaacagttttgcagtaaccagcagcattctcagctggatgaggaaaaccatataagtggaagaagtttttcagaattcatgcctggtattgctgagacatgatgcagagagttaagggtcatgaaaagatggccacatcactgacagcttgacacatgcctcctaagagaggagtgcattgctttagtacccgggccagttgagactgaaacaggaacttggattttctttatttggcttgagttcaatgtggagattttctttgtgaaagcttgaagatattatcttctccctgctaaattccagtaaaataatgttgtcaattttgtgcgtgtgacttttgttttaaggcatgggggaaggtgccagaaccacttggtgacaatggcattatgatctattttccatgaatctccatgaggatattcattgactcagtgagttagacaaatttccttattgataaaacactctcttggaactgctatacacatttaaataataagcataacattgaatattagctaaatcagattcattaatggtgtctatcatttccttatgctttgttctcttgaatgcaagtgaaagttgtgattccaaatagcttcagccaaagattagttcacaaactaagaaatttaagagtagatctcatctgacacagctgcatccagtgaatcaagtgatgccgtcaggctttgttcctctcagaatcattcct

SEQ ID NO: 16505 - DNA, 1165 bp, Homo sapiens
atagctctctccaccttcctctaaagtttcacatttttgtcttttctctctatatgttgttcatatgtttgatatctgttaccttctagagataatcattattttggagatttgtgaaggttagagctgggaaaacaaaaatttaatagtgaaagttttttccccaatttcctggaaaatgattaggtttaatgatcaaatttattcaagggtaagtttttgttccatacatttctcttgagtctgtaacaccgactcccatttgcctgataggaagtgccagcttgaaaagccaaacaaacaagaaacaaaatggatataaatggaaacatcagaaatagccaattcttcttagtttgacatctaggttttatttgtagatacctgtgcacatggtcaaaacttctatatctcatacataatgcagctatattttctgatagtaaaattgttcttatttgtacagtgaaagtgaaatatatgatcccatgatgccctgcaaaaagcattataacctccaggggctttactagcaagatctagttcatgatgtcaggcttcctctttggtctctcccatgtttaccaacctgtatattaaggtagacggcaagcactaaccaaaaagtacaggaaaaatgcaaaaacaagaccaaaaaagccacttacctataaagagcatcatgagatatattttcagcacatatgggaaatagatggataagtcaaagggcagcttggtggaataagtgccaaatgattcaaaataaggcagcgattgatagatggcaaatgctgttaaaaaagaaaggcatcataaaggtattcctccttaagttgttacagggatgtgtatatatgtcttcatagttgtaggatattttgaatttgataatgacagttttgtaatagttgctgaatctttttgctaaacctagtttaatatagaaatctgtgaaatgattaagttggcaaggtgcttacagcagtatgacttgttgaatgtttgtccatggtataccttattgtgcctacagaagaatttacaatgtttcttaaaatgttatctcaaaatacatttgtccacctagccacaaataggggtgatagagagatgaacttggaaaatggtgcatatattttcctcttagagtttcacaacacac

SEQ ID NO: 16506 - DNA, 1190 bp, Homo sapiens
atacttccaattaaaacatgagcaaaaatagatgctctgttcctgacacttttaatccctacctcctaaaatcagtggctgtagggagatcccttgtctgtttcctcaagaactgctgaaagtaggacttctttttgagaagtaattcacaaagtgccaagtgacaagccatacttgcatgtgaacacaaagcgatgtttatctttgtccaaacaagtacctgttatggcatgcactttataaaaacagccagaaaaatgcacctcagttaatgggcactttaaaagagcattcattcatttgggttactgagaaggaccaactcagaaatgaccctgcttgcctaagagaaatatgccacaccatgatttctctaaccatttcaagagtttgctgcccttgatccctgaatgattttgatgtgtattttctgttccattcctctgtaggttggcgttaacctgtctaaccactcatagctctgctggactttttatatgagagttttctgcttggttagttatgagtttaaaagacttgagaatactggttttaggggaaggttttgaaattgccaccttgcatattgtagaacactttatcaccacagttaaaattgtaggggttactaattgaggaataatacaaattatatttcagtaacacagaagatagcaatttattatcttcctggacttggggatacttttatcaattaatttcaaactgcggtgtttcaaattattgaaatttatgaatatttaattttaccttttaagagttactaattcagaagcatgatcttttaatacatatgatatgaaatgtttacagatttactggcaaaatactgtaattatgagtcccaatggagtaaatgcttttaaaaattgtattcacttaaattagccagctgtgttctgcctttatactgttaatattatttttctcagattgttataagcaatgagctttcattaaatctttggacactagattataaatttaggaataccctgcaagatacagaaaagactaaataaataatagtatgcaaaaatcaaaattattatttaaatagacctactaaaaattaatggtgttttaatttattttaaagttgttggctcatcctttaaaatgttttaaaaaaatgtttgacattcattatcagaatgagggaaaattta

SEQ ID NO: 16507 - DNA, 1540 bp, Homo sapiens
ctttttatgagttaaattattttatacgagttggtaatttttgctttttaataaagtggaagcttgcttttttaactctttttttattgttattttatagaaatgctttttgttggccgggcacagttgctcatccatgtaatcccagcactgtgggaggccgagacgggtggatcacaaggtcaggagatcgagaccatcctggctaatgcgttgaaactccgtctctactaaaaatacaaaaaattagctgggcgtggtggtgggcacctgtagtcccagctactcaggaggctgaggcaggagaatggtgtgaacctgggaggtggagcttgcagtgagcagagcttgcagtgagacgagcttgtgccactgcactccagcctgggcaacagagtaagactcagtctcaaaaaaaaaaaaaagagtgaaatgctttttgtttgcttcagttttttatcatggggagatctttttcctcagaattgttttcttttcactgtaggctattacaggatacttcaggatcaagatacagaaccttttatttaaagagtttgtaaagtcaatgtgtttgtttgtgtctctgagattgacttcaagataataagctgctaattgtaaacaaaacagttaccctccagtattaatatgactcattagtgtgagccatttgggtcaagtatgattatgacccttggacttcctgatgtagtattaaatttcaactctggttatccattagcaatctgtagagaacttaatgaacctgaacccaggcttctctagctctggtaacgtgtgattgttttcactacaatatgatacatagatggtaccttacttttcctcattcttaataggtgtctaagaatgtcagggcaaaagtatgggcatttttcttgctatgttcagaaagtacagttctctccaacttgcagaggtacttttcttgattaaatagccttctctagcaacatcattttcagactaactaaatgaatgcagtatactcttttctttgttctcaatcattcactccttatgcaaagccaatataattttcctcataccttatgcttgaggatattgttgaagaacacttcctggaacacttctcacttgtgatgctgtactaattttttttttttaatttaagctagtatactaagtgaacaccatggtcagttgtgagcattttggtttccgcaaaggatggatggtgagcatcatgggaaagctgtagtttagtgacttagcccttagtgattaatagatttgcatgtacatagaagtctttgttggccttataatctgctgttatatttggcatggattttcatggttttgagaatgacatcctggccctgtggtccccgagggtcatggtccttgtgacctggcccctgttcactgcccccttcgctagcacgagttgctgtgcagggctggaggtagctaccatggcttgtttcaaggaaggaaactctggtacggtggcaccctcaggagtggaggacagtgaacttccttgaagagg

SEQ ID NO: 16508 - DNA, 1098 bp, Homo sapiens
tcgccgcgtcctcgcgtagaatggttgtcttggcgaccgttggccgctgccgcctccacgctctgccccgcgcccagacaccccgactccccttgatcccgccgcctgactcctcggcgtacgttctctctccggtctccccctccatgtcccctcctccccttttcttccacatcaccgatcctttctggactctctcccttcctcctttccagctgggagacaggaaaagcggtcctgtttgggaacagtaaaagcagggcaaggaaaggaaggagcggcagaaaggaggggtgagtcgaggacacaggggcagccggagaatgcggaggagccgggtcctgagcgcggtctaagcgaggctcggctctcgtccaggaactcggacgcgggctcgccggctctccgcgcgcgggaagtcgagcccaggacgccgccttcaggccggcgcgctgacccggtgccccgacccggagcctgcggtctgcctggatccgtcctaaacctcgcgggctggacccgcggcctgagtgggtgggtgtgtgccagaggattcgggactaggcccagctccgggaacctggaaatgtggcccgcttctcagtggcttcctgttcatgcgcttgggcctagtggcctagttgaagaagtggaaccacagcgtgagccgacagggccttacagatcagacgtcaagccccccagaccttacaggggaggaaagtgaggcctgcactggccgagccacccacttaaggcggtgcggtagcctagaggagcggcagacttctctttccccatcccccgccccatcacttgacgttgctgccggacctcggtacaaacccaagacaaaacggggccctttggaaaaagtgagatttagcgatcactcttacgtagccactctaaatatctatctagatatttacaaatgcacctccccggtaggtagatttcactcagaatttacccaacaccgtgctttgtgctggggccacatgccacctttctgtctagtatggctgctctttctccctcttcgcaaatatagctctttttccttcaggtctcttctgaagtaagtagcccttcctc

SEQ ID NO: 16509 - DNA, 1223 bp, Homo sapiens
tgactggccaagtggcagaacctgaactggaaaggggagtgtggtgccctttccattgctttacatttccttgtaaatgtcaagagcagctgaatgttagtattcttttcaaactgcaaagtgacttttcagcaattggggttgttgtttgaaatgtttttgaatggcttgtcttctatctttccctcataggaaaagaaaaatacgacacatagccatgattgaagacgtgtaccttcatctgagaagacatctgcaaatattctggtcactattaaactatatccaatttttaagttgtttatttttaagtgagggctgtttttatagataaagtttaaaaagtctggcattgttgacatatattttacattaacctttgcttttggaagaaccagatattcccaatgttagtgtaatcgatcgtatttttttgattgttatgtggcagttgcatgtattacgtttttaagttgtcataataacctggtgagagaagtactattattatttgacttttgtagatgagaaaattgagagacagaaaagttaagtgacttgcccaagtttatacagctagcaagtagaaaaactgagatttaaactcgggatggacttgttccagagcccatgtttttaaccacagcattatactgacccgtcttggcactgcactgatgaggtgtgtgatctttcttaggtcacctaatggttttggttttcagattcatttatgagaaggagaatgcatgggataatttattttctgagcagtattccttgtatgcttacatgcctttatttagtcctcacaagaaccctagacatagatagaattattatcatccttatgttacatatgggaaaattagaacttagagagttcaagtaactgctaaaggtgacataatcggtgtaagaactgggaatcaccgccaagatttcaatcactatgctttactgtctttcctttttaggggcttatgctgccgtcaaattctttacattgaatcctggctttttattttagagtcataatggcaatatgtttgtttcataaaacctttcatttagaattcatccaagaagtgacttagtctacttatggctgcaaatactggggagccattagcacagtgacagcaatcttaacaatgaaacattgtgctattaatattatattattatttttttgaggagtcacatgtgtagcaaacaggatg

SEQ ID NO: 16510 - DNA, 1227 bp, Homo sapiens
acttttgttgtcctgaggacttgaatttacagtgcatcagatttgttgcaaattttgtctgtagatagtctagcttcagctgtttatggtgatgctacattttggtttataaatatgtttgtggtataaaaaaatgagtataaccataggttttgaacaaatttccttacatttttcatacaaaaatcataaatatctgtatgctattgaaatttaactttgtatgatgcttaaaaaccactatttggggaaataataaaataagtctttaccatgtatgaaagaaattttaaaaaatacaaaatattttctgattagcatctagcttataataaattttcaaaaaagctgaaggcaaaaatgccttcatcaggatgcactgagaactatatagttacgtcctgctttttgtataaactgagatgctcacatgcttccccttagaacaggcaatgtgctatgcataacatagttgtacattatctttgcggttgctttgagttttattttttattatttaaaattgtagttataaaatttttcagtatagtacagtacatatactgtgaggcgcgtgctaaagtgaataagcgagttttcatgctgacccactcaatgctattcagaaatcaattggcttagcactttctcatatccttaggtgcatttagattgccagagttaaccttctgcgtttaaaaaaagaaaaacactaaaaaataaaatacatgtatatacttaaaaaaaaataataaggtttccctcaagggaaaacagcagctacatgcttctttcctatactactgtagcaaaccaaggcattgatgagagggcatgcaaattgtgcttcactttacagtgttttatcagagcacttaataaaatgtaaggctggtatttatttgaagttgtacagtatgacttaattcacatctgttggaatagaaaatatattctgttgagtatttaagaggctgtacatgttttcttttgtgtttggattctttgtactttttcatgttcagtacatcaataaacaaagttgaagggaaagaacagtgtggtgagtaggtctttatacacaattcgggggcacctgtgctcagtctaataagcagacttgctttcttgaattaaaagaagttccctgagagttttagtggaaagcagtgttacctcttagaattccaaaaggcaagttaattgaagtagaacgtgcagaaaatt

SEQ ID NO: 16511 - DNA, 1384 bp, Homo sapiens
tttgagccctctatgtggtccaggcagaatagtagacacactgatatttaatccttaaaacccctttaaatgagggccagtattatctctgctttcagaagtagacataataggatgaatcatataacagaaaaaaaaaagtgaagccaagagggagttaactacttaaagtacatgctatgctatactttctagagagatcacagatgtgtgtgaacatcctagcaattaacacaaagaaggaaccatcacattaattacacaatttattgtgtctgaggtaacccagtttcttgagagaagcgtaactattttcaaaagtgggaaagatcttttcataaagacgttgccagaaatagcaacattctcaatactcgtggtgtaaaaaccatgaatcccctggcttaatgccaaattatagccttagaagaataattgttccccaaatgggcaagaaaggttctaattgtcaagagtaacccaagtaagaacttttggaatatcaaaaggaaatgagcaaaatgtaaatagaggggatatgtactttgctgagtattaaattggaactacctggtgtgtacctggactaaatattctgttcactggctcagttgagtacctatacttttcgttttttgattgggtttaggtggttatgtcaaagttaaatggcaaaattaggaatttaacccaggtctggctggttcctttacaatacactgctttcttaagtacaaataatttaattgcaatatttaggaaaagtaggtacctttgaataatgataagaaacagtcttggttaagaatatgagttccctcttcaaaatgtaaggggtggcaaaatgtaaacactgcttcctattactgtgcaagtttttttatgtcaactttactatttcatgtttgttgtggagattacaaaatatagcttagcaaaaggaaacaatctcacttgaaggatatgttaaataatttaatgatattttaaagattttcttttttagttaaactttcctatgattctcttaatgttttttctgaatacaaaagtaataaatatttattgagtaaaacacacacaccccaaataaaaattgcctgtaaggccactatctagagaaaactattcttaacatcttgtggcatagtgactatgtatgtaaatgtattttattttattaaaaaagcgttgtatcatacatactctttgataacctgatttttaaacttatatttggtacaaagagctccacattaataaatacaatattctatcatatggatatacccatttcttattaactggcactgtttccaattttcagctatcaagcaatggtaatgacaaatctcacaagagtcttactagttccctaggaaca

SEQ ID NO: 16512 - DNA, 1616 bp, Homo sapiens
tctttccattcatttttgaatactcacagtgtgtaggctgtttgagagagttaccttatttttaaagcgaatatgatcttacagcaataaatctagtttatataaatatgaaaaattaacaaaagtttcagaaatatatgcattttttttaaagcagacacatgatttttcacattttctaaaatggttagttttgcagtgggaaaataaaatccttcaaagtcgatagtcaaaagaaattttctttattttcataagcattaatgactttttttttttaatagatattgtctttcctgcacttgacattcttcggttgtcaattaaacaccccagtgtgaatgagaacttctgcaatgaaaaggaaggggctcagttcagcagtcatcttatcaatcttctgaaccctaaaggaaagccagcaaaccagctgcttgctctcaggactttttgcaattgttttgttggccaggcaggacaaaaactcatgatgtcccagagggaatcactgatgtcccatgcaatagaactgaaatcagggagcaataagaacattcacattgctctggctacattggccctgaactattctgtttgttttcataaagaccataacattgaagggaaagcccaatgtttgtcactaattagcacaatcttggaagtagtacaagacctagaagccacttttagacttcttgtggctcttggaacacttatcagtgatgattcaaatgctgtacaattagccaagtctttaggtgttgattctcaaataaaaaagtattcctcagtatcagaaccagctaaagtaagtgaatgctgtagatttatcctaaatttgctgtagcagtggggaagagggacggatatttttaattgattagtgtttttttcctcacatttgacatgactgataacagataattaaaaaaagagaatacggtggattaagtaaaattttacatcttgtaaagtggtggggaggggaaacagaaataaaatttttgcactgctgaactgtgagattttcctgtgtaatttgggtagattttcaagagtgtgaacacaaatttaaaataagctataatcagcaacaacacaatgacaatgacatcttccccttaccttagccactaagaagacaagggctgttactcatataacttgcttttattacttaatgtacaccaaactgttgttgtcaattatcttttatttaacttctccaccttcattgctagatccttcgaacagcactgatacatttcaaggtcttgttttaggataactactttaaaattttttaaattatattaaatttataaaataatttataaattcatatattaaaacaatataagataatttcttgatttgtcatttataaatcctaaagtatatttgtttaatggcctatttttagatgaagaaaaagccagttggtaagctgtgttagtcatgtatcagttcagacagacgaggtctcaatttaactccaggcttagatccagtttcttttgcccttcactatttgaggtaacttcatttttcattctagttttgatatttggctgtttatttttgtcattttccattatttcaaagggaatttg

SEQ ID NO: 16513 - DNA, 1127 bp, Homo sapiens
ttcagtgtggcccagggaaggcaaaagatttgacacccctgttctagctatgtagaaacacatgctgtactatactactgggctctaagtcaatgcttcataatgtgaaaaagtcctcagtatatttaggtcttcttaataataaatttcattatcttaattgcatgtatgtttcgtttaaccagggatttcttagggtaacagtcactaatgtgtagaagtgaagatggagattgagaaaaaacccagtcatgattatttattgccctttcttttttccttgttctctatgttaacgtattcttatcaaagaaacactaaacaaacttctctttatctcatgtaattctctatagtagttcatatgaattatgtaaggttcaattttaaaacaatagattcttaagatagtatatactctaaagtttgtctagacactaaatgaaaatgagtgctttgacagtttatgtcctaggctaagtcagggtacgaatatgtatctattaattatcttgtctttccagtccaaacaggagctttacagaaatgcactgtatgagtggccattccaattttgtatcttgtgtatgcatcataccctcaagtgacatctaccctcatggcctaattgccaccggtggaaatgaccacaatatatgcattttctcactggacagtccaatgccactttatattctaaaaggccacaaaaatactggtgagtataataatgctttggtgtttttctatttgaagttttatccctttgaaagtaaaatttacatatccattttctcaagtttttattatattttgttttacctatatctgtggtttggtaatggaaacgcttttgggctatcttagttccgtaaaaattctgttacaaatttgttgtgatcagtaaaggttgatatgcttatatatgtaaaaagtaatctgttcagttattggccgggagcggtggctcacacctgtaatcccagcactttgggagggtgagacaggcagatcacttgaggccaggagttcggaccagcctggaaaacattgcaaaaccccgcctctactaaaaatacaaaaattatccaggtgtggtgatgcccaccagtaatcccagctactca

SEQ ID NO: 16514 - DNA, 1428 bp, Homo sapiens
gtgtgatagccaccccttttccatcatctgtatctagaaggatgggggaagtgtccccatgcctacttaataggagttgttggggggtggggctctaaaagctagcacacgtgggataggatcaggccattgatcaacatgttcatccttaacaccttggaaaggtccactaagcctatgatcacacaaagaagagccagtagagatttgacaaaggccatgaacaaaacaagtgtgatgccttttcttctttagttatttgcatggtttgcatcaacagtacagagtcacagggcagtggcttaacccccatgcccatatacctggatggagagtgggcacagccaagaacacaaggtggaaatcaggttgaagactgtcattttttaaaggcgaactgggcactcatgtgttcccttttctcttctacctttaggaaagaacatgaggttcccttggaaatcattcaagaggaagatggaaggggctgtttagaagagcttaaaagctacaggctgtaagactggggcctgagtgctggcagtggaaaacactgttgggctgtgatctctccctgaaaagttccaggtgccttttcgcttcctgcaaaagaaaggaagcgaaagagaagaccatgtccatagccctgaagcaggtattcaacaaggacaagaccttccgacccaagaggaaatttgaacctggcacacagaggtttgagctgcacaaacgggctcaggcatccctcaactcgggtgtggacctgaaggcggctgtgcagttgcccagtggggaggaccagaatgactgggtggcagtacatgtggtggacttcttcaatcggatcaacctcatctatggcaccatctgtgagttctgcaccgagcggacctgtcctgtgatgtcagggggccccaaatatgagtatcggtggcaggatgatctcaagtataagaagccaacagcgctgccagctccccagtacatgaaccttcttatggattggattgaggttcagatcaacaacgaggaaatatttccaacatgcgtgggtaagttcattaccagctctcagtttttttgtcacctgcacaatcttcactatgaaaatttgcagactgcctttgaatgctaggtagcacccatgcattaatcccatcactcacatacctgtagtgagtgatatataagagcctcattgaaatgaaaaaaaaaactttatggaccacttacatttattttgtggactccagtggtacacataccacatgctggggaacactgacttggtgaaatattaggtgtgattgtgttggctttcttaggactagatgtcagactcactcacttatcttgataagattattattttttggttaactgactaaagttacatggactctgatgcagttactggtatttatatct

SEQ ID NO: 16515 - DNA, 1199 bp, Homo sapiens
gtatcaaataaaataatttgaagagatcttttaattgttacaatacattggtagagaactcattcagtctctagtatgcaatgtatttcttccgatttgtatggtattgtcatcattactttgtagaagcacttcagattttaaaattgggctgctcattgtaaaattataagagcactcatttgataaataggaaaatattgagaaaataaattaaaggatcattaaatttgtattcctttgtagggtactatttttgtgtcaataaatggcaagtgtctaagactgaaaggaaatacatattatccaagggaggaaaatgttttatgtaaatatcagataaaataatacgtttctactaatagtgataaatataattgtataatacattgaacttttacaataatttatttttctagctctctccggtccgtgcctcgaagatgacaaagaaaagaaggaacaacggtcgtgccaaaaagggccgcggccacgtgcagcctattcgctgcactaactgtgcccgatgtgtgcccaaggacaaggccattaagaaattggtcattcgaaacatagtggaggccacagcagtcagggacatttctgaagcaagcgtcttcgatgcctacgtgcttcccaagctgtatgtgaagctgcattactgtgtgagttgtgcaatccacagcaaagtagtcaggaatcgatctcatgaagcccgcaaggaccgaacacccccaccccgatttagacctgctggtgctgccccacgtcccccaccaaagcccttgtaaggagctgagttcttaaagactgaaggcagactattctctggagaaaaataaaatggaaattgtacttaatattgcatgttaagtgtatctgtgccagatagggtggggattttgtgtgttagaccaagtataaagtgacacatattattttcatggggaagaaagcttattcatgtaatttcatttttttcttttttgttttctttttttttttttttttttgagacggagtctctgtcgccccggctgaagtgcagtggcgtgatctcagctcactgcaacctccgtctcccggattcaagtgattcttctgcctcagcttcctgagtagctgggattacaggtgtctgccaccacgcccggctaatttttgtatttttggtagagacggggtttcactatattgtc

SEQ ID NO: 16516 - DNA, 1155 bp, Homo sapiens
ggactgtcccaggagaccatccccagagcccaccatagtgaaccttatacccataaaaaccagggacattgtccctgaaactgatgatctagaagttggtgctctcctgggtgggtcactgtgggaagggatgcagtagaagtgaggattccagttgtccttagcatctgaggagttctagggatgtgaagagagagaatgtcatttgcagctgcgttactgttgcttttgaggggatattgccagtattttaccttttcttcaagagtaagatatgaatgttttgagtaaattcaccttacttttcttggcctctttgataaaaactagaacactagaattttctgtgcattggtgtggaactgtcctctgattcaggtccatgggccaccatcgtagagactgatctggtaacttgtttgggaaaacctgggccaatgctgactttttgtattctttgctagactttggatcttcagccccctaaatctatagtggatgcctatgtgctgctaaatttgggagattcggtaacaactgaccacatctccccagctggaaatattgcaagaaacagtcctgctgctcgctacttaactaacagagggtaagtatgaatgaggcaggaaggactaaaggcaaaaatggaggaatggagttaatgaggccagcatttctcttttcacctggccctttggaatgagactctttggttgtgcactgaggcttaaccctggggtaaaaaccaattgcattttctgtttgctgcttaacagcttccatgggagaaacgatcaacatgtgaatcctaacaaggggaaggggagagggaccttcatttgagcaagtgtatatattaggcccaactgtcatccctgcccccggcttggctgatctttaaagtacaaggctctgctcttaacctggggcagaggcagaacctgacacgcattgccaggtcctggttgagaaacctaacgtttacagagcactgcttggaggatttgcagcttactcatctgtttatcagttcttcagtagtgtgctgatattcataggtatgccagtattatcaactactgtctcatatattaatcgaggtcagtggttccccaatctgagtttccacgagaatcacgtgaggacataaaaatt

SEQ ID NO: 16517 - DNA, 1202 bp, Homo sapiens
aagttgactctaggtggggcctgtggacacattagtccctgaccttcttcaattgcatcttgaccttggtcgttttccctgtatcctttggattgtgcctgccagggccactggtgaacttcagcttcacaaattttcagcaaacatcgcttctgtttttgaataatgagtatctaccttcagaagctgggttacctggaaccttcttaatcttcttctttatgaggtgcccagtgtcctcacttgcaaccccaccctgcctgtagaggggagtcaggtgcatggatcctctggactttgggtgaatctatttttttttttcctccaattgtaaaataagtgagacccacctgttctttgcctcagattattgtggggttttcttttttttttttttaaatcacaattatgtactggttctaacgttctcttttgtgtgttattccatcccttcatctgtaggaatgccattacactgtgcttggagatgcttttaaggaatgctttgtgagtagaccacatcccaagccaaagcagttttcaagttttgaaaaaagagcaaagatattctgtgcccgacagaactgcagccatgactggggaatccatgtgaagtacaagacatttgagattccagttataaaaattgaaagttttgtggtggaggatattgcaactggagttcagacactgtactcgaagtggaaggactttcattttgagaagataccatttgatccagcagaaatgtccaaatgatatcaggtcctcaatcttcagctacagggaatgagtaactttgagtggagaagaaacaaacatagtgggtataatcatggatcgcttgtacccctgtgaaaatatattttttaaaaatatctttagcagtttgtactatattatatatgcaaagcacaaatgagtgaatcacagcactgagtattttgtaggccaacagagctcatagtacttgggaaaaattaaaaagcctcatttctagccttctttttagagtcaactgccaacaaacacacagtaatcactctgtacacactgggatagatgaatgaatggaatgttgggaatttttatctccctttgtctccttaacctactgtaaactggcttttgcccttaacaatctactgaaattgttcttttgaaggttaccagtgactctggttgccaaatccactgggcac

SEQ ID NO: 16518 - DNA, 1168 bp, Homo sapiens
ggtagagactgtgatatgtcttaaaactgccaaagcatttcattgagaattatgatgttataaaaaggaaaaaggaagaatgtcgtctactgcagtctatttaaagatgacatttggtgaaaactctcttcctccttacaatattttaaatgattttttttttggtgttaatttgtaaaaatcattatttgttcaaaatgtatgtcccaccctcaaagatatgcacttttaagtgaagaaaatgatactgctagcagcttatttaaaacttggggtcctttttaaataagaaaaattatataaattttagaagttatttcataaagccatacggtattgacatatttttaaggtagtcaatgagtatttttgaattttttttttttgagagttattctggaaatgtgttataagctaggagaatccctttggacagtctttatttttcttcttaaaaatttatatgattcaaaaccatttcttcaggttaaattgaggcattttaatctgcacagtttatcttctgccaaaataaaaatttactatttcctttatatacttgtttatctggactgccagtaaaacaaatgtgtattcaacaaaagaaaaaaaataaaacagtaacactttaaaacaagaatcagacattttcctatgcagtatttttttttaaagtttattttagtaaagttaaaatcttgaaagtagctaagggcataattatgtcataaatactgaacttcaggtgaacaaatactttatagttttaattattttctttgattttgaggagtatcttatttgctttctatcatcagtaaaaacagcatttaacttgctaaataaacatgaaaaacccttgtcatacttcttttacattggtagttctttcatataaagtggttatgttttatcttgttttagggatgataaaattacatctatgctgatgtaggattgccactgaacagtggagcttgagttaaatcttaattcagccttcagtttgcctttgccttgctactgtattcattctttattcagtagaaattgcagtgcctactatgtggcaggttctgcactaagttttggggtttttttttttgttgttgttgttgtttttttttttgagttggagtctggctctgttgcctaggctggagttcag

SEQ ID NO: 16519 - DNA, 1109 bp, Homo sapiens
ttcagctgaatttttccgtagaaatccagcttgccttcacagattagtcccctggttaaaacgtgaacttacagttctttttggagctcatggatctttagtgaatattgtccagcatattatcatgagtaatgttactcgctatgacttggagagtcaggcatttgtgtctgatttaagaccatttttacttaatcgaactgagcattttatacatgaatttatcagttttgcccgatctccttttaacatggcagcctttgaccagcatgccaattatgattgccctgctccttcatacgaagaaggcagccattctgattcttcagtcataacaatatctccagatgaggctgagacccaagagctggatattaatgtagccactgttagtcaggcaccatgggatgatgaaactccaggaccatcttactcaagctcagagcaggtacacgttactatgtcttctcttttaaatacttctgacagttcagatgaagaacttgtcacaggaggagccacgtctcagatacaaggagtacaaaccaatgacgacctaaataatgacagtgatgattcttcagataattgtgtcattgttgggtttgttaaaccactagctgagaggaccccagaacttgttgaactgtcctctgattctgaggacttaggttcttatgagaaaatggagacagtgaagacacaagaacaggagcaatcttacagttctggtgatagcgatgttagtagatgctcatctccacactctgtccttggaaaggatgaacaaataaataaaggtcattgtgattctagtacaagaatcaaatcaaagaaggaagagaaacgatctacatcattgtcatctcccagaaacctgaactcatctgtaagaggagacagagtatattctccatataaccatagacacagaaagaggggaagatcaagaagttcagattcacgttctcagagtagaagtgggcatgatcagaagaatcatagaaagcatcatgggaagaaaagaatgaaaagtaaacgatccagaagcagggaaagtagcagacctagagggagaagagacaaaaagagatcaagaactagagata

SEQ ID NO: 16520 - DNA, 1344 bp, Homo sapiens
tcacaaggtaaacagtgttccttggttttcacatttgtttcattttctgagctgttcttatatttgatttggttgtttccctgaataacagtctgacctcaaaaacctatgtacaactttgtgttccctataaagcgagccctgtgaaaagaaactggattatttggattgtagtattattgccactttgctgtgagttgtcttcttgggggacctagaaagctattatgtcagggtcagtgttttattgtgacaaaaggggacttaaaggctgccgtgagaattagtggagttcatggataagaaagctgtggacaattctttgtctcttctgccatcagttgggtgggagctttggggctgcctcctgtcaggagtggtgaattagcagggggaaccctgtgtatatgtagaagaaagcattttctggtgtgtgatgctttcttacacaccaggaaagcatttcctggtgtgtaagaacttaagcattgatggggtgttcacaatggcagctggcatttaccaagggccaaccagaggtaaagcactctgatgagctcttgacagagtaacatggattgcctagagtgtgtcctgaaggagtgtattatttcaaaggtgggttgctcatatttataatctgattaagctcattttgcctgagggaagtctaaactaagcttacggagctgtagaatacctggcctggcatactgattggagtcacgtttttgattttttttttttttttttggtatctcatattggttttccagagtagctgggatttgacttttcttccttgcctgcagctgtgatcgagatggtacaagaggctggtagagtaactgtccgagatgggatgcctgagctcttgaagctgccccttcgttgtcatgagtgccagcagctgctgccttccattcctcagctgaaagaacatctcaggaagcactggacacagtgattctgcagagcctgagctgctgctgtggtgtggcccactggagcaaactgctggcacctattctgggttgcttgtgaacttctactcatttcctaaattaaaacatgcagctttttcacaaatttattctattattgagtggccacaatgtagagtggctcaaagtacttcaggattaggaatttgggtttgtcatagatgtattctctggtgagggtggctgggatatacctgacccaccatcttcagaaggacccatgtcaggtctgaccattgggagcaaagccatgttcacactgacctaatgcagagtatggaagcattgggctggttatacatttctgtttcttagatttatcctccgcctctgtaggcat

SEQ ID NO: 16521 - DNA, 3447 bp, Homo sapiens
cagtggagagggaggaggaagtacgtgtgatgatttcttcttaagatttttgttttaagacaatctccttgtgctcttttccttgtaggtttgaccgaattgcacacacaaaggagacaatgctctctgatggtttgaactcactcacctaccaggtgctggatgtacagagatacccattgtatacccaaatcacagtggacatcgggacaccgagctagcgttttggtacacggataagagacctgaaattagccagggacctctgctgtgtgtctctgccaatctgctgggctggtccctctcatttttaccagtctgagtgacaggtccccttcgctcatcattcagatggctttccagatgaccaggacgagtgggatattttgcccccaacttggctcggcatgtgaattcttagctctgcaaggtgtttatgcctttgcgggtttcttgatgtgttcgcagtgtcaccccagagtcagaactgtacacatcccaaaatttggtggccgtggaacacattcccggtgatagaattgctaaattgtcgtgaaataggttagaatttttctttaaattatggttttcttattcgtgaaaattcggagagtgctgctaaaattggattggtgtgatctttttggtagttgtaatttaacagaaaaacacaaaatttcaaccattcttaatgttacgtcctccccccacccccttctttcagtggtatgcaaccactgcaatcactgtgcatatgtcttttcttagcaaaaggattttaaaacttgagccctggaccttttgtcctatgtgtgtggattccagggcaactctagcatcagagcaaaagccttgggtttctcgcattcagtggcctatctccagattgtctgatttctgaatgtaaagttgttgtgtttttttttaaatagtagtttgtagtattttaaagaaagaacagatcgagttctaattatgatctagcttgattttgtgttgatccaaatttgcatagctgtttaatgttaagtcatgacaatttatttttcttggcatgctatgtaaacttgaatttcctatgtatttttattgtggtgttttaaatatggggaggggtattgagcattttttagggagaaaaataaatatatgctgtagtggccacaaataggcctatgatttagctggcaggccaggttttctcaagagcaaaatcaccctctggccccttggcaggtaaggcctcccggtcagcattatcctgccagacctcggggaggatacctgggagacagaagcctctgcacctactgtgcagaactctccacttccccaaccctccccaggtgggcagggcggagggagcctcagcctccttagactgacccctcaggcccctaggctggggggttgtaaataacagcagtcaggttgtttaccagccctttgcacctccccaggcagagggagcctctgttctggtgggggccacctccctcagaggctctgctagccacactccgtggcccaccctttgttaccagttcttcctccttcctcttttcccctgcctttctcattccttccttcgtctccctttttgttcctttgcctcttgcctgtcccctaaaacttgactgtggcactcagggtcaaacagactatccattccccagcatgaatgtgccttttaattagtgatctagaaagaagttcagccgaacccacaccccaactccctcccaagaacttcggtgcctaaagcctcctgttccacctcaggttttcacaggtgctcccaccccagttgaggctcccacccacagggctgtctgtcacaaacccacctctgttgggagctattgagccacctgggatgagatgacacaaggcactcctaccactgagcgcctttgccaggtccagcctgggctcaggttccaagactcagctgcctaatcccagggttgagccttgtgctcgtggcggaccccaaaccactgccctcctgggtaccagccctcagtgtggaggctgagctggtgcctggccccagtcttatctgtgcctttactgctttgcgcatctcagatgctaacttggttctttttccagaagcctttgtattggttaaaaattattttccattgcagaagcagctggactatgcaaaaagtatttctctgtcagttccccactctataccaaggatattattaaaactagaaatgactgcattgagagggagttgtgggaaataagaagaatgaaagcctctctttctgtccgcagatcctgacttttccaaagtgccttaaaagaaatcagacaaatgccctgagtggtaacttctgtgttattttactcttaaaaccaaactctaccttttcttgttgttttttttttttttttttttttttttttggttaccttctcattcatgtcaagtatgtggttcattcttagaaccaagggaaatactgctccccccatttgctgacgtagtgctctcatgggctcacctgggcccaaggcacagccagggcacagttaggcctggatgtttgcctggtccgtgagatgccgcgggtcctgtttccttactggggatttcagggctgggggttcagggagcatttccttttcctgggagttatgaccgcgaagttgtcatgtgccgtgcccttttctgtttctgtgtatcctattgctggtgactctgtgtgaactggcctttgggaaagatcagagagggcagaggtggcacaggacagtaaaggagatgctgtgctggccttcagcctggacagggtctctgctgactgccaggggcgggggctctgcatagccaggatgacggctttcatgtcccagagacctgttgtgctgtgtattttgatttcctgtgtatgcaaatgtgtgtatttaccattgtgtagggggctgtgtctgatcttggtgttcaaaacagaactgtatttttgcctttaaaattaaataatataacgtgaataaatgaccctatctttgtaactgcaggtggtttctgtttgccaggtgtaagggttgtcatggctgtgggatggggtggggacagggtcattccctggtctgtgacccatacaaatacacatgcctccctggaatcagacatttccccatctgaacttcattctcttatctgtaaaatgggaataataacacatagggacttttttgaggcttaaaagtgacgatatatgtaaaacaatgactaatgcctcacaagtactcactacatagtagctagtgccatttcaaagtagaatttttttcccctagcagttcttgggccacattctgctattttcaacagataccaggatcattcagatgtagatctcagggccatttgcaccaggtgctcacagtgtaacttgaagggaattatccaaaatgaggtttctt

SEQ ID NO: 16522 - DNA, 1216 bp, Homo sapiens
caaacctcagtcaaccatataaggaaggtagaagtgaaaagtcccataggtacccaactaatgtcaccagtttcctggatacctttcctggagtttatttatagtgtgtataaataaatgatgtatgtgtttaaatgcctttttcacctttccttttagagctgcctctttttaacagttccattccattgtatggatgtactatgatttattgaaccagttccctactgattattctgttttttgcagtcttttgttatgatgaacattccacagtgacaatgttgttcatagtcattcacacacatgcaagtccttctgcaggatatatttctagaggggaattgctgactcagaggttttggtactctgtgttgattgtagagtgacggcagaaaagtgaggcccaagagtttcctagtgaccatgtgtagtggacaagtcaccagtccctgtgagtgtttggcccaaaggctttaaggcatttgatatcactgtttttgtttctgcaccaggcgggagacactatattcaatcgtgctaagctcctcaatgttggctttcaagaagccttgaaggactatgactacacctgctttgtgtttagtgacgtggacctcattccaatgaatgaccataatgcgtacaggtgtttttcacagccacggcacatttccgttgcaatggataagtttggattcaggtaagagatactcagtcagaatctgtggtaaacatgtctctctcatgtgttgactaggaaatgcagtcctggcagctcaagagtgcctctttaagctctggagcagaatgcctcctctgagaaatgggtgctttgtattagttgagatggaaagaagagaccagaaatgcctgtagtctctgcacatccagacaaaaacaaattttccccccttttttttttttgtttgttttttgagacagggtctggctctgtcacccaggctggagtgcagtgccgtgatcttggctcaccgcaacctctgcctcccgggttcatgccatcctgtcacctcagcctcctgagtagctgggactacaaacacttgccaccatgcgcagctaatttttgtatattttgtagagatggggttttgctgtattgcccagtctggtctcgaactcctgagctcaagcaatccatctgccttggcctctcgaagtgctggattataggcatgtggcaccatgcctg

SEQ ID NO: 16523 - DNA, 1194 bp, Homo sapiens
gaggaggaagaggaggcgcggctcaacgcgaccgaagctccgccgcaaaggctcgggaggaagagggcggtgcgcggccaagcgtcggagctgcagtcatactccggggaccccacgacggcgccccgcccgctgcccaccctcccgaggccccgcccagcgcgcccatcccgccacgggctgccccgccttcccgccctcgtccagaaaaccccgcgcccggccccgcccccgccttcgccggggccccgcccctcccctctccgccggcgcctcgggcggcttctcgccgctcccaggtctggctggctggaggagtctcagctctcagccgctcgcccgcccccgctccgggccctcccctagtcgccgctgtggggcagcgcctggcgggcggcccgcgggcgggtcgcctcccctcctgtagcccacacccttcttaaagcggcggcgggaagatgaggcttcgggagccgctcctgagcggcagcgccgcgatgccaggcgcgtccctacagcgggcctgccgcctgctcgtggccgtctgcgctctgcaccttggcgtcaccctcgtttactacctggctggccgcgacctgagccgcctgccccaactggtcggagtctccacaccgctgcagggcggctcgaacagtgccgccgccatcgggcagtcctccggggagctccggaccggaggggcccggccgccgcctcctctaggcgcctcctcccagccgcgcccgggtggcgactccagcccagtcgtggattctggccctggccccgctagcaacttgacctcggtcccagtgccccacaccaccgcactgtcgctgcccgcctgccctgaggagtccccgctgcttggtaaggactcgggtcggcgccagtcggaggattgggacccccccggatttccccgacagggtcccccagacattccctcaggctggctcttctacgacagccagcctccctcttctggatcagagttttaaatcccagacagaggcttgggactggatgggagagaaggtttgcgaggtgggtccctggggagtcctgttggaggcgtggggccgggaccgcacagggaagtcccgaggcccctctagccccagaaccagagaaggccttggagacttccctgctgtggcccgaggctcaggaagttttggagtttgggtctgc

SEQ ID NO: 16524 - DNA, 1157 bp, Homo sapiens
ccctgtaattatatttgaatttaaactatttagggagggaactcactggagagcaggtagggctgacacattacacaattccaggaggcagtattcatgcacacagtgcttcctgcgattgtgcagttgctgtgcagtggccctgaggcaaagctccctgcctttaccaccttttaggggattgctggcctagagcatggtcagaatgctggtcctatgctccctccctccccttaccttggaacccaggccagtggcccatctccattcatgcacaatctgttttgagtctcagccatgggttccccagaatgggtaagcaaggagccttgtgtgggcagtggtcggctacccctggatgggcccttactgccccgtgtgtattttctaggcattcctagccgagtgtgacacagtggagcagaacatctgccaggagactgagcggctgcagtctacaaactttgccctggccgagtgaggtgtagcagaaaaaggctgtgctgccctgaagaatggcgccaccagctctgccgtctctggagcggaatttacctgatttcttcagggctgctgggggcaactggccatttgccaattttcctactctcacactggttctcaatgaaaaatagtgtctttgtgattttgagtaaagctcctatctgttttctccttctgtctctgtggttgtactgtccagcaatccaccttttctggagagggccacctctgcccaaattttcccagctgtttggacctctgggtgctttctttgggctggtgagagctctaatttgccttgggccagtttcaggtttataggccccctcagtcttcagatacatgagggcttctttgctcttgtgatcgtgtagtcccatagctgtaaaaccagaatcaccaggaggttgcacctagtcaggaatattgggaatggcctagaacaaggtgtttggcacataagtagaccacttatccctcattgtgacctaattccagagcatctggctgggttgttgggttctagactttgtcctcacctcccagtgaccctgactagccacaggccatgagataccagggggccgttccttggatggagcctgtggttgatgcaaggcttccttgtccccaagcaagtcttcagaaggtta

SEQ ID NO: 16525 - DNA, 1388 bp, Homo sapiens
ctctttctccctctttcactctctttcccctgtggaggagcccccttttggccctttctagttctcttcttgattcatcacttcctcctttacctttcatgaaaaagcttgttctcatcttatgactgcgattttggttttgattgattaaatacttggaaatgagttttaactattaaatgtttgtaatcctttttttttttatcaaatagaaaaatagtggcactaaacattgcttcctttttacaggatggagttctggtggatgaatttggattgccacagatccctgcttcatagatttgcatcattcaagcatatcttgtaaaacaaacacatattatgggactaggaaatatttatctttccaaatttgccataacagatttaggtttctttcctttctttgaaggaaagtttaattacattgctcttttattttttccattaagagactcattgcttgggaaatgctttcttcgtactaaaatttgattcctttttttcttatgaaaaacgaactcagtttaaaagtatttttagctcgtatgacttgttttcattcattaataataatttgaaataaaactaaggaaatggaatcttaaaagtctatgacagtgtaactctacagtctcaaaatgacctgataaattgataagacaaagatgagattattggggctgttcatattatgattcagaatcattttctattgtggtattataggttggttaaagtgatggcctttttgatgggttttgttgtgtcttgtgaacaagtcgttactgtgtccattattggaatggaattatcactactgtatcatgagtgggtattttgattctatggttccctcagtattacatcttgacttgtaatcaattatgaatatttcttgatatttaatgtataggacatttatttatactcaataaatatttttcaaaaggatataattttaataatatcacttcagcttaaaacctctactgcggaaaccaaatttaatagaattttaatgtcatttcagcctataactccactacagaaaccaaattaaccagtagcattgtgaggaaagagcaaggaacaatctgggcttgggccctgggtctaccatttactaactactgagtagtctattcaacctctctaaccttctgtttccttattagtaaaatcatgcttaactcacagagcttttgtgaggaataattgaggtaatggtcataagtaccttgttaactgcaaggggctattcttatatgagggattgttaacaataaaaaagaaactgcttcattcttttcttggaaggtgcctggagtactacagcaagttcaaactcctgcccaatttcagggtctttaatgatcctgtcctcc

SEQ ID NO: 16526 - DNA, 1391 bp, Homo sapiens
ctgtcttgtactgacacatccaaagcatgagtgtgtcagaaatcccttgtctattcctgtctgtataaagtgtttcattatgaccagatctctgattgtatggtcactaggtatgcaatcacgcattcaaagaggctctttacaccatcactgtgattgctctgagagttgagggactattgggctttatttggacaaaccaaacttttagcctgaaaccaactttatgccactaagtcatagcctcagttgtcccagttatttgtcctcctgaaaatgcctgaaacatcagacagacattgcttgctttacccaaactgatcaaaatctttaggagcacaaatgaattttttagtctgaaataccaaataatgaattggtataccatatccggaatcacacatgttatcttaaacccagccatcatacctaagtcttttgccaaaacctctcataggtatatctagctgaacttattttggcattttcaatgtgatcagttctagacctagaagggggtcaggctgctttacagaattctatttccttaagtccctggcacttctcataccacatcactgaacctgttcagtaacaatcagtttggccgtcccccatgatggtaggaaatatagagagcaagttcttctgccagggtcacactgtggtctctgaactgaccagtatatccctaactcctctttgatagagaaagagtctcaaatggacaactgtcctgtgttgctttccctaggccttcagcagcctattggctctccctgcctctgagctctggactctgtttgaatattccaagtagtatatggacagtccagggcttatgcccagcagcccactggaggcattcttcaggctcctttaaggcaggtgcattgatagttccattagtgtgacccttgcattggcacccctccagcctggaggccaggcttccagcaacttccttctgccctagagcaagccatgagccccagagcagtagcaggagacttgagaagtagagtgacaaaaacaagcacttaattaaattataaaatttaactttatagggctgccttttggtgttttcatttttttatttcttttcattttttttcctcaatcctcctcctcctgtagcagggctgtcctttggtccttacccagtctgcttcaaaagggatcaggtacagcagcaggaacaggtgactggagggaagtgacacaaaacaaaaccacctctctctggacccatgtagtgcaggtcagtggccccacacacaacaggaagcccatgagcatctgttacctctttcaagcagtgggttcagtgggtgaatagtacgtgtgagagtatctcagaatcagcaaaaggcaggagacctgacttc

SEQ ID NO: 16527 - DNA, 1744 bp, Homo sapiens
agctcaccctgttctccccactccccagttcataggcacagcctcccttatcgtgtgtgtgctggccattgttgacccctacaacaaccccgtcccccgaggcctggaggccttcaccgtgggcctggtggtcctggtcattggcacctccatgggcttcaactccggctatgccgtcaaccctgcccgggactttggcccccgcctttttacagcccttgcgggctggggctctgcagtcttcacgtgagtacagcccccacccagctcaccccagcctgcctctcctctgccctgccccccatgtccctgactatgagtgtctgtccccccaggaccggccagcattggtggtgggtgcccatcgtgtccccactcctgggctccattgcgggtgtcttcgtgtaccagctgatgatcggctgccacctggagcagcccccaccctccaacgaggaagagaatgtgaagctggcccatgtgaagcacaaggagcagatctgagtgggcaggggccatctccccactccgctgccctggccttgagcatccactgactgtccaagggccactcccaagaagcccccttcacgatccaccctttcaggctaaggagctccctatctaccctcaccccacgagacagccccttcaggatttccactggaccttgcccaaatagcaccttaggccactgcccctaagctggggtggaaccggaatttgggtcaatacatccttttgtctcccaagggaagagaatgggcagcaggtatgtgtgtgtgtgcatgtgtgtgcatgtgtgtgcatgtgtgtgcaggggtgtgtgtgtgtggggggggttcccagatattcagggcaagggaccagtcggaagggattctggctattgggggagcccagagacaggggaaggcagcctgtccatctgtgcataaggagaggaaagttccagggtgtgtatgtttcaggggcttcacatggaggagctgcagatagatatgtgtttctgtgtatgtgtatgtctgcctttttttctaagtgggggcttctacaggcttttgggaagtagggtggatgtgggtagggctgggaggagggggccacagcttaggtttggagctctggatgtacatacataagtaggagcagtgggacgtgtttctgtcataatgcaggcatgaagggtggagtgaagtcaggtcataagtttcatgtttgcttttgttttgttttgtttttaatgtatgtagcagatgttacagtcttagggatccgggatgggagaccccactttagaaagggtcgtcactcctttaatcctctactcaacaatgtactcttttacttttatattaaaaaaaataaaataaatatgtgcctaaaacctccagttgtgcaaatatctttctgcttgctctgctgcttttctggggccagttaaggagcttccgcatgcccacactgacccagggtgcccggctgagtgtctgatctggtcaggttaccctgggggtcatacagagaggttagagagcctcttcaccaaggctctcagtttgaactcagtggtcccaaactttcccccaagtttccgtcctcatgggtacccccagcataatgaatggaatcttcttcccaatccctgtacccacacatcaccccagaaaggcttgagccctatgcagggaagatcttgctgcagagctacccaatggggagaactgctgcccaggaggtggtg

SEQ ID NO: 16528 - DNA, 2163 bp, Homo sapiens
ggggccctcatccctgatgcccgtgctgggctatgatcctcctcagctctatctgacgcagctcagggttggtcctaaacagctgaatgacctggggaggggacttccaggtgaagctgaggctgtggaggagctcttaaatgcctgcctataatcttctctgttctgtccctttctaggaggcctttggggatctggcccttttcttctatgaccagcatggtggagaggtgattggtgtcctctggaagcccaccagcttccagccgcagcccttcaaggtgtgctggctggtgacagctgtgttcctgagtgtgtgcacgtggttctgtgtgggcatgcatgtctgtgtgtagtctgtcctatgggcaaacccgtgtcaggtgcggagtgtatgggcttgtgtttctatccccaccacccccactctgtacccagcttggtgtctctgggtgtgccgctgtgacactcaacccacatctcttctctgatttccccaggcctccagcacaaaggggcgcatggtgatgtctcgaggtggggagctagtaatggtgcccaatgttgaagcaatcctggaggactttgctgtgctgggtgaaggcctggtgcagactgtggaggcccgaagtgagaggtggactgtgtgatcccagctctggagcaagctgtagacggacagcaggacattggacctctagagcaagatgtcagtaggatgacctccaccctccttggacatgaatcctccatggagggcctgctggctgaacatgctgaatcatctccaacaaaacccagccccaactttctctctgatgctccagcattggggcaggggcatggtggcccatgtagtctcctgggcctcaccatcccagaagaggagtgggagccagctcagagaaggaactgaacccaggagatccatccacctattagccctgggcctggacctccctgcgatttcccactcctttcttagtcttcttccagaaacagagaaggggatgtgtgcctgggagaggctctgtctccttcctgctgccaggacctgtgcctagacttagcatgcccttcactgcagtgtcaggcctttagatgggacccagcgaaaatgtggcccttctgagtcacatcaccgacactgagcagtggaaaggggctatatgtgtatgaatagaccacattgaaggagcacaatgccctcctgtgttgatgccacttcccagggtggagacagtggaaaagaaccgaggacaggaaaggattgggtaggtgaaggggtcaggggactggtagtcacccaatcttggagaggtgcaaaaagcactgggggctacccgttagctgcatctgccctggctgtttgcccgttcatgtcacaaactgccactactatgtacctgcagtggggttgcagagatgggggagactcaagtcttactccccaggagctcccagggcccaaggaggagaatgctgcctcctttcagtctggtctacacccactttctggtagcctctctgcttcctgtaattctggctgtttttccagactcagctcaaatagtgcccctccttaagcccatccctcgcccccagcctgaggtgatctttccctcctctgaactattagagcagttactgtctgttcagttcgtttggcaggcacacacagtggcataaattctattgttttgaactctgatttaaaattaaattgcagctgggcgtggtggcttatgcttgtaatcccaacacttagggagtcaggagaatcacttgagctcaggagttctagaccaatctgggcaacagagagaccccatctcttttaaataaaaagttaaattgcttaatttcccccgtattcctggcctgtctgcccctttcacataattttaacctggtttcttgtatgtaaactccttgagggcaagaacatgtttgaacatagacttcttcgtgtccttcctagcacctattacagtgctttgctcaggggccatccagcacaggcagatggggggcagagaagcccactggaagattgcagagtaaagggaatccatttgtgaaatctgcctgcaagaagtgggtggtgacggtgaaagagaaagcctaagagattatagagttgacgtttattgagggcttaat

SEQ ID NO: 16529 - DNA, 1195 bp, Homo sapiens
cttttggagctttgctctccagatatgagaactgggcctagtgttgctaaccgtggctcaggcacttctgtcagcagaggagccctggctctctcaccttggtttcaccttggcccacagctccacaagcacttatgtgcctggccttctcttctcccctggcccctccaggaaatcctacaggacaaggacgggctgaaccagcgctacttccgcaagcgtgccctctacctggcccacttggctcaccacctggcccaggaccccctctttggcagtgtttgcttctcctacacaaatggctgccacctgaaaccctcactgttgctgcggccgcgtggtgagaggcacacattgggctgagggcatagcatgggatggtaaatctggaggagaaggcacagaggcacggaggcctcaagtatggggggacaggatggggagccctctggctccaagggctcctgcagagtctcagcactcactgtctctggcaggaaaggatgagcgcctggtcactgtacgtctgcatccgtgccctccacctgacttcttccgcccgtgccgcttgctgccaaccaagaacaatgtgcgctctgcctggtaccgagggcagagtcctgcaggggatggtgagcaggccctggtgttgaggtggagctggagggaagaggtgtggggacttttcctctcatggcttcccttttcatcccacaggtagcccagagcctcctaccccccgctataacacatgggtcctgcaagatacagttctcgagtcccatttgcagctgctgtcaaccattctgagttcagcccagggcctgaaggatggcgtggcacttctgaaggtctggctgcggcagcgggagctggacaaggtgagttgggggtggcgcagcctccctacctgagcgcctgtgtgatgggcaggctctgacctcagcctctccctgtctctttcagggccagggtgggtttactgggttccttgtctccatgctggttgtcttccttgtgtctacacgcaagatccataccaccatgagtggctaccaggtcctgagaagtgtcttgcagtttctgggtgaggcaactaggtggggaaaggccaggggctccactcctcctgggaatcctctcatcccagtagcagtcttttggtgttttgccatcagacagatgagcaaactga

SEQ ID NO: 16530 - DNA, 1935 bp, Homo sapiens
tattatctattcttattctggcagttatccctgtgcttcacacatgcaaacaacaaagcatgacattccgcccactaagtcaatacctgttctgattcttaagtcgccgacctattggcccttacatgaatcggaggacagccagttgacgaggtgattctggctataattgatccactgctttaaactcccttgatattaacagtgtatttcccctcctaaaaagtcaaagtttacttcaaaattgtacccagtgggttgaaagcatttggtgtagtacagggtatctgtcagatgctttcaggcaggtactgaagtttggagagctgagtcataagtaatattgattatttaaggccaattataaatctgtcttaaaaaaagacttaccgtaaaccatttctgtgtcaacctcccttcaggaaacaagtttcagccactaaggccgaagcagaaaaggatggagtgaaggtccccacaaccctggcggaatactgcatcaaaactaaagtgccttccaatgacaacagctcagatttgctttacgacgacttgtatgatgacgacattgatgatgaagatgaggaggaggaagatgccgactgttatgatgatgatgattctgggaatgaggagtcgtgacgtgctccttcagtgcccctgtactgccctgccatctcaggccaaagggaggggagcaagtggggacctggccatggcccctcagcaaaaacctattcacagcgggtggggaaacacacacagctcctgctgactccccttatggatctcagtttgctcctttttatggacctttaatggagagagagtaaccctccacagaatgtctgaattcttgcattctttacccttccatcactatattgattctttttttaaaaaatatgaacccaaactcccgcctcacttcgtctctacagaatgttcacagcaaaacacgtttggtctgtttttagattcttgaagaattcaatagtctttcaagatgtttaatgtgtttaaagctgggaacctgttgggagttcacaagtgctgcatatactgggtagcaaaagaaaatggaaaaaaacccacaaaacaaactttaaaaaaaaaaaaaaacaaatttgccaaggtttagctgctcatttacattagtgtgtgtgcattcgttcagccccatggtggtgaattctgtttctttcctttcctaaggctgggacatggtgggcatcagggactttgtgctaagcctgatgaaatgtgctccttcaatctccatgaaaccatcgtaacatggaggcctcagctgctctgaggagagaaatcagactttgttttttgaaatcgattgggatcgaaagcctgaaataaatattcatactttccatagaactgagcacttggttgctatttattttaaaggcagggttatttccccccagggagtggggcaagcggggaagttgggatgagtgcgtgtgggagcaaagagttaaaaatcactatgctaagtttggttgatgctactggggggaaaaagttgaaactactggtgaccactgttgggagaggaaacatctgttttatagatttagcatggccttcccatcaaaaatacactcgtaccatgacgttttgtttttgttttttaagtagccacttttaattactcagtattaatcctaggtgcatgtgttaagatttcggttttcatcgagctgcttatactgatagtgaaaaacttggatgtgtgtgagacgagttaccgccttcttcattggatgtgatctgaactttttttctcctttcaacatacttaggctgtggagtgcaagcagaattatgcatagaaattgtggcagggctgagggagttgactgcaggcagtttttaggccagataaggctagatcttcctgcaatgcacttgctg

SEQ ID NO: 16531 - DNA, 1252 bp, Homo sapiens
ggcctcgggagcggcccctggctatgcacccccaccattcctacacatcttgccagcccaccagcagccccactcacagctgctgcaccaccaccttccgcaggatgcacaggtgagtacagtgatggaggcagccaccctactctgggccaggggttctgctccagccttgacagccttcccttctcctcttcctcagagtggctcgggtcagcgcagccagcccagctccctgcagcccaagtctcaagcctccaaacctgcctacggcaactctccatactggacaaactaaacccagaagagaggggtgggctggggcaaggcttatcctgggcaggagagaacacacgagcacgtatttgggagcccagtgccctttcctagaattcccgacatgtgtcagccatgcctctgtggggagtctgcctcccagactggctactgtatgtaatgtatttatgtatgtatttgtaaatgtgatagaagtctgggggggagttgggggatggcggcagatgttagccaggtctgccctccccattcaagccccttctccactgtagcaaaataagcacccccaccccatctgccttcaggtcttcttcacagcctgcactgcccagtgggccactaggggcagtctctggaagggctggttcaaggctgtttgggtataggggtcaggtaccaatgaagaatcacgacttgtctcactcctttggaaattgttttctttcctgtgtaattacttcatacctctgtttttgagaaactgttccgtttgtcatctgtcatggtctccttccaccaaatcttcatctgggaatagcagcggtatccctccacccaagtatggccacctgtttgtcttcatatagaacaggggcttctggtctggtcatgtccctagagacttactagagactggctgaccatgaaaaaaaaaaaaataatctgagttattcagccagtcagctcccctttaaaaatctaaggtatctccaagcaacacatctccattctagttgtcttgaaccacgtgggcaactgtttcaggggttttctcttgcccaatccccacctaataaagttctgagagcatgcatggtctctgtgtggtgtgactgaagggcagctcagggcagaagccctggacttcacagggctaaaggagatcccacatggtcatagtcttctgacacaggctataaaggcttgaaatggttttcctttttactggaccctcttg

SEQ ID NO: 16532 - DNA, 1144 bp, Homo sapiens
tgacctcatgatctgcctgcctcggcctcgtgaattgctgggattacaggcgtgagccaccgcacccggccacacaattgtttctttaagatttattatttacagctgacttttgcttttaggcatagcctgtttcttgacacattttaaattgggctattggcaggtaaaatcttggctgggtgcaatgttgttttggggttcaaatagcaactgcaagtagtaagaggcagatagcacttcatgtacagtgactacatgtagtgataaaatggttgctggttaaaattggtggtacttgagatttttgtttagaattgctaagctcgtaaaccatagacttagattgcagtagtcgaattggtttaacagataccagcaaaatgtaaaatcctcaagggctacttcttgagaatttgtattccagagagcttttatcttttattgtaagtgtccttgttttctctgaagtacatgcttatcttttactatgattgttttgcttaccatccctactttcttgcagattttctattttgtacatacattattttgtatatactgtatatgatgacttcagtgagcagtgaccattgtcgaggtgctcgggaaaaaccacagatttcagcagcacaatcaacgcaaccacagaaacaagtggtacaggtaagtttttgtggaactctttttttttttttccttttttttcttttattattatacttgaagttttagggtatgtggaactcttgtttgccttgtttagaattaaggaaattaagggagagcatatgatttaatgttttcctttgtaggaaactttaggattttggaccctttgtttaaacagtaggtgatggccgggtgcggtggctcacgcctgtaatcccagcactttgggaggccgaggtgggtggatcacttgaggtcaggagtttgagactagcctggccaacattgtgaaaccctgcctctattaagaaaatacaaaaattagctgggcgtggtggtgtgcgcctgtaatcctagcttctcgggaggctaaggcaggagaatcgcttgaactcaggaggcagaggttgcagtgagcccagatcacgccactgccctccagcctgggtgacaaagcgagactccttcctaa

SEQ ID NO: 16533 - DNA, 2682 bp, Homo sapiens
tcccttcctcccccttttcctgccccatggctagaggtgctaattgtagtctctttctcttcccgtagaatcatgatgaaacctggaggaattacttttcagacattgacttcttccccaatgctgtttacacccactgctacgactcgtctggaacgaaactctttgtggcaggaggtcccctcccttcagggctccatggaaactatgctgggctctggagttaatgacaactccccaaatgcagagatttacactaacttccattctcagtttccttgtttcttttgattttttttttcctaattgtgtgaggctcttgtgttttagtgggaacaccaaagtttgcctatagtttaggcacttaataggaagaagctctgtacagaaatctgaaagttgttttgctttttgttttcccctttggtaatcaaaattttactatcttttattatttctggcttttcaaccaaacattgttgctaatccctatttttctttaagtgacacacattctcctgtctctggcttcttcaggctgaaatgacatagctcacccttacttcactcttgagaggtagggctcctttataattacatggttgctctcagactttctgtgaaagtttgggagctgtgtgtgtctgtgtgtgtgtgagagagagatcttgtctgcgtgtgtgtgtgtgatcttgtgtgcctgtaggtactgtgtgtcactgaaattacctggagtgaggattacttgtaattaaaatatttataaaagaaacaactttattcacagagtccagctttgggactagtctgtatcttgttttttaagtctaacaacactgataataggaagtaaaaacagaaaggaaaagaaattaccactgggaaaatctttttagttagattgtaggcttcctggggcctcccatgccaggactgcaaagtgatccagccctacctgtcttcccacctgtgtgtcccccgtgtgggaagttggtgtcacttccccttcccaccctcacatctgcttagccagtagccacacccctaaaacatcagactcaccatccaggtgcagctccagaggctacaaaaggcttcatgggacttgaatccccatcctagcttctctctccttcccctcaagacctgatctggttttaaggggcctggagctgggagtctcaagtctgctaagattcacatccatagcccccatggctttgaggagaatcctctctgccattcttccaatctccccagtgggttttgctattattttctaaattgggttaagtctaagaaggtgggggtgagcagggggtttatctgtgtgtagtgagtgcttcatgtgtggaatattcattttcttactgcagtgggacttggggttgaagccacccctcctactctgttggcttagccctgagatggtgacaggctggcctgcagtcagcatcattgtgcatgtgacagcatcaatgtgattagtaatttgtctgttcctcccttgaactgtctgtttagtctgaggtttttaaacttgcaggcagctgactgtgatgtccacttgttccctgatttttacacatcatgtcaaagataacagctgttcccacccaccagttcctctaagcacatactctgcttttctgtcaacatcccattttggggaaaggaaaagtcatatttattcctgcaccccagttttttaacttgttctcccagttgtccccctcttctctgggtgtaagaagggaaattggaaaaaaaattatatatatattctccttttaatggtggggggctactggagaggagagacagcaagtccaccctaacttgttacacagcacataccacaggttctggaattctcatcttcgaacctagagaaataggtgctataaacagggaattaagcaaaatgctggatgctatagatcttttaattgtcttaattttttttctattattaaactacaggctgtagatttcttagttctcacagaacttctatcattttaaactgacttgtatatttaaaaaaaaaatcttcagtaggatgttttgtactattgctagaccctcttctgtaatgggtaatgcgtttgattgtttgagattttctgtttttaaaaatgtagcacttgactttttgccaaggaaaaaaataaaaattattccagtgcacaatggtgtgagtgagtattgtgtagccaggagcctgccaaaaaggccccacatgactagttggaaggttggcttgagctgttgggattgcttgtggcagaaggggaacacaagccattacctccaggttagaggcaggtcaagtgcaggcacaaatactaagacctgcttgctctgggtccccaactctagcccaagatgagttgctctgaggtccagctgagggtggatatgcccagggtactgaagtagtgtgacgttacttctgttacataagtaagggttggtaataggccctgtctgcttggatggtgccctgagaatgacgctgaaagtgcttgcatagtactctgggaataggatattaatttttgttttttgtagttggaaccatagaccttcactgccctttgtaaggggaagacacagtgaccacagtgagtgatgctcttctagagcctatttggagctgtagctgagagaaactgccaa

SEQ ID NO: 16534 - DNA, 1099 bp, Homo sapiens
ccattgagtgggctgaagagattaagaaaatcgaagaagccgagcgggaagcagagtgcaaaattgcggaagcagaagctaaagtgaattctaagagtggcccagagggcgatagcaaaatgagcttctccaagactcacagtacagccacaatgccacctcctattaaccccatcctcgccagcttgcagcacaacagcatcctcacaccaactcgggtcagcagtagtgccacgaaacagaaagttctcagcccacctcacataaaggcggatttcaatcttgctgactttgagtgtgaagaagacccatttgataatctggagttaaaaactattgatgagaaggaagagctgagaaatattctggtaggaaccactggacccattatggctcagttattggacaataacttgcccaggggaggctctgggtctgtgttacaggatgaggaggtcctggcatccttggaacgggcaaccctagatttcaagcctcttcataaacccaatggctttataaccttaccacagttgggcaactgtgaaaagatgtcactgtcttccaaagtgtccctcccccctatacctgcagtaagcaatatcaaatccctgtctttccccaaacttgactctgatgacagcaatcagaagacagccaagctggcgagcactttccatagcacatcctgcctccgcaatggcacgttccagaattccctaaagccttccacccaaagcagtgccagtgagctcaatgggcatcacactcttgggctttcagctttgaacttggacagtggcacagagatgccagccctgacatcctcccagatgccttccctctctgttttgtctgtgtgcacagaggaatcatcacctccaaatactggtcccacggtaagtcttttaaatcccccgccgactcccatattttcctgatgacagggattatgttttttcttgttgtttggttgatttttttcgagacagggtctcattctgttgcccaggctggaatgcagtggtgtgatcgtaccttattgtagcctcgacctcccgggctcaagcctgttgggacaacaggcacatgccatcac

SEQ ID NO: 16535 - DNA, 1215 bp, Homo sapiens
ctctttgaagagcagccatttctgggttcagtatccttccttggtgggaagatggatgtgggtggtgggacccagacagagctcagcaacagtgagctgggactgggctgactcctgaaggttgatggccgtcaccaaacccgtttgccttggcttccaccacagcccacctctgcttgctaggggaccttatggagactcacggggctctgggggaaggatgtagacattctgctctcccccagtccccgtcccacacacacactccttcactcagctgtgctgtgaccccacccttttctttaatctgtgttctcttctctcccttagatgatggagtttcttcagttaatgagcaaatttaaggagatgggctttgagctgaaagacattaaggaagttttgctattacacaacaatgaccaggacaatgctttggaagacctcatggctcgggcaggagccagctgagaccaggccctgcctaggccctgccgcagaaccaccatccctgggaggccctgcagagcccacctgtggggaaagagaaggggcagcttccggattttcttttgggggttagaaggtcaggtgtggagactgctcgccagtctctgtgagcctaggccctgagctggggaggtggggaagattcgggcatgtgagtgcccccagaactgtcctggctccttccgtattaaacgcatttgcattttgagaagtgtccttcccacttcagccctccggagagactaccctagtctttctggggtgtttatgtcctcagctgaagcctggcctagttgctgagaggggctggggagatggggcgggagggccagactcagtgctgctgtggagctaggtgcttcccccttcccctgagactggtggactgaactccagtcaagttgagttcaagtgaaagattcttccagggttttattttttcccctcctaacaaagtctcatagtgttaacactggttctgcaatatctctgaggtgcaaagaatgcacttttccctatggggcccagagtttgccttttctgccaggcagtcaccatgcttccctaccccagcctgtttcttttggcttggtttggaccacagtcctctgctacccagggttttagagcccctgctctaggaaacagtttaagaaatcattggccccttcccagcacattgaatgggtaagcagacaggccatg

SEQ ID NO: 16536 - DNA, 1337 bp, Homo sapiens
tgcccccaccctcacccacgcttctgctcattggtctcaatcccagcctggaagcagggagtaaggctggactccaatggcccattcccctcaccccagcccaagacgtgggaggctgcttcccagtaagaatccaggagcaagctttggtgaatccagtgggctgagtggctctatggatgtggttgtttggatgtggtagggagtgcttagcagaatgtgtgtgtatctctgaggctgtcagggggtgggtgggtgtgtgtctctgttggacctgtctctcctcagtctattcctgtcatagatgtgggtgtccctggtagggaagtgcctgtgtggtctgtttacagtgcagaaggcggctcagcagtgcaatgggctgacagccttggaccgggagtcagaagcctgggttctggttgtagctctggcccctccctgtgatcttcaacaagccacttgctttctctcgtcttcagtttcctcaactagaaaatgaacagcagctgaaattatgttgaagatccttttatacctgaaagagtttcttcatagaaatttctgtggtggggagggggcaatctctgtgtgtctcagtatacctaaaggttggggtggggcggagttgtgtgtctctgtagaaaggcgaaggggcagttcctatcaggactgtgtatgtctgagcacatgtggctctgtttgggattacgtgtttgtctgtgaatgtgtgtgtgtgttggagggttgtctattgtgtgtggctgtatagggtgtctgtagatcaagatgtgtatacagctgcttctgctattgctggtttgggggaggggactggaaagctgagactgaaaatcaagagggaagaggtgaggaaggcccacccctggggctgggcagtgtagacctgccaccgtgtgaagaaaaatgaaagcacagatagcctaagactgcacaggcctgtgcccacataccttatagcacaggcccaggtggatcatctcatgctaacaccccacatgtgctggtggatccactcccatggatccactcacatgctgcaggcatgcagtagactcacccacagcccactctctggacaccaatcctgggaggtgggagctggaatggggagcaatgagaggagggagtgagactgttggcttaggaagggtggtacctctccctgcatcatacccaggaactgccagctccaaaatattggggtacagctcaccaccccccactccgccaacccattcctacctcctctagtgcagggacccaagttagatgatgagaaaatgccaaacaaagggaggcaaggacagagaaggtac

SEQ ID NO: 16537 - DNA, 1132 bp, Homo sapiens
cgcctggcaatggggggagtccatccggtgaccttctttggatttcagttccctgcctcggagttggagtagtaaccttgcttcgaggtcacttgccttgaggcccccctgatccttcattgtccaggccagactgagcctacctgagcctcggcgtgcccacagcaacccaaaccctgaagtgcgcaacacactattacagatcaacccgcacacacaattacagctgagacgcagttagtggtgctcattatcccccaccctgacctgatggcggcagggcttccccagggttggccttctacaatctaaactgctgtaattctgcagggataaatagaggctttccaaaactcacacctccttcccccaggttctgccctcagctgggcatggggtgaggggaggggtacagggcaacccggaacattgctgggactggcaagacggttcttgggtcttgggtcctaagccagattcttaaactgggtaacaggggttcctgacctggagcctgtcgctgtgtctgtttgttaccgacggcggctgtcagacttcagggctgccagtattgctgtggactagtatcattctgtgagactgttactgagtctatcaacattgctgtgtcactgtgttgatgtcaccgtcagtgtgactcgatgtgactgagtctcattgcatctttgattctgaggttaccatcactgtgactgtgtcagtgtcaactggtatcattgccccgtttgttggtgtcaatgtatgtgactgtcactcactgcattattgtcatcgtggtgactgtcaacatccctgtgtgtcattgtcaacggtacaactgtgtcattttcaatgggtgttgttatcattgtgtaatggtatctttatgccacagtgggacaatggcagtaagttggggccccagaatttgactcttaatgtgttacctgtgtgggagtaatgatgacactagggttctgtgctgggagaggtgcagggacccttgtgctgacaaggggctcaggggcttttgggcgctaggctccttccttgcttatggggtaccccctctgttccctcctcattctggggctgacctctttgaggggctgagaggaatcctgggctaatt

SEQ ID NO: 16538 - DNA, 1239 bp, Homo sapiens
cacccgctttggcctcccaaagtgctgggattacaagcgtgagccaccgcgcccggccacatccttgccttttttccctttgctgctccttttctgctttgccttggccttaaactctcagggtcgggggcatgagaagagaaatgaaggttgcatcagtagcagggggtgctgcgggaactagagcaggattatgggcagtagtgaactctgaagaattgaatcagttggatctcccatggatcttgagattttctccaatgtgtccagcagcctgggtgtccagtcatgaggaaagcagaaggttggggttcttctgggctcacattgtagtagaatgggcccagcaatgtaaggatgttgcagtgatacttaactgagaccaggcaggagggattgagaaggagagggaattggaggactgaagcccttgataagggcttagaggaggggtgaggtgaccacagggccagcaggcagttttcaaaactgtaaatactgcatcctttgctttcaaagataggttagctctgagtgatgtggaggaccctgggggaggggtaggtgatggggattcagaggagattaggagagaaaacctcagtggctgccgagcaggtctctcaaatgcacagggtcgtgaagcatctaaaacactcctaaaggcaattatggctgcagtggcagtgactcaggtgtcttgctgccagcaactgactgacttcccccattctccttgcagctaattcaggaattttgttccctctcagcttctgcataccgctttttctctgaacatcttcacttgtgtgtcttctgccatcagcagttctctgagtatcattggaactccagagctttgaggccaggccaccttgcagactattgacctttggctgatgatctcatcccatctgctgatggccagggtggagggatcacatataataattatggtgatctgtgctgaaggtggcattgcgagctctggagtcccaggaggggcattttctctccatctttggtctctacggggcccagctggggcctacaggaggaatggcagggaggggaccagaggcatgagccctttggagtcagaaaggctgaccagctttacaagagagcacaagagttgtgtctagttctgtccactttctccttaattcactgcaatgtggcttctgccaccataaggtcacgtcttggcacaaaaggtaaggaagtagagacagctct

SEQ ID NO: 16539 - DNA, 1187 bp, Homo sapiens
cgtcatcttttttaggctccatggggagtgggagtccgtgatgaggcaggaagtttagtggaagatgtgggctttgcccagttcctttctgtgctacactttggccctacaggaccagtgtgtggaaatcactgaggagtccaaggctctcctggaggaatacaacaagactgtatcctttctgctcaactaggaccctaatgggtgctgtccctaagccctgtccttttgttccacctctagctctctctcatcctatcctacccacctatgtttgcctgttccccactttccatgaacttcctcactcagattcctattctcaccttgacctacaaccagacaatgcttctctccaagcaattcgtgcagtgggatgagctactttgccagctagaggccgccacgcaagtgaagccagcagaggagtgatagctgctccccatcccaaagtgggcctgggcagtcaggctccagggccctatgccaacctgcctttgttacaaggcagaggaagctttgtatttattggcttcaaggcccacctctctgtactctgggctctaaagttggaggtcaggttacctgaggtttgcaatttgcaacacccaccctccccccaatcagtgttcttatttcagtgacaataaaccatagagatgactggaggagtgtgctggcttcttggtctaggatggaggtggtagggggcagaggtgtcagcctgcctaatcgtttgactgggaactaaactcatcctggtctggctttctggcaggtgtagagctctcaaaatgaaggctctcatttgattatgtgaataggatattcctttatgtatccatttatcccacatttaccaataagagacctccaaatgtcagatgatgggagtagatagggctaatccctgccctgcacgggctagcaggatagacagtaaaggaaaagggcagtcctatcaggtggacacagaagaaaaaagggactgaagggacctggtaagtgatatccagggactttcagagccaagggagcagcatgtgcaaaggcctttaaatttctctcttgggagcctacctgctgccacgagccgagaagggcagcctaagaggtttggatgcaggaagttttggtcctggggaggggaagttgggaagtaggggcgctggggcaagcatgttgag

SEQ ID NO: 16540 - DNA, 2075 bp, Homo sapiens
cagtatatttgaggttgggtgtatgcatcgcaggcatggtggttgaacagctacacttttcagataaagcctcacaagtcctggaactacccctttcctagctacaagcccagcccaggtttagctaaatttctgcttgattcgagtgaggcttgggagtgcagacttccatacagtgggtccatggccaagcgaggtagccgtccatggcttctccaaagagaggacgtgggtcagatgatgccacagaacatttaggagtggccatctgggccagcccagtgaggtagggctttttgtttttctgaagctccctctccattccccacccctagttagtccatgggccagggaagcagcagccatggaagggcagggcagagctggcttttcacttgggtgctccctgtcccccaggggagacggtagtacacgggcctggtgaggcaacagctgtggagtgggggccaaacacatggatggtggagtacggccggggcgtcatcccatccaccctggccttcgcgctggccgacactgtcttcagcacccaggacttcctcaccctcttctatactcttcgctcctatgctcggggcctccggcttgagctcaccacctacctctttggccaggacccttgaccagccaggcctgaaggaagacctgcggatagacaggagcgggcaggcccgcacatatccacttgctggagcccatgtttacagacagggacatacaccatgcagatcctgagttcctgctgtatgagcagggatatccatgcttatgtatccaaacacagagacccatgggaacaaatgagacacatatagatactgagacctgtgtgtacagtaggaccatgcactcacacccatctggagagggagcccccggtataccaagggagccagttgtgttcagacacacacatcacagcttgactcactaactgaggcctttccatagctccacagcttcccacctcctccccaccaaaccggggttctagagttaaggatgggggagggtattatactgcctcagtctgactcctcaacccagcagcaatttgaggggatgagggggaagaggagctgccttttggaggcccccttcacctgcagctatgatgcccttccccttctcccctgtcctcaccatatgccttatccccattctactcccctgctatgcaagtgcccctgtggcttgtccccaaccccctcagcaacaaagctcagctggggaacgagagtaatttgaagaatgcttgaagtcagcgtcttccattccagaaagacccccattcttcctttgggggtatgatgtggaagctggtttcagcccaggacccaccactgaggagaggatctagacaggtgggcctaattccaaggggcccttcctggcctggagaaggccttttacacacacacaacacatacacacacacacacacacacacatatcacagttttcacacagcccctgctgcattctctgtccatctgtctgtttctattaataaagatttgttgatctgttccatctttttgtgtgtctgagcagccggaaaaagcctctgacccctggggacctcaggaagatctctctcttgctgtgtgattcatggtagattttttttttttttttttaagagatggggtctcctctgttgcccaggctggagtgcagtggcacagtgacatgatcatagctccctgcagccttgaactcatggtcccaaacaattttcctgccttagccttatgagtagctgggaccttatgagtagcaaatgccaccatgcctggttagctttttaaattttttttagaaatggggtcttgctatgttgccccggctgatctccagctcctggcctcaagtgatccttcctcagtctccagagtagctgagataacagaaacaagccaccatgcctgacaagacagtggcttttgactagtagggactatatacttgagtgtgccttagaatcacctaagacactctttgagtcagtaactcagactactgagctccattgccagagatcaacatgttca

SEQ ID NO: 16541 - DNA, 1176 bp, Homo sapiens
ccctgcatctgcaggctgggccacggggagtagttccctcttagaactgtcctccacccacagggatagtgaacctccttctgggtcatatcccaccaagctttttggtcccctagggtgggccttccctactcccttgtagcctgtccagtctttgaagcccaccaggtaactggtggtatggggcagtgagtgcttctagcctatccttgtcggtaggtgaatccccagtacgatagcaccttcctgtttgacaacgacttcccagctctgcagcctgatgcccccagtccaggtaacctggctccaactgctgctggggaggagggtggctagacctcttgagggacttctgctgcagagagtgatactcctttacctcaggacccagtgatcatccccttttccaagcaaagtctgctcgaggagtctggtaactatggatttcccctcttacaactttcaaaccagagttggagactcagcattggggttcggccctgcccgtagcacagccaagccctacctctcggttatcttttctcccgtcaccacccagtaaggtcatgtgcttccacccctggtcggatgtaacgctgccactcatgtcggtccctgagatccgggctgttgttgatgcatgggcctcagtcacagaggagctgggtgcccagtacccttgggtgcaggtttgtgaggtcgccccttcccctggatgggcagggagggggtgatgaagctttggttctggggagtaacatttctgtttccacagggtgtggtcaggagggagttgacttggtgtcttttggctaacagagctccgtatccctatctgatagatctttgaaaacaaaggtgccatgatgggctgttctaacccccacccccactgccaggtaagggtgtcaggggctccagtgggtttcttggctgagtctgagccagcactgtggacatgggaacaggattaatggatgggacagaggaaatatgccaatgatgtggaggcttggaggtaaaggacctgcctgttcttctctgcttttgccccttgacaggtatgggccagcagtttcctgccagatattgcccagcgtgaggagcgatctcagcaggcctataagagtcagcatggagagcccctgctaatggagtacagccgccaggagctac

SEQ ID NO: 16542 - DNA, 1234 bp, Homo sapiens
aggtgagctacaataggctgaactatgtattgatttgcctgagggcaaggaatagaggctgtttttctttaagagggttgaaatattcttagtgctggctgctcaactgcacagtaagtcacttgattttctttctgaggtctgagagacctagtgttattttttttttctctctctctctcttgagacagggtctggctctgttgcccaggttggagggcagtggtacagtcatggctcactgtaaccttgaaacctgggcttaagcaattctcctacttcagcctcctgagtagctgggactataggcatgcgtcaccacatctggctaattttttattttttgtagagacaaagtctcagtatgttgcccatgctggtttcggatttctggcctcaagtgatcctcccaccttggcctcccaaagtgctgggaatacaggtgtgagccaccacgtttgcctagagacatctagttttgttagtgcttgaatcaatccattcctcctacaggcccgccaagctgccccctgtgtgctattctttgatgagctggattcgattgccaaggctcgtggaggtaacattggagatggtggtggggctgctgaccgagtcatcaaccagatcctgacagaaatggatggcatgtccacaaaaaaaaatgtgttcatcattggcgctaccaaccggcctgacatcattgatcctgccatcctcagacctggccgtcttgatcagctcatctacatcccacttcctgatgagaagtcccgtgttgccatcctcaaggctaacctgcgcaagtccccagttgccaaggcaggtgcaagatcatgggctgtgggagacttgcatgagtcctcaggctggtacggagtgctctttagtttctggacaagattccactggggttagggttggtctaaagggaaggtagaatttttgaggatatcaagataatctagaatcaggaataaaatggggtggccaaagaaggggcaaactgtagttgggagtgctcgggtagcccaaagatctgcgtatctcgagaggagaggctaaatgctaaggtacctctgctgctgcttttaggatgtggacttggagttcctggctaaaatgactaatggcttctctggagctgacctgacagagatttgccagcgtgcttgcaagctggccatccgtgaatccatcgagagtgagattaggcgagaacgagagaggcaga

SEQ ID NO: 16543 - DNA, 1587 bp, Homo sapiens
atcctgttctggcagactcatggcgaggtggagcggcgcattgtatcacagttgttgaccctcatggatggcctaaagcagagggcacatgtgattgttatggcagcaaccaacagacccaacagcattgacccagctctacggcgatttggtaaggactccagatacttttgaccccgtccttgcttaggtcctacttctctccttcatctaagtcacctaatcctcttgaagcccttcacagtgattgggtccaggggtctttttcctttaccctacgtcctgtctagagtgaccaaccaccctggttttcctgagactgaaaggtttcccagagcttgagacttttttagtgctggcattaggacaatcctgtgctggctgagatggttggtcaccctaggcctgtctcttacctctggactagagatgagccctgtttatgtttgtgtactgtcccacaggtcgctttgacagggaggtagatattggaattcctgatgctacaggacgcttagagattcttcagatccataccaagaacatgaagctggcagatgatgtggacctggaacaggtgaagtgatgatgatggctgaccaggcgttacagtgtctctaggcagttgctgggaactggctagagacataaggttaagatgtgaggagatgggttttgatttctggacaggggaaaggaagtaatctgagattgaatccaggaaatgggagttggcatttttcatagttgacgctgcatttagagtaaatcagaattgttggagcagccttatttctaggtcccaagtccagaattaagtacttaaaacccagcccataaaggtattgatagtatatattcaaggaaatgagaggacccagggatagcagtcaggggaaggattctattgtctctgagcctcctgcagcagctgggtctttgaggcagcatagtaagtagatctttctctgcaggtagccaatgagactcacgggcatgtgggtgctgacttagcagccctgtgctcagaggctgctctgcaagccatccgcaagaagatggatctcattgacctagaggatgagaccattgatgccgaggtcatgaactctctagcagttactatggatgacttccgggtaaggaccacacccgtgcctcaggtacacacatacgtgctttgacccctcccttgataagtctcatccccagttttccctccttttctagtgggccttgagccagagtaacccatcagcactgcgggaaaccgtggtagaggtgccacaggtaacctgggaagacatcgggggcctagaggatgtcaaacgtgagctacaggagctggtccaggtagggcaacttggtccagggtgagtcactgtctcagtacattgtaattgatctgggtgatctcagggtgtcaacacatttgctgcaagagttgtgagagcacgacttaggaacctactgttcttaggtttgaggcactaaggagtcttcttctagagaacctggatctgataccattgggtacaccatgaaataatggaggggatgcttctgtttagttaggtttctttcaaa

SEQ ID NO: 16544 - DNA, 2190 bp, Homo sapiens
acacacacatgcaaaccctgcacacatattcatatgtcttaccctctttttttcctccatccttcctttgctccatctctccccttctctgttccaggagagtaagctatctttatggatctctgaaggagaaagtggtccattttggctgggtcagggtccagagtgcacagttctaccattggtggttgtagtgaaaacttgggctacctatatggcagaagtcagaacttgatgggcttctgacatgtcaggttttgttcactgacctcttgtcagagggactcttcacagtttacctttctcatcttgcctgctgcttattaagacaggtggggtggagttggggagaggtagggcaatatctaatgaagggcactatctaatgagcttggcattttgaccccagggtctgatgagttctcactttgtcttgtagttgacacctctaactgtgcttgtactgtttgctctcgcaggagacatttttcttgtccgtggtgggatgcgtgctgtggagttcaaagtggtggaaacagatcctagcccttattgcattgttgctccagacacagtgatccactgcgaaggggagcctatcaaacgagaggtgagttttctccctgattccagtatccgattttatgattactcagtgtggcatcatgtggtaactgtcaggactgggtgctcggccggctgcggtggctgacacctgtaatcccagtactttgggagactgagatgggcagatcacttgaggtcaggtgttcaagaccagcctgggcaacatggtgaaatcccatctctactaaaaatacaaaaattagccaggcatggtggtacacatctgtaatcccagctactcaggaggctgaggcaggagaatcggttgaacccaggagtcggaggttgcagtgagctgagattgtgccactgcactccagcctgggtgacagagtgagactctgtctcaaaaaagaaaaagactgggtgttctttggagaactaaccatctttcagggatgagaaacctgccagctattcatttctgggcctaattgtttcttggatttacctaatgccaggaatttcaaaaaactagactgaacccaaaatatataagtgattgaaatcatttttgaagtaaagctgatggtggcttcaggcctctgcccattcccagggtttccagcttcagattttagagaccccttctcagtaagactacgagtaatgtgagaggcaaggactgtgctagaaatctttgccttgggatttttgtagttgttctttgaggccggatccctttagaggagaatcttttttaaatttaatttaatttttaatgagatggagtcttgctgtattgcccaggaactcctggactcaagcattcctcccacctctgcctcccaaagtgctgggattacagatgtgagccaccatgccgggttgagaatcttcttatacggtaggtttttgcacactaggtagtggaatgatttagagaaactcagcttttgctgatataatattcttgccttctcctttctttatctcctccatattcaggatgaggaagagtccttgaatgaagtagggtatgatgacattggtggctgcaggaagcagctagctcagataaaggagatggtggaactgcccctgagacatcctgccctctttaaggcaattggtgtgaaggtgagcatcctgggctctggaatcaagtctaaagtggtgccaatgtctaatcctgtcccaatgtctaatcctgggactgttttcatgcatggctttcattattgccttggattagaggggcaataacgtatcctttagtttacctaaggctctaaattcattagagctgatggtctaaaaccagagtaggctaatcaaattgtctgttgtgtgcgtgtgcgcacaaaacacacacacatatatatatgggtttttctttacaactcttagaatataaaagccattcttgtatcaatggaccctgtaaaaacaaatctcaccatagtttgccagcctgtctagagcaatgtcacccagtagaagtaaggaagttaaggaaattttcagagtgttaaagggttctgagtctaaaacatttgagaactattggtctagagtgtagcttctcaatcttttcctagtgggaaagtgtttccatggaac

SEQ ID NO: 16545 - DNA, 1326 bp, Homo sapiens
ggagggaggatacaggcgagtcagccgagctggggcctgggacccgtgcgcagtcccagccctcctccagcagccctagctggtacctgggtgtgcccggaggtcgggattggcgcggtctcctaggaccccggacagcgcagacacaagcagcagccccaccacacccaagagcgaaactgcgcccgccattgccggcccacgggtggagggatcgggcgggcggtgccgaagcggtccggcattggccggccgccccaacgcgcacgcgcacgcgagcaggccggccggctccggggaggccacgcccactccccgtagggcggggccagaccatatttgcataagatagtgtcattctagctttcctgtatttgttcatttcgtgtctattagctattctgctagccacaatgcctctgaaagcctatagtcttagaaagttatgcccgaaaacggtttttttaatctcacgccaccaactttctcaccctaatcataaaacacaatttctttagggctataaaatactactctgtgaagctgaggacgtggttcgtgctgaaggcctgtatcctaggctacacactgaggactctgttcctcccctttccgcctaggggaaagtccccggacctcgggcagagagtgccacgtgcatacgcacgtagacattccccgcttcccactccaaagtccgccaagaagcgtatcccgctgagcggcgtggcgcgggggcgtcatccgtcagctccctctagttacgcaggcagtgcgtgtccgcgcaccaaccacacggggctcattctcagcgcggctgttttttgttcccgagaccacggctcactgcagcctcgacctccccgggctcacgcgatgcctcacctcaggctcccaagtagttgggaccgcaggcgcacgccatcatgcctggctaatttttgtattttttgtagagacggattttcacctgttgcccaggctggtctcgaacgcctggtgtcaagcgatcagtccacctcgccctcccaaagtgctgggattacaggcgtgacaccgcgcccggtcaacgcggctgcttttcatgcgcgggcagctttacgctgttcttggccttgctatgaagtccttgtgctcattactccaaatatggagcattcctgaaacagcctcctcttctacctccctctccctttggcaaacgccatagtagccaccattcactgtgtagctggtacacaacatatggactctgcttgggctagaatcctgcctcctgtactcaagagcggtgaccttgtgaaacttagttctctctccgtgcct

SEQ ID NO: 16546 - DNA, 1175 bp, Homo sapiens
ggtatttggtatggacagaagagcagttctttgtagccagagggtcctattgcaggtcaccatcagggctaatgtccacttcctccccaggccttgcacactcagatgctcactgcagtccaagagatctcccatctcattgagccgctggccaatgctgcccgggctgaagcctcccagctgggacacaaggtacctatggagactcatgggaagtcccagggagtagggtgagagagaggggacctgacccctagtccaaccccttgcctcaggtgtcccagatggcgcagtactttgagccgctcaccctggctgcagtgggtgctgcctccaagaccctgagccacccgcagcagatggcactcctggaccagactaaaacattggcagagtctgccctgcagttgctatacactgccaaggaggctggtggtaacccaaaggtattgagggttgggagggaggagctgttactagcaggaggctggagaaacaggaacaacagagctcctctcctctccccacagcaagcagctcacacccaggaagccctggaggaggctgtgcagatgatgaccgaggccgtagaggacctgacaacaaccctcaacgaggcagccagtgctgctggggtcgtgggtggcatggtggactccatcacccaggccatcaaccaggttagagtcttggggtgcctttggacactgaggctaccctgggccagagcctccaagcacagtggcagagaccctaacagtctttccctttccctatcctcccccctcagctagatgaaggaccaatgggtgaaccagaaggttccttcgtggattaccaaacaactatggtgcggacagccaaggccattgcagtgaccgttcaggagatggtgagtttgggcgagtcccagaggactgccctcggagagctgactttggatataacttcactcgttccattatcaccaggttaccaagtcaaacaccagcccagaggagctgggccctcttgctaaccagctgaccagtgactatggccgtctggcctcggaggccaagcctgcagcggtggctgctgaaaatgaagaggtaaacgtggaggcaactctgccctgccccctgccccttgttcctgatgtgtcagtgtctagggctgtcccacccccaccctct

SEQ ID NO: 16547 - DNA, 1112 bp, Homo sapiens
agtattttctctccaggtccaccccaacctcccctgatttatagcctgaagccttatctttcacactagtgttggtcccttcaggtttggcccatcttgtattgctcttctgttcattcttacatcacagcaatctagtcactccctggtcatccctcagtcactcatatcagagtcattctctctggccatctttggtcactcacgtgtcacagcagcccacgccaacaggatgcagacaggtgcaatggaaacagtccttgcggagccaagactcacccagggtaaaatatttcccctcatagtgacagggggctagggaagaacgggaaatgttagtaggtgtaggagtgctgatgagaggcagaggctcttctggtctggggtggagacagtaagtacgcactatccccgtatttagtttgtctttcctgtttcacagctggaggaagcctgggtattttgacacgggatcatctgtaaggccccatcctccctgtgccctctctgctgctcctccattcctaacgcttcaccccactttaccttgagcttggaagtagcacttgctgtagactcctgggtgctggaggagtagagacatcaccaagcagatgatcccccagcctcctaggatccccttggcctgtccagcccagagcatccttagggccattgctgctgcacagccctctcagacccttcttggcctctgctcagctactctggtcttgactccttgactttgctttgcgttgctccttgagtcttagtttctgtctttctcccctgggctcctgtctcacactatctccctgccctctgctctcacaggctggggatgtttataaagtgaggaccctggccccctgctgagtagagctggaaaagttgtaactctgtttcctgaggtgagggcatgaaaacaagaggtctagctttaacaagctgtgagagctgattcatgccccggcacagctagagggagggaggtggccatggagggggcactggactgggcacttccccagcaaggaggcaggaggggcgagggcccccaggtggtccccagatctcttccctgacctggagagaaggaagcattccacctt

SEQ ID NO: 16548 - DNA, 1130 bp, Homo sapiens
cagagatggtggggagggtctcttttcctcaggcattccagaggtgaactgtccattgcttatcaccttcaaacatacagcagatgtgggatcaccccacatctggggatggttctttcccctttcaaagaggagcatctctaagtgccctgatgggatgaatcactccaggttcacagaggtgtcctctctttcctcccatatataatggagtgaggtttttaggaatttatcatttggcatcctctgagtttcccacaggttctggaggagcccaggatggattattgagagcatgggctgtagagacagtcttcttggattcagatcctgactccacttagctatgtaacctggtcagattacttcacctctctgagcctgtttcctcatctataaattggggatagtaatgccaactcattgggctgttatgaggattactgagataatgcgtgcagtgctcttatcaccatctctggtgcgtaagcgtcaggaaatagcagttgctgtgattggggctaaagctctgaggcaaaatgggcgacattattttctttgaatgacattaagcagtttgtgcatagctgagggcttctattggggatggctgtctcctggcatagacctctgcacctttcacactcatactccttgtcagcagtccccaacctttttggtaccagggaccggttttgtggaaaacaatttttccaccagtggatggagggggatagcagcggggagatgattttgggatgaaactgtttcatctcagatcatcaggcattagattctcataaggagtgtgcaatctagatcccttgcatgcggagttcacagtggggtttgcactcctgtgagaatctaatgcctctgctgatctgccaggaggaggagctcaggcggtaatgctcactcgcctgccgcccacctcctgctttgtgctcccgcttcctaacaggccacagactggtactggcctgtggcctgggggatggagacccctaatccatgtcacctttcccacctctttcaaaaacaggtacctccaggaacattttggttttggcccttgtattgacttctgaatgtctagtttgagaaactgttcccaataagccttcttc

SEQ ID NO: 16549 - DNA, 1212 bp, Homo sapiens
agggcagtggcattgtggattatttcttgtctttctcttttcttttttcttcttttcttttctttgagatgggatcttgctacattgcccaggctggtctcgaactcctgggctcaagctaccctcccaccttggcctcccagagtgctaggattacaggcatgagccacaacacatggccaattatttcttttctggtttgatttccattaatgctgctatatttatgtaataaactaaaactataataaaatgttactttggataagaacagaaggacaaagagaaagtaaatgccctctgaggccacgctacttttaggatatacgtggaatttgtctggcttgatgttgaaaacgttctgtggttttatattaagggaaccttgtttctcctcacagattgaagcctgcaataaagaagcagagaagattgagtcccttatcaactctgacagcccgactttggcgtcccatgtccctctctctgccctcatcatttcccaggtacaggtctccagcagtgtgccatcggccggtgtcagggccaggccttcttgccactccctcctccttcccctcagcttgggccttgccttgcacttgctctggacatataactgactgcccacggaaagtgcagaatgctcctccacctcactctcctgccttgaaaaagacattcaggactgctggtttgtagttgaatattggccaaggaaaggcacatgtcacctctattcgccacacagtatttttttttttaatccgccaatattagtaggatttttgttttgtttttacaaatgttaaaatgtgttgttccaaatactaatgaaaacagaatgtctcttcctggtagaccactgccatatgatttacatttcctcaccataagggtcccccactctaaagcaaatttatcgctgggaaatgagatgaccactttttagaaagataattcactgtactatcaggttcacaaacttcatttcagagttctttttgaagtatttaaggttcccgttgcatttgttttgtttacagataattacctactctggctagaagctaggggtcccagtgaagagccactgccattaaagaatatgaaacatagataaaacatctttgaaattatgtaaattatgtaaattatcaggcaaatttgcattaaattacagaaatttaattcagaaccccaactactgtg

SEQ ID NO: 16550 - DNA, 2093 bp, Homo sapiens
ctaattcagccgtgtccctctccctctgcccgttcccctacaggacacttcacggccatggtatggaagaacaccaagaagatgggcgtggggaaggcgtccgcaagtgacgggtcctcctttgtggtggccagatacttcccagcggggaatgttgtcaatgagggcttcttcgaagaaaacgtcctgccgccgaagaagtaacttgttaaatgtaatgggaaggtggcagacttaagaacgtggatatgaagtgcctagaaccaccacaacctggctgtgcgtctgtccctgtgggtgtatgtgcttgtgtgtgtgatgcatgtgagcgtctctggcacacacacttggacatacagttctgtgtgcgctcattcttattacaggagtgagcaaaggaagcatttaccccgatggttacctagaccacgattatttggattggggggaggggggatccgttttttttttttaattttttgttatttctaagcaaacctcttttgtacttttcttacttctaatatccatccctggactttttgtattccaaatgtttgtgatgctgagaagtgaagttcattttatgtgatcttcatgcgtcgtaatctacttttggtagataattaagattattaaaccctcatttaaatgtgacataaaatacagctttaagcacataaatacaaagcagcttccatcaggaacatggagcaggcagggactccattttacagaattactgagatttctcagttgtaaaacatgatgtcatcctgcatgcctcctggaattctccaatggggtcgccaaacaacaaatggagaaaaaaagttttacttccttgcattcttctacctttaaatagcaaagtaccactaccaccaccacctcttgcccccttccctcttttcttaaacttctggcatttcagagctcagcaggctacccctggtttctggagagttgggctaggcctgaagctccccctcccccacctctgctaggcagcccaggcctggtctgggagacagcccctcaccctgcctgggctcttggccaagcggccttggatggatgaagtcagagaggtggggtgagggtgagcttactcagggcccccagaggaagccctcagcctctgccctccccccacacagggcgggagcccaggcctgttcctggcagctgtggctgcagctgtgctcctgctccctcctggaatgtgcgacaagcccaaatgttccggggaggcggccggggcagggggcttagaagtgctaatatggttctgtgttttgcctgaaacgataccaggttcccctgaatagcaactttacaaggtccatgtgggagggaccaacccagatgccctgctgagtgtccctgaaaccatggcagctccatctgtcaagatggcaggggccggagtgagggggctgctggcttaacagcaggcatctgggcaggccagtcctcaaagcagctcctgaaggtctgtgttgcactgtcaccagtctcaagctatgcctctaatttcaccagggatattgactaagaagacaataaaatctttttctttgtgtaataacctcctccaatgtgattcatacttcattctccatggctgagacaatccgtgactctgaatccctctctcgattaaccccagaatacctgcaacccattccccgtggactgtgttgcttaagtggccaagttttaagccatctgacccaccagcacagagctgattggactagagtggacactggatccaacggcagccaatcaccaggctggccatggactgggaatttcagctaagaattatggagagaatttaccagtggaactgaaaaaaataaggatgccataaattggaattagggccatggcaaaccaaagctacttgcaagccaagttatgaataggaaatacacagaagcgaagaagccagttattggaggtacaaaagaggaggagatgctgagaatattcttgaatgttcctgagttttctagctccagcccaaatctgtatatctttaaaatatgcccctcattttcctcagggcttccaaacaaactgat

SEQ ID NO: 16551 - DNA, 1228 bp, Homo sapiens
ggggtggccgtccctggtcagtccagctccagcagacggggtgggtaggacgctccctatcaggcagcacttccgcctcccggggcccgcgcagctcacctccctcacctcccgccctaccccagtcacgagttgttttagggggaccgcccctccacttgctgattgggtagctcctgaaccattgttgtcctctgattggttgttcccttttcggctctgcaacaccgcctagaccgaccggatacacgggtagggcttccgctttacccgtctccctcctggcgcttgtcctcctctcccagtcggcaccacagcggtggctgccgggcgtggtgtcggtgggtcggttggtttttgtctcaccgttggtgtccgtgccgttcagttgcccgccatggctgagctggatccgttcggcgcccctgccggcgcccctggcggtcccgcgctggggaacggagtggccggcgccggcgaagaagacccggctgcggccttcttggcgcagcaagagagcgagattgcgggcatcgagaacgacgaggccttcgccatcctggacggcggcgcccccgggccccagccgcacggcgagccgccggggggtccgggtgagagtgcgggcgcgtttggggcgagaggacttgtctggaaactcggtccacagtgggtccgagagcttctgtgtgactcgtgctccttgctgaattaggaggttagggagcagtgcaaacaggaaacgagaccctggcccggtctttcagaaacctaggctcgagaagcctgttcggttctcagcatgtttgagtgcttctgggcgcgggcggagcgagaaagcaagtgtagggtggcaggctccggagccggaagaagcccgttcaattcagcaacttttcattaagcatttgctgtgcctttagtccggtctctgaagcaaccgcattggcgcagtttttccagacttataagcttataagtctgagccgagcacagaactcgttattagaaaaggagggcggaaaaaaataagaatggaaatatcgtttttgagagatacaaacaaaagtagcaatgcagttcagcatttaagcacttaaggtgtacagagtgttggattacgaggaggaaggagggagtagggaactcgaaagatgatctaggtctggagaaagaactgccaagcgcggtaggagtttgctatcgttgagcgattgatttacagcta

SEQ ID NO: 16552 - DNA, 1232 bp, Homo sapiens
taatgctccacaggagcagagacagacagagagacatagtgagccttgaaccaaacacctgtattccaacattttacacagcggtctgggcaccctgtgcctaggagagccagctacgtgtctacctgagtctgacctgggccaggggctgttatcttgggaaagccagaatgtcattaagaaagggacaaataggcagttgcttgtgtagcaaggcagccaccaggttgctcaaagggggttctgcataaaccaacatattttgttgttgcttccagggcagcagaagaagcctttgtaaatgacattgacgagtcgtccccaggcactgagtgggaacgggtggcccggctgtgtgactttaaccccaagtctagcaagcaggccaaagatgtctcccgcatgcgctcagtcctcatctccctcaagcaggccccgctggtgcactgaagagccaccctgtggaaacactacatctgcaatatcttaatcctactcagtgaagctcttcacagtcattggattaattatgttgagttcttttggaccaaacctttttgtctttagagttgttcattgtttgtgattgcatgtttccttccttcaactgtgttctccctggcattcagagaggagggagaggaggaagaggaaggggagggaagcttcccaagagtagcctcaacctgtgcttctgtgcattattctgagaataaatttctgtttcaaactgtattatgtgaagcttctttattgacctcaagatgtgttgtagtttggagtgaggttggaaggaatttccaggaggaatttccttgaaatttctagggctgaggaggcacagccactgggcacacagccctgccttgaactaagatagcaccgggatctagagtgggatcctgtggacattttcatttgagaagggagtttagtggctgaaggttaaccccctcattatctacctaagacacagctgtgaatcctctcaccaacctagtcgttttctcccagatgggctcttgcttgccagtgtccctcagtttagggtcttggatagtatatttcggcaggagtctgtggggcacgtagactctagtaagaccttgactcctttggatccggccagtaagcctgagtcaggacggcattcatgtgtggctagccccattactgttgagtcctgtagcacatgttgggttctgtgccatcccaagcacttggttcatatt

SEQ ID NO: 16553 - DNA, 2403 bp, Homo sapiens
atacaaaaattagccaggcatggtggtgggcacctgtaatctcagctgctcgggaggctgagacgggagaatcgcttgaacccaggaggcagtggttgcagtgagttgagatcgtgccattgcactccagcctgggcaacaagagcgaaactccatctcaaaaaaaaaattcctgggctaattcggaggtttatgggttaaaaaaaggcaaaaattgctttgtacctcttcagaggaagaaagaatgtaaaaactgtgggaagtaaaagtagttccattgctttgaatgtgtttcattgtatgtgtcacaatttaaacaagttttcctttttgttttgtaggcaaatcgtacttgcccaatttgccgagctgatgcttcagaagtgcatcgggattcagaatgaccaacctaagaagcacaaatttagtttgggtgttcctcatcacatgtatatacggactatccattgaacttaatctgtgtggcttccagccctccctttaccaaaagggtcaatggacctttctttgcactgtgtgacttaatcaactataaaagcttacaattagtcttcacagttatgggattgttatactaaccgtgtgattggaactccaaagactttttctttagcttaattttgtgtgtgcactaacattccctggtttttgtgtgatcattccgagtgttgctgcaagattacagtggacgtgatcttttagcatgtgcttttataaaaagtggtagctacagatgatatagcaatctaccttatatagagccttcagaaactgtgagtggaaatgaatgcgcagcgtatgactgttggtgataagtgtatctgtgtgagtgtgtgcaactacttgtgtgagggcatggtagctaacgtgtgtatgagatcctatataccagcatgtaccaagaatgtgtgtgtagttttaattatgctgcaatgtataatctggtgtgttatttaaacagcactagtactgtacactggtttttttcccttgtgtttgctgttgcacactgattgctgagggtgcatcaattacaagcattgaatactccatccccttccctcccagtgaatggaatgagaaaagccttcttcctttgcttcaggcagctgtcaccttctctttattggtggtcctaagtgggtcacttaagaaaaaaaagtgtaacaaattctcgctccatgaacctggtttttttttattctgttgtggaaatttttaaatctccaacttgctgtttccaaaaagaaggtgcaatatcatatatcatcagttagcaatattagcatttcaatcagtgatttgaatgttgatacttttttttcctttacatttccagtaagtttcttacagaaagtacctgtgattttttttaatgtttagatttgtagtctagtctattctgaagatatttgattaatatatttctaagaagaccactagtcccatgaagtctcaccttgttgacttccaccagaacaaaacctgttaattcagcttgacttctcatatgtgttctgtgttcaagctcctgtgggcaactcaattgttttaagaaaactctatttctgttcatattaattcacttgccagactccaattctgaaagttgtctagttcttccttcatcacacgtgcttctcatcgaaaccctggtttcaggatggatcaagtgctgttacagctcatgttccttagacctgatttgttttgatattttactgcctttccttttaatttttgtttgaatgagaaaagtttaatacaacaggtgtccagaatacttgcagtataaatgaagatttggtttttgtataaaaaaataatgctgttaaacaggagttgaccttcatttagttgatgtaatacatagctgtatggggttttttttagtaagttctttgagcataattcactttaaagtcatttttccagcaatgtttaaattactttctcattcttttagtgtattcaacattgtctgcctcttcctgcagttgatgtaattgctttgtttgcaatagcacaagctgcattattccagtcaggactgtgataacttgctgccagccccactcaactttcagttggctctgtgtcagttttccattcagtgttaactacttgttactgccatgctgcttgccctcccttgaagtgtctataagctcatcacagcctagagttaagtaaagtcaattcacagaagcacaattttgccctttgcgagacattgttgcctctatctagtcctacaagtagggttttgcatactgtgtttgcccctagggttgtcagtgcatcagaaatacttctaaatagtggtaaaaatgcacatggttaatgcacatgttacttttaaatcattaggatatccctcac

SEQ ID NO: 16554 - DNA, 1156 bp, Homo sapiens
gcatttatttcttagtgtgtgattttgtcctgacttccacttattctttattgagcttggttgcatccattgagaagaatgttaaatttcatcccaggtatgggtagtttttgtaagttctctagatgatcataacatgcaatcaagattgagagtcactgccctagttctaggattggtcctgctgaagactccatgggtatgctgtgagaatttgcagtgcagaggtgacttgaggctattacagcaagaatgctgacttgaccagtgcttgcagtttgagtatattgccactagatgatgcctttgtttgtttagataaaagttgagaatttagtgcaaatctgttatccaaatggttctataactaacaattagttacattttgagaaacaatccgctttccttttaaaagaaggaaaaagcccatatgcacttctaaatttataactgttatatatttccttaatttgcattccatggttatgtattggtgttctccagcataacttctctttgaggtgactttgaactttctggctctgctgtctgcagcagatctcctgtgtggctgcctgttggaagcttcctctggagttctctaatcatggtactcacaatctctaaaatgagctgtctacactcattaagaatgttgaaattgcagacttgtctcgggctttggtaatcccataactgtttcctgccctgatcagaattagctaggtgcaaagggaagcagattttgcccctttggcagaaagtctgattctttctgattcttctctccttcccttggctctttagaaactataagtggaaccttttttctgggaaccaaatgctagaaggcaggtttttttttttttttttgattgacaaacatataaagaaaaaacatactttgaacagataaactggtttaagttgttctccatgggaggcagtggagaaggtttgtgacagaccctgtgagccttcatttatggctgccacggattacacacatagacaccatctaaggaaagtggggttgcctgggagaggattgcctcagccttcttccaaggagcacactcctgggcatgttgtttcagttgtaaatgacatctcacaattcacaaatcctttgccagctgtaagaactctatacagc

SEQ ID NO: 16555 - DNA, 1113 bp, Homo sapiens
cccacctaagcctcccaagtacctgggcctacaggcacatgcctggctaatttctattttttgtagagatggggtttcaccgtgttgcccagactggctccaacgcctgagcttaagtgatccacctgtgtcagccttccaaagtgctgggattacaggcatgagccaccatggggacggcctttttctgtttagatttgtttagatacataaatacttattgttgtgttagagccacctactgtattcagtacagtaacgtgctacacaggtttgtagtgtaggagcaacaggctataacgtacagcctaggtgtggcctaggtgtgtagtaggctctgacgtctcagtttgtgtaagtacattttatgatgttcacacagtgataaaattgcctaatacatttctcagaatgtgtctctgtcgttaagtgacgcgtgactgtattttaaatattgaatcatagtactgtcatctttaagttcttctgtctttcattgagtagtcaaataattggagtctggaagatgtgaccgcaagtgataaaaattatgtggcgggattaatagactatgattggtgtgaagatgatttatcaacaggtgctgctactccccgaacatcacaggttcgtcattcttattactatttaaggcagaatctattgtttcaattataaaaacaaccagactaatgtgaaaccaaggtgtgcttgcaaatttaatgaatgcttaagccactgaaaatgtttatgagcgataactggaatacgaatgaaagggaagtcaattatatccaagttgaagaaagccaagattctattttagagctctttactgctcctttatttcctgtttattattattattttttgagactgagtcttgctctgttggccaggctggagtgcagtggcacgatctcggctcactgcaacctctgcctcccaggttcaagtgattctcatgcctcctgagtagctgggattacaggtgcctgctgcctctcctggctaatttttgtatttttagtagagacagggtttcaccatgttggcagctggtctcgaactcctgacctcaggtgatccacccacctcagccttccaaagtgc

SEQ ID NO: 16556 - DNA, 1321 bp, Homo sapiens
gtaagagacccaaaataggtgtccagctcttccggttctctagttcagtgttttcccatatcctctgcctttcaaatgagtttttaaaggtgaaaaatgcccatttgtttcctctagagttttgttccttttacagttaaaataaatcgctagagtaaagccttgtcatttgaaagagaattggatttatactttatggccctaaggggcaaactatctggagaaaaggttttatgtagtataagaatgaaatttacaataatagctgaatgacagtggaatgggctgctttggaaggcaactagtcccttttgctgggctgtacaggcacatgcttgaccatcacttggagttattttcaaaaacatgttgaataaacctgataattctataatgtagcctatgggctaatagatttgaaaactaattttagatttgtttttctttcagctccatttatcttaaagaaattggacagcatatgaagacaggacatcacatatgaatgcacgatatgaagagcctggttacagtttcgactcctctctgcaagtgaataggcccagaaaggtgtaagagactctttgaatggacataaaattctgcttgttaagaacaagtttggctctggtaactgaccttcaaagctaaaatataaaactatttgggaagtatgaaacgatgtctcgtgatctggtgtacccttatccctgtgacgtttggcctctgacaatactggtataattgtaaataatgtcaaactccgttttctagcaagtattaagggagctgtgtctgaaatggcactgtcttgtcagtcatttctgtttacctttttcttctgcccagagtgtatttgtgaagagtctcttatattatgttttgtggaaatcagcacacaaccacaatgacatttaagcacaggatcattattagtctatgtttttaataaacatatcaattaagaaaagttgggtttctatttttcttatcctactttttgctgcaaaccaacaatcactagtgagacttgtattatattgagattattgcaagcttcagtaagttcatcttgttttggactagagaatttgccaatcctgatgaagtgtcattgtgttttattgccaggcagtcttaatgaaaggtagcattactgcttgatgctgagtatatgaaatattaatactaccaaaggaaaaagtactatatttttaagccaaatagttctccaagtttgttgagtggaggggggatagtccttaaccttctccccaggagcaactacatacacctctttttagctgattttattggtatt

SEQ ID NO: 16557 - DNA, 1160 bp, Homo sapiens
attgtttgattttgctttgaataatttgcatgccggagttccttcctttctctgtaaatctgtaattctctagggtagtgcgacctaatataactttctacagtgatgctgttttgtatctgcactgattagtatggtagccactagctgttgagcacttgaaatgtggctaatgcaactcaggaaattaattttaaatacctaattttaatttaaatgtaagtttaaacaattggctatctaccatattggacagtgcaatcctagtgttctctggccttgagatggctcctcgtctgtgatttcctgattggtgaaagggaatgatacatgtgttcctttttttccccaagactcaactccaaagtgactgtgggaatcctatagtgcagtcagtcccttagccacagaactgtaggtggctggcattgatgcctgtgagaaagaaccaatagtagcacctgtagtttgctgagaggaaatgaactggtttttaatatcattgtaggttggagatctcatctatggccagtttgtggttgctaataaagacatggaaccagagatggtctgtattgacagctgtggacgagccaatggaatgggtgtcattggacaggatggtctgctttttaaagtgactctgggcttaattagaaagtaagtcctgatgtctgctggcttgactgctttttataattatacattcttggaaagttggttaatcttcaggattcagattctttgtaacgtttgaatttctcctcagagttagaaatcagtatccattttaacacatttggaaactcatgaatttaatcctatcttcttggaaacatatcaaattcagatgtgtttggctgtgtagtttctggtgggctgatacttcatgccttaagctcttactctgtattcatatcttccttcccaggcctgttgcttatttgacttagcccaaatgtgaaaactggcctttcccctgttctgagtcacttgaatacagatgcagtctgcagttgtataaaattatcaattttttctaattatgggggtcacacgcagcttagattgtgatgttcaaggttatgtagacattcacagaaggcttctgacacttggtcatactgaggcatactgaggttcatgctgaggcagattct

SEQ ID NO: 16558 - DNA, 1133 bp, Homo sapiens
tccttcctcactctctatttctctttccctctccctgtccctctctttctttgtgtttgttgattttggtgtcaattttgtggacatttggcaggagttttgactggggtaggagaaacccatgacattagaattgaataaaacctagaagttggatattggcatattggttgttgaaaaataaatttcatcctcacttatgagtatacttggccttttaaagttactgttatgtttatctatattgagcacagataatggcattattcttataattgttaagatagtcttgcaacaaaatgtcttttaagtttcctgttaaaattataaaaagattttcatggtgagagggattttattgtgaaattctagaaaaaaatattaccacctctctttgtaatttactttacttgtatgaatttaacatctctagcatgtatccttacttgatattttgttcctatcaacagcattagaaaggaaaggagacagaatgagctttggttatttctattgcacagaaaaggatttttaaaattagattagtataatatctggccatagagtgataagaacaatatgacttagattttctgtatttcatctgccagattatttgaatcacacaggatgatgtgttaacagtattagggtggaagaggaatcaagagtaaagaggtaggggtttactcatttttcttccctgagccaggtgtgacaagccaactctgtcaccattcgtgaggggagagttgcagtcctcttcaagctgttatcataagtacagtagtcagctacttggatatcaagactaagtgctgatatgaagacttgcctttgtgttttgttatgaaacacgcaagcataaagcaggactcaagcacaaggctgactgttctactttgaataacagcttccttgcagtctcctccacatgggtggtactgtgtttagaagggattaccaaaggctggagcgatttaagctatgcactagccttgccctcttaggttgcattctctttaggccactggttctcaaacattagggtgcactgtaaccattacagagcttgtgaaaagtgcagaaacctgagcctcaccttatgagattctgattcagccagggggagg

SEQ ID NO: 16559 - DNA, 1118 bp, Homo sapiens
aaaaatacctaccaagtactgtggtcatattgacattcaaaagaagtttcataaatcgtatcaactctggaaagagttcatgtcagatgctagaccagcaagttacccaactcaaaattcagccaatgattctttactatagagtacctatcatgtgtcaaataatatacagacttcactactaaccctcacaaaaacttgcagggtaggtggaatgagccccaatttaatttggaggtaatagtgggtcagaaagattaaatgacttgccttaagtcatagagttagcagtgagtggcagcactgggattcaaacccaggtttgtgtcttgtccaaagcctgtgcttactgctttaccattgtgctctttagtttgtaaagtatggtaagctggcctgttatttgtttagtatcttctggattttttttttttaattatagagctagcttaccgtgtgtatcatgtaaaaaaaattcataagattaacaatttccatgagaatatcataaactcagggcacacattctggccattcctgactaaaaaacttcaagcagaataagcagctataaaatagaaaagaaaaattaaggataaacggcattgtgaaaaaaaaccgagccacacagatgagaattaaaaattaacagccagcaaactcaaaagaacctttgtcctccttgagatatggtgatgatcaaaaagttagcaaggaatattaatcaaggaattaaagggcattaggaatgctatagtattggaagaaattacatcttaacatttcaaagccccatttcacttaagagtaaaatctaatctgatgttttttactctgaattttattcagtaatttttattcataattcatgataattggtaatgtagtataattgttagtaaatgcagtacaaattgttctactgttttaaaaagttttccgcagaacagtgcatttatggcaatgctatgtttaatgagttagggacatcaaatatatagtagttccttattttcagttgtgaaaatgaaatggctaaagcagaagagacgtctattttagtcttttaaaaatgtgtgtgggtggtcttttttcctcagaagcccaaagcacatgta

SEQ ID NO: 16560 - DNA, 1441 bp, Homo sapiens
gattttaaaatttttaaaatatctgctaagtaatttgctatgtcttctcccacactatcaatatgcctgcttctaacaggctccccactttcttctaatgtgctgttatgagctttggacatgagataaccgtgcctgttcagagtgtctacagtaagagctggacaaactctggggggacacagtctttgagacagctcttttggttgctttccacttttctgaaaggttcacagtaaccttctagataatagaaactcccagttaaagcctaggctagcaattttttttagttgcaactaagtaagatatactacaaactaaggatgctgctagactaaggaataaacagcaaggtaccaaagtacagcaaagcaacaacaaaggctctgtatttgcagaggggtctatcatgcttttaagaaaaaagaagagtacaggaaaaaaattcagatagacataagagtattttggatgccattaaactttgtcaataaccattaaaacataggcttaaattatcacgtattgttacaaagacacagttttgtctcattataaaataagattatatgaaatttatattctagaaatgattccaaatcatgtcctaagaatttctcccattcaaatgataatggaaattactgtcaaaaggaaaatctcaaagttaccattacgctgctctcttgtaaatgaactagggataaagatatgggttttatcaaaagccctaaggaatatatctcacattcacctcctatatgtatgtgtatatataaatgccactataaatgaaaatgtcacccagagataataaaataatttttaaagtttaaatctggtccaaagtctttaaaataggtagattttcagctttcttaagtttctccctcatttagatttcatggtttttacataaagggtgaatatttgaattttcttttaaatttcactgcatcttcaattgcccaactgtgtttcctgataaattttagattcacatttttaggaaatttggagtattccagacaatatactagatacccagaaacttttctcagtaggttctgaggtgttttaagttcttatgctagactgtaagctccttgagggcagagactgttttatttattcttgtatcctcagtgcctggtacaggacttgacacagagtagttgttcaataaatatttgttgaatgaatcaaatgaaccttcaccatatatggcctgaagctctcatgaagccagcagaatgcagtgtgcagattattccgtaatagaggaatccatcatttattattataattaacagactatattcatcagggtaagatctgttctgaccataagcaagcaaacatttctcattgacttggaaaactgcaagttaagactcagtttttcattcaacgaacatttgaatccctattatatgcc

SEQ ID NO: 16561 - DNA, 1262 bp, Homo sapiens
atgcctgtgatcccggctacccaggaggctgaggcaggagaatcgcttgaacctgggaggcggaggttgcagtgagccgagattgcgccactgcactccagcctgggcaacagagtgaaactctgtctcaaaaaaaaaaattgaaaaggcaaatgtgattgaatatctgaaaagctttaaaagtggcctttctgttacgtctgtggcacaaatggctcatgagcgcaggacacttatggtcttgtgtcctatacttcatgtgtgatgccaccagaaatgttatggattccgtattgaacacactgagagtggtatgagccctcaggactgcaccacagagtaaacacaaccttgatatggtggcgaatatgtgtgtctttcttgtttcatttgtggttggggacaaaatcgatgtatttgtctaaatagtcgatattcatcttaacatggttggttgtgtaatcaccagctatattgtgaactgtgcaataaaacagaagcgtttgtgtatataattacctttggatacctgaaattcccaagcttggttacaatgtaatgctcagtataaggctgtgcaaacatgtaagggaataatggtggtcgatgggatatatgaaatgggatctagagggcttcgagtgaagccaatcatgttgaacgaacactggttcagtgtagatgaagtagagtgaggcgtatgcagtcataaaatgaagggtggacaggagattacatttgaagaaaggataagcactcagacttggtctcttttaaattaaaatatttcttttctcatgtgcaaatgtatatcaaagacttgaacaggtattctcttgaaatttgaggatttttagtttttaatgctgtctttgcttaatattaaatatgtgttgcctattggctcccaaattgtgtgggagtctctaaatgtttcctcttgaaggttcattattgaaagtggttaagtgcacaatgctatttttgtttgatagtttgagttttatgaccctatgagtttaaatgaaatctgttaaatgtttcagagttaacactttttttttgataatttggaataaagtttgttttttaagcccactctttttggtcttctcttatgcttgagtagttgcttgttactggcacgttccttttttgtggtagtgatagattgatctgttagtctttttattcagaaaacatttagcacactaccttgacttttagcaacttaacctggggatgttgcaggtaaaacattc

SEQ ID NO: 16562 - DNA, 2247 bp, Homo sapiens
ctttcttaattggccaaatataagttggtgtcgtaactccaggccacagtgagttatgggcaaagcttttttccttaagcatcaacaaaataggataaaaggttccaataggaaaatacaaggttttttttttttttttttttttttttatcattacctaagagctttaggctaattgcctggtaaatagctgtccatctgatggcctttgacagggaacctaatccccaagataggattctttttcttaaaccaatcttgaaatcgcctgcattgaaacataagtggctgtgaccggccagaggagaaggtcctcaggggccaggggctcctcaggcttcctttgttactccattgcttgcttctctgccctcaggagcagctgcagaggacagtcttcattaagctcaagcatatgacaaaggggcagaacagaaaagaaaaacagcttattaggtataggcttttcatgataaattgcttgtattagttttgaaactaagcacctattggataggcattatactatttctatttagatatggtagatcaaggagctatgaaagttcctgttttgctttctaggtttgaaagttttctgtttgattctgactgtgatcttcaacccttccaaaatgtccttgtgttataatttcacttatttcattgccaaaagatgaagggacttgaatcttgttatagttgttccatcctgttaacaagttttcattttgtgtgtggatcaaattctggttagcttggtttctttgaattactggtgccatctcagcaaaggcctgtggttatttttccccttgagtgggagttggtcatattcaagcatcctgttctcttaaaactctccttttaaaaaataaacacttccataacattttgttttggaagtctattaatgcaatcccacttttttccccctagtttctaaatgttaaagagaggggaaaaaaggctcaggatagttttcacctcacagtgttagctgtcttttattttactcttggaaatagagactccattagggttttgacattttgggaacccagttttaccattgtgtcagtaaaacaataagatagtttgagagcatatgatctaaataaagacatttgaagggttagtttgaattctaaaagtaggtaatagccaaatagcattctcatcccttaacagacaaaaacttatttgtcaaaagaattagaaaaggtgaaaatattttttccagatgaaacttgtgccacttccaattgactaatgaaatacaagagacagactgaaaaagtggattatgcatcttaaaaccctttctgtaaatattatgtagctaaagattgatttccagcatctgacatgacagtaggtttcttgttaaccagtttttcttctttctggataattgcatatgaatatttatacatactgaccaaaataaaggcctcaacttggtagtttactgaaagttcttggacaaatagtccataaaagctgttgacctctaaatgcactatggctggttaaatacagtgaccatccttcttccagctgtaaaggatgaagcgtattaagcattagccaggcagtaataaagctaaatagccatacagcagctctgacaatgttgtgctggatattgcagtttgctttcaaggtgcagatgtaaggatttaaaaaaataataatttggcaccaaataaatatgagtagcatccattggcctattaaatcgagtcaggatttgaagggaattgagtttgagaaatgaataaataaaggcaccttggtgcctgaccccctcaatcatgcgtgtgactttgagcactcacaggtgtgtgcagctactcagcccagggcaggtgggttagcctggggttataccttggccctgggaatagacaccattgggcctttggttttgttgggcttccttttgtctttacactccacacaggtggtagaaatctgagttctaaagcacttttgtgaaatacaagctaagtgagaattctaaagaaaatgctttggtttctgctgtctcaaataagtggcatttaaaaacaattattaataaatatttttaatggttttaactcagtatttttttttatttctttgtcactctttacagcttttgaagaccaaactgcaaatacattaccagggatggttttgtgttgtcctatagacttcttaaatttgacaaaaaatttagcagaacttgtaaccaacagc

SEQ ID NO: 16563 - DNA, 1202 bp, Homo sapiens
ggcctctggtctccttggggaggctcttgttggttcttttaaatgaatgtgtgagctggtgggaactgggaactgcatggcccagtcttttccttgtacagatgaggactgaaagtccaaagagggcaaggaactgccctagagggaaagaccccagcctgtttatgaagcaaggggtcagaagctctgcgtgttctgggtgggcatcaggacacacctggagcatcatgttcacatctgggctctgcctcttaagcctgagattcatgagtggatggaggcagggctgtcattaggcctgcgagcatgtgagccttgtgagcaagcctggcccaggaagagcagagacgcggcactgggggttggtggggtgggtaaaacccagacaggggtctgtctctctgtcgttctcacctccccgctggcagctctgagtttgtggtgtttctgggtgggaatgcaggtgaggaagtgcagtatccatttcatctctgcttccttcctttttgcctgcagaatttcagaggcaggaaagtgtccggtcccagcataaaggtatccagttatatgacaccccttacgaacctgaaggccaaagtgttgactcagactcggagagcacagtcagcccccgactgcgggagagcaagctgccccaggatgacgacaggcccgccgatgagtacgaccagccttgggagtggaaccgggtcaccatcccagccctggcaggtaaggagccctgaccctgctcaggaggcagctgctgagctgcgctcagcactcaccttggtccccacctgcgctcaggacaaactccagggttgtttaataatccagttgggtggtcttttttctcagtaccctcacagatgtaggctgcagaggaaagggagaggtgagggtagggaaaccaggccgaggagaaattctgggtctggcttccagggtctcagtgttccagcctccacactttaaagagagggctcagatgctctcattgtctggttctgtcttggtcctatttattgataataccctagctcactgaagccaagagttcagtttttggtttatttatttatttatttatttttgagacagagtttcgctcttgttgcccaggctggagtgcagtgatgcgatctcggctcaccgcaacctccatctcccaggttcaagtgattctcctgcctcagcct

SEQ ID NO: 16564 - DNA, 1221 bp, Homo sapiens
gagaggcttgagtactgtattagctgttgctacataacaaatcaccccaaaaccgcccgtggtttgattgtgggccatgctgtctctattgtagctcttcagctctgccactgtagcttgaaagcagccatagacaatatggaaattaatgggaacagctgtatcccaataaaactttatttacaaaaacaggcagctggcctgtgcgctctagcttccaacccctgctttaaacgataaggttttattatagccaagagcctgcatatctgagtcatttttctagtctcagttgggctcactcatgcctttgcagtcactgggggtggggtgggtatgcagccctgctgatcctggctaggctttcttacgtgtttggtgggctggtttaggatggccttgggctgcaacaattcagctctgttccgtgtggtctctcctcctccagcacatgttcatatgacggcagcagggttccaagaaaaagcaggagcgcataaggtctcttgaggttggaaactggcatggtgacccttctgctgcattctgttgactaaagcaaatcataaggccagccacaattcaaggagagaggaggagctgcagtgtcccatggcaaagggcagggatacaggcaagccattaattagggccttcgatgccatcatctaccttatccccatattccggataaagaaactgaggcttagagaggttgatgacttgcctaatgtcacacagctgcaaagtgatagagcaaggatcacaccagtgcagtcttgagttcaaaacctatatgcttcctctattttccgtggtttcaatggaaataagtagtatgaggcttggatatttactggaatatatgttacatgtctcctcctcccctttacttaatgctactcttcttgcatccctctgctgtaatttctccgctttcagcctttgctttggtgtccctagaagaggccctagagctggcttttctgtttctctgtctcccatctgcctcagagttccagaaatgagatgttaatgcagcacttgagttattttatagagaaattctgagcacagagttggcacatcccaagggacagctgcacaaaacgtgagtcttgtaactgtcatgtcttctcattctaacaccaagcattccttcccttcaaggatttgccgggctgtgtgtgctctgtttggaggaagagactggcggtacat

SEQ ID NO: 16565 - DNA, 1105 bp, Homo sapiens
atacagattgcaggcccccctcctggagtttctgattgcgtagatctggggcgggggctcaagaatctgtgtctctaacgagtgcccacccaggtcatgctgctgctgctgctctgggaatcccgctttgagaaccagtgctttggaggcctttggaagtgcaggtctggaacttgcatgacggaaggggccgggcttgaggctggtctgggcatcctgtgtgtgcaggggcttggtggagctgtggaagtgggtaccagccaaagcagggcgcatagacaagtgctgaggacgaattgaggaatactgtggggaggggtggctgcgaggaagaacagagctgagagataaggaagaaatggacagagggttatgaggagacctgggtgagtgaagacccacaaactcctatgtaaaggttcaggagagtgaggacatgtatgggtattggtgtcaggggagggactgagtggtcacccggatggtaggtgttgtagctgtgcaggcctggcctttccaccattctttcaggaagggcagcatccccgggcagtgggatgtgctgcttgtggccacagagtcacatgtggactttcctgtaagaaagggaattcttttagtctttctggccgtagtcccagggatcatgactaagttctctccctctttctgcctgtcactgataattaacgtaaaaccaggatgagttttgcaaaccagaagcaagatttctttgtgcgaggagtgactgtcatctctaaaactggagtttgtgtccttgtgtgtatttgcctgctcagcttaatagctttaggcatgcagtcatcttagcataacttgatataagccgattctgagagtgggtgctgacatatggaagtgtttttgacagtccacgttgtgaaggtcaggaggtttgctacaggaaagaaatccaagaagggcagtggcccactggtgttgggtcctctgagagtgagctgtgttctactcttcccactcacgtcacaaagtcgagagaaacatcccctaatttgattgtatatttcattttaaaggaatcctcattgcgtctgaggatgtaaaatatttctcttgggtttcg

SEQ ID NO: 16566 - DNA, 1267 bp, Homo sapiens
ctttcagagagataagaatgaattttgcaataatttatatgcagagtgtgcttatgggtttctgggagttcaagttagtaccccagagtgcttaaaagtatgatgctaaattctaaggctaatgtaatgactgtagattatctatgtccacattgttcaacagaaatataatgtgaaccacaacataatttttaattttctagtagccatattaaaaaagaaacaagcaaaattaattttaataacagtttatgtaacccagtatattaaaaatatcatttcaacatgtaatcaatataaaagattattaatgaaacaccttatcttctttttcttccatactaagtcttagatttgagtgtattttgcactcacagcacatctcaattctgactggccacattttaagtgctcagtagtcacatatggctaagggctactatactggacagtacagattcatagagtataaaatatgactttaactttggagatggtgaggtaggcctgtaattatggtactttaaaaattcagaatatttagaaaagcatctaatagaattatccacttgttttccttcatcttcattttaatatgttctagaagtaggatcagcctgttccaatttgccaagcattattaaggaggaataattccataccatgtaaaataccatgatatgctgattatactacattaacaaatttttaagttgcgttcactaaattctgtcctgtttcttcaaaataatatagcttaaattgcatgttaattgtatatcttacctattttgtttttatattattcttacaatataatcatgtatattaacaaacagccctgggattctaatcttcctctgcaactgtcttccaggacttactggcacttattacactgtgataagtggcagaaaagtagaatgaaatattctttttccattagatttgttcttatgtgaccatgtaccaagccagctataaagtattgtatttctgtagaatatggaaaatagtatttgtcttacctttgctaaatgtttgcaatttctaagtaaaccttttatctcctaaaatgagtgttaagtgtgattttgtttttacttttggtgctttaaacttgagtctagtctaccaagctttccattttatttgctttgatggtggtaggggggtggaggtgtgaactgttgtctaaatgaaaccaataattttatgacctacatttgtagaaagaataaaaatgccactatgtctagaacataaa

SEQ ID NO: 16567 - DNA, 1180 bp, Homo sapiens
ttgacatcttttcaccaaggagtatatttgtagagtaatatatgtgtggaattttgaaattatatcatttgacatgatttatgaggcttatttaagctggagttagtaacgtaatagaagtattatttatacagaacatagttgaaagataggagatgtgaaagattaagtagtattttcttgtgcaaggcatattaataaatgtaattaaatgtcttaataagcagctggctgaactctagagagaactgctgtagtcttctgcaatcagtctctgtattggtatatccagtactatcgggtttaggttctttttatttttccttaaatcttacttgtttctagcgtcttaagagtggtaatggtaaaatgtgaagttacaataaacttctgcttgttttctcagaacatctttggcatgaggaagaactttttgtgaatgatacagtagtctcagcatctgttaatttgtggttttcaaagcatttttgacagagtttacctaatgtaaaaagattaaacagttttataaaacacaaataaacattcctacctgaactgtgaggaacagagtgtatagtacaaatgtaattaggcattgcctcctggcgaggttcttgatgcatgacttcgatgctggctgctgactgaggtgaccactgtcagtattgtactttggcatatgttgtttttaggaaaataatggaatgcattcttagattaacttactgtttttgagttggaaaaaataaaagatgaggtattataagtatgccaaatatttatacactacaaaagattaaaaaaggagagggagaaaaaaaaaggccagttatgattttaatagcgtctaatttttttttgactcgaattttgtggacactagtcaattgcataatttaacatggaggagctttcatttaaaagaagttctcagctactatattctgccattaaaattaaccatgcctgttaattttacattgcttgaagatataagtaagctgccgtcaatattgttttaagattttcttatagtttatgtttaaatggaaaagttacatatataatctatggtgcagggtcaggcattggccattaaagataagtttggctaactattttactgaagagactaatggtcttccctctgttgtactgctatgtttcttgatctgtt

SEQ ID NO: 16568 - DNA, 1200 bp, Homo sapiens
tggcagtacggtgttttccagattctacttgtgccctgcacattgtgaggactcattaaatatttattaaattaatgaatgactaacaggaagagaaagattgtttgtgagtgttaagaatgagtgatgattgagaaattgatggattagtgcaatggattgggaatgaatgatgctttctagtttcgtaatacttgggaagagctattgcatatagagtaagttgatttagactttttttttcttcatttcattaccttgtttaaacttgttaaatcccagccaagaaatgcagctctgtaattgtcaattaactgtattataatatatattaaaaatttgtagagctaaagaacccacttgcattaagaacaccactttctgttcatttgtgatactagaggacagatcctgcatacagagccgaaactgcttttaatcatctgaagaaattctttgatttcagtgacttactgatctgtacctgtgcacatatcattttatgcttctccttttttccccgcaacttgaactgtgactctttcagatatttcttaaatctgtatgagtcattttttaagcttagggatttgatatgtattaatgtcccctttgtcttctgtagattttagcattttattacctcttaagaaactctgggcccagactttcagtcatatttcttattcctatggtacagttctcacttaaaggcttaattattagtagggttaaatatatacaggttatctctaaaagtacttaaatttttaaataagggcttatgtgatacaagatacggaaacaaaagtttttggatttttatgcagtagtttgcaggaaagcaaatacatagtagatcgtatgccacttaggtatgttcaggtcatgccagtttattcttgttgggccacacacacatgtatgtgtgtgtaaaaggaatttttagtattgaagcaaacaaattgtcagtttaataattttctcttacatagcacaagatggcagataccacctactgtacaacaatctaataatccctaccttagttcccctgagttatagaagatgctaaagatttagttgtaaagggaagtaacatgattttttttttctaaaaagctgttttaagctaactattattttgctactggaaaattatattttaaaacttacagatatttaaagtatgctagaaaa

SEQ ID NO: 16569 - DNA, 1101 bp, Homo sapiens
tacttgatagaggccacagattaagcctctaaaggaactgttcattccccttatttctgaatcacttgtcttctaggatatcaatgagatttgtcttggttttgttttatatttataacttatagcagaaataagactgtcacatatttctagttttatattacggttaccatagagtaccatctccaagtcattgtcatctcagtaaatgcttatgaaaaaccttaggactgtattctttctcacaaacaaacctgtaagctggagttataaggctttctttgtccaaatatcctggaacatcatctctactgtttttcctccttcctctgtataacttggttatgaaatgggcagtgaattgaatactgtatgttttgaaattgcaaacttttttttctggaaaagcttgactttgtaatgtgattttctttattctcttccttcccctctctatcgcaggcggcatattttctaccttcagcatcacttaaatggtaggtttcctcacagcatgacccagttgtcacctgcagacagccctggggggactttgagtgacttgcaccttatcccagcaggctcccagctgtctcaagcaatggaagtagatggactgaatgactctagcaagcaaggctattcccaggaaaccaaacgcctgaagcggacgccagttccagactccctaggcctagaaatggagcacaggttcattgatcaagtattgtccacctgtcggaacgtggagcaagccaggtttgccagtgcatacaggaaatggctggttactttgagtcaatgaaagaggtgaattagtcctacaaggttccccttttagtgcaatattgctttcttttattatttacatagttgcatgaactgtttactattattggctaaccatatgttcttcgtctttaggttgaaagtccatagtaaatctttcattttatttattttgttaataactggcattcctgtggggataaaataatcgtatagttccttcctgctgaacagcgagtcttaaattttctgtttaacttctcaccctttgtatttctatatgtggggcttctcatttggttttcctgattg

SEQ ID NO: 16570 - DNA, 1134 bp, Homo sapiens
gttaataaaatgaaacctttgggttgagatatatcttcagttttgtaattaaaaatctgcttagattgtttgaaatattaaaatatgaataaccattaagcattataatttaaaagaaatatgaatgtaaaattcacagattcaaggtaagccgtggcgtctcctataaaatttgttttaaagttattttgtgtagtatctttgatatagtgtccagtgttttgtaattattaaaaaagaacaaggtatcaaacttcactttcttcagcagacttttgaaaaaagtatatgaaattatattctttagttatgcattactgccttttcatttcttctattggtattctttctaaagttgtttattaaaaacctataaaaaaacattaaatttgtaaggttagctagtttttaaaggaatttgaggaagctcatagataatgtaaagcaaggaaaagtggttttgtatctctccttaataatttcatctctttataattcagaacatatgatatttgtgaagtatctcctggaccccacttgaatatgatcgttggagccaatggaacagggaagtcgagcattgtgtgtgccatttgccttggtttagctggaaaacctgctttcatgggacgagcagataaggtgagttaatataattactttttaagaaatttcaaacctattaattgcttttagtaacatcaatttctacacctcagttccttgggtatagcaaacttaatagtgcatgaatacaaggaataaatttggcaggtagagaagctagaaggagattttcatttctagaagtattttggatcataatactagaggattcttcaagtctcttacacctaaaatgctagaaataatgtaatatgtctttttttttaaatgcatcacttggcttgtggaacagtgaagtaaacttacaaagggcagaaacaaaatccagtcatatgttgcttaatgatgggaatatattctgagaaaatgcatcattagacaattttgtcattgtgtgaacataatagagaatatttacacctagatgggttagcctactatccacttaggctatatggtgtagcctattgctcctagactacactcctgtagagcatgttactgtac

SEQ ID NO: 16571 - DNA, 3108 bp, Homo sapiens
aggcctgccctcatgaacttgtttaacatcagttgcctctttaaaggccttaacttcaaatgcagtcattttctgtggtgctgggggttaaggcttcaacatagggattttggggagggggacacataataatcatctccgagggatttatcctttgagtcgtagggactattgaccatgaccgcccttcggaatttttttcatgttctttgagctgtatcctttctgattcctttctcttaggtgaacggccctttccctgcacgtggccagactgccttaaaaagttctcccgctcagacgagctgacccgccactaccggacccacactggggaaaagcagttccgctgtccgctgtgtgagaagcgcttcatgaggagtgaccacctcacaaagcacgcccggcggcacaccgagttccaccccagcatgatcaagcgatcgaaaaaggcgctggccaacgctttgtgaggtgctgcccgtggaagccagggagggatggaccccgaaaggagaaaagtactcccaggaaacagacgcgtgaaaactgagccccagaagaggcacacttgacggcacaggaagtcactgctctttggtcaatattctgattttcctctccctgcattgtttttaaaaagcacattgtagcctaagatcaaagtcaacaacactcggtccccttgaagaggcaactctctgaacccgtctctgactgttggagggaaggcaaatgcttttgggttttttggtttttgtttttgtttttttttctccttttatttttttgcgggggagggtagggagtgggtgggggggaggggggtaaggccaagactggggtagaattttaaagattcaacactggtgtacatatgtccgctgggtgagttgacctgtggcctcgcacagtgattctgggccctttatgcttgctgtctctcagaattgttttcttaccttttaatgtaatgacgagtgtgcttcagtttgtttagcaaaaccactctcttgaatcacgttaacttttgagattaaaaaaaaaaacgccatagcacagctgtctttatgcaagcaagagcacatctactccagcatgatctgtcatctaaagacttgaaaacaaaaaacagttacttatagtcaatgggtaagcagagtctgaatttatactaatcaagacaaacctttgaaaggttacactaagtacagaacttttaaaccttgctttgtatgagttgtactttttgaacataagctgcacttttattttctaatgcagaggatgaataagttaaatacatgctttgaggatagaagcagatgttctgtttggcaccacgttataatctgcttattttacaatatacacgtttccctaagaaatcatggcagagatgtgagggcagaatatacacaacagatgctgaaggagaaggagggtagtgttttgcaaaagaaaaagaaaagaaccaacagaattttaactctattaacttttccaaattttcctatgcttttagttaacatcattattgtatcctaatgccactaggggagagagcttttgactctgttgggttttatttgaatgtgtgcataacagtaatgagatctggaaacacctattttttggggaaaaaggtttgttggtctccttcctgtgttcctacaaaactcccactctcaggtgcaagagttatgtagaaggaaagggagctgaaataggaacagaaaaatcaacccctataactagtgaacaccaagggaaaataccacaatgatttcagaggagactctgcaaaatcgtcccttgtggagaatgcaggcaacatggaatactaggaatgaaatcacatcactgtatcttttacatcaatagcctcaccactaatatatcttgtatctaggtgtctataatggctgaaaccactacatccatctatgccatttacctgaaaacttaactgtggcctttatgaggccagaaaagtgaactgagttttcgtagttaagacctcaaatgaggggagtcagcagtgatcatgggggaaatgtttacattttttttttcttcagaagtaacgctttctgatgattttatctgatatttaaaacagggagctatggtgcactctagtttatacttgcgctctgaaatgtgtaaacatagggtgcctacctatttcacctgacccatactcgtttctgattcagaatcagtgtgggctcctgcagtgggcgcgggtcacggctgactccaacttccaatacaacagccatcactagcacagtgtttttttgtttaaccaacgtagttgtattagtagttctataaagagaactgcttttaacattagggactgggagcagtccatgggataaaaaggaaagtgttttctcacgagaaaacatgtcaggaaaaataaagaacactttctacctctgtttcagatttttgaaacacttattttaaaccaaattttaatttctgtgtccaaaataagttttaaggacatctgttcttccatacgaaataggttaggctgcctatttctcactgagctcatggaatggttctgcttatgatactctgcacgctgccttttagtgagtgaggagtttggggttgcctagcaacttgctaacttgtaaaaagtcatctttccctcacagaaagaaacgaaagaaagcaaagcaaagtcagtgaaagacaatctttatagtttcaggagtaaatctaaatgtggcttttgtcaagcacttagatggatataaatgcagcaacttgttttaaaaaaatgcacaatttacttcccaaaaaagttgttacttgccttttcaagttgttgacaaacacacatttgatattctcttatatgttatagtaatgtaacgtataaactcaagcctttttattctttgtgattaaatcctgttttaaaatgtcacaaaacaggaaccagcattctaattagatttactatatcaagatatggttcaaataggactactagagttcattgaacactaaaactatgaaacaattactttttatattaaaaagaccatggatttaacttatgaaaatccaaatgcaggatag

SEQ ID NO: 16572 - DNA, 1181 bp, Homo sapiens
taaacatctgccccaaagtatgctgcatccaaaaaatatataacaaaacgaattcttactcatttgtgtttattcttggacttatcctgacataatggggtttttttaattatagattcacactgcatttattcatcacccctgtcctctcatccataactcaaatttactaccagcaacacaaaatacaaagatgtgtccagtttcactacagctcttcgcgtttacaagtgtcgagcgcttgctttcggaacgcccttgtgattggccgagccaatgccagtgacatcaaccaacttacttttgattggaaggctggttgctgggactgtagcgtttgcaggaagtcacttaactgtttgggagctggaaaaccgaagctgaagttctcttttgccataggaacgagcgcaactgactaggaaagatgtgtcccaaagctccgcaagctggaacgtgagccaggaggcccggaccggccacgggaccgcgaggcactccgaaagtgtgcggctgccccttccctgcctcccagctgttacccttttaaatgtcagtgttcgaggctgtaggggtagcacgaggcagcgaaacggaacagtcggattggccgcacgcctcagttctagacgcacctctccaccgaaggccgttctgactggcagggggagaaagtaaacagagttgaatcaccctccccactggccaattggagggggtttggtttgtgacgtgatgggattctgcgaaattgttactgagcaagagaatgccggaacggtgcggaccggccggagcaggggttcagaagccgtcagtggactcgggaaaaagtgtctcttagacctggcgctcggcgggaccctcgccacccgcgtcggggtgatcgggtgaatgtcctggggctttggctcgacggcgaggcggccgagggcgtgcacctctcttgcagtttcctctcccagcgcctcgggggcgttttcagtcgaataaacttgcgaccgccacgtgtggcatctttccaagggagccggctcagaggggccggcgcgcccgtcgggggatcgcggccggcgcggggcaggggcggcggctagaggcggcggcgcggcggagcccggggccgtggatgctgcgtgcggaggcgctgccggttacgtaaagatgaggggctgaggtcg

SEQ ID NO: 16573 - DNA, 1197 bp, Homo sapiens
ggcagctggtctactggtcctgaaattttgagtcacagaagacttagtgaaggagttaaaaaaaaaaatacacttgcggccgggcgtggtggctcaagcctacaatcccagcactttgggaggctgaggtgggcagatcacgaggtcaggagatcgagaccatcctggctaacacggtgaaaacctgtctctactaaaaatacaaaaaattagccaggcatggtggcgggcgcctgtagtcccagctactcaggaggctgaggcaggagaatggcatgaacccgggaggtggtgcttgcagtgagccgagatcacaccacagcattccaggctgggcgacagagcgagactccatctcaaaaaaacaaacaaacaaacaaaaaaaactcttgcttgagctccatcccagatctactgaaatggaaaatactaatatagagggccagaattctgtaattttaaaaatcactttgtgtggtctggtgcaggtatagaaactgtggcttaagtggaagcttccaagtgcatgggagaggggacatcctgtggatttgctgaggggtctgatgtgcagtttcagtacacagaccgtgggactaaaactgcaaccttcttaaagacaagtgagtcgataagagatggactgggcagagatgttgggaaaccctggactttgtttttgccagcgagtccctgagcttaagtgtggaagctggaaagaatgctgaatggaatgaagctcagtgccaaatagctgggtaaccttgagaaagtcaccccccgtttcttggtctcagtttcctcatctgtaaaatgagggtatggacttgttgatctctaaattgcttctgtgatactcggtatttattaaatgtccttttcaatgtgaagatggtataatttgaaagctgctcatcatcttaattttttgaaatgctttctatggacccagtgcttgtccacctgaacctgttttcagccatgggcctccccaagctatgcccagccactgagtcagtgtgattacccatagaactcaaatcattccaagatgattctctgcatctcaggctggaagagcaacctctgagaaggtgaggtttggaagaaaaggtggtttggcttggagggagttaagtatcctacaagacatctctgctctgggtgagggtaattctatctgctgcctggtgcttc

SEQ ID NO: 16574 - DNA, 1245 bp, Homo sapiens
aatcagcactaatgagtcagagtgtatcatgtgcctggcctggtgccagccactgtaatagcctctcaacaaatgttaattgacttccctttccctagaaatgtcagaagaaacccatgaaacccaagacatagcttttgtaacacacttggtagttaatagagaattcaggcatccctgtattcaatataatctgcttaagtacgactgccatacattttgcaaaaagcagtgacattttcagcagttggctatcttatgtagactcctgatagggttgataatcttaaatccacaggaaagaatccagtcttttagtgcatgacctgtttgatagtggtgtcccccgccctgtatattcaattacttgctgtagaatagaaccgcatgcaccatatatagttccttcggtgcttgaacattatgttcctcaggtggcacgagtgactttgaagtacttgtcagcaaccggctttcttgtaacagtactgtaaccattcagttcatagtgacattttacttctgaagctcttgttcagaatattaaaaagggcacatagcagacttcatccctttgcttcaaggcctgtgattctgtaaagctagcccatcaactcaggagagagtcactggccccagtgaatgtttaaaactgttttcaatttggttcagtggtgttaagttgatcagtaaatataactattgaatcttatcatggggggtttgattcccctttgcgctttatcacaaatggtgagctggattgattgaactgaactattttgccaggatgtctgagatcactcagaccactttctttgtgagtgcgtcatggtgcttttgtatccaaaaaaaaaaaaaaaaaaaaagactggtgtctctcttagatgcaaacttgagaagggaggtgttgaagtttgctagactccacctggattagcaaaatatttgtaaattctaaatcataggttaaggcctctgggttcttcttgttcttcatagcaatgatagcttattatgtccaaaactggtgcccaagggcatgggacaagatctactggtgtttgccaaaaggagtccttcacgttgactgttcagacaccctaagtgcccgatgtcctaacttggtctttggtctgaagacagagtgagcagagcagagggagatgtcgtgaaaccctgtaagggatgatcaatggggacctgcagcactctctgcctggctttagtttgtgaggacttggg

SEQ ID NO: 16575 - DNA, 2092 bp, Homo sapiens
tgatgtaaggaagtgcagagttttttaatagctgcctttgttttgctcacctccgactcacctcctatattctcttgctggaatgtagctataaaaattgattttttttctttttcttttttttttttttttttagggagtaccatatttttgggattcagtggaaactttaaaccatcatggactaagctatttaccagtcctgctggacagggccttggggtgcttgaacaattcatacctttgcagctggacgaatatggttgtcccagagccaccactgtccgcagaagagacctggaactgctaaagcaagcttcaaaagcacattagagactaactgtaacttaagtgctgggggaaaaaaaatgtgaactaacttatttaatttatggcattttaaaatgacactgttaacccaacggaaccattttccagtttgatacagaatggggagaaaagaaagcgtttgaaattattgcttggataccagcttcatgcaccttctagttgtacaaaatgttaaagacgttgtttgtatttgtaaggctggtgtattcagagagcagatctcttattcctcactttccacccccgtattttgtaatgaccatgagcaatgtttttactttttgtataatggggtggggtggagtgggggcttctgagagtcagcctgaggtctttagaggaccagctattgtagcaccttggatacttgaagtttaatgctcagttgggtcgggtggcagttgacttggtggctggcatgttcagcagtgcctggggccctgtttctgggcagcctttgaggattttctatgatattgaatgacagttttaagtggcaactcaggcccagctcatgcccttttttgcctggacatgtgctatttttattcacttatatatcaattacttgtaagggttaaactttcaaacaggaagtatattgggacaaaagggctcttggggattagatatccctttaatctgtgaccattgggcaaaaaattttcctgcagcaaaagtctgaggctgttgggaccatttttgcagctttaatccttagcctcttttgactgtatatttgtgtttaaaatgcagagctcaactgaatatttccttttttgttttgttttgttttgttttaagaagtaggttgttttcctgaaccgtaaacttgtatcattttaacttgcacaaaggaagtctgttcttggtattgctcttgcacttgggttttttgttattgttttgtgtggattttttaaagcttttctgttcaccctcctgccaggaaaatcccagaaagcttaatgataccccaaaatgattacacccagggaggaaaaaaaggagcgctttctagggtcagaatcgtggagagaatactcagaaatgaacctctttaaagccttgcaggaatgagtcactcttacttaatgaaatgttaaagccaattaaaaagcatgctgtgatgcccagcttccctttccacagggtgcatgcgtctcctgctggtgaatcacatgcggcaagaggcaactggctccacagcctgggatgctgccgtaccaagaggaaagaagcagcaaaatgcctttacgttgttctaaacccccgacgcataaagtgtagaggagggatggccaagggtgggtggtagaaagtgtgttcaggctgacactggcaatgagtacagataatttcactttcctcttctaggggcaaaggctgatggcctctacctttgtatccaggagaaactgcagagcagccctgtgactttacaaaatatgctacctcaaagtgctaccgataaacctttctaattgtaagtgcccttactaagggcacatgtcttaatcaaagttagttttttgttttctggtttgttttttttttttgtatattgatgaatgagatcttacctattaaatatattattggattatggttcctgaaggtcattagagtgtgtgtgtgtgtgtgtgtgtgtgtgtgtgttttatgacttaaatatctttacgtgtgttttttagagcttggttctttaaagatttggagaagatatgtaaattaccaaggc

SEQ ID NO: 16576 - DNA, 2435 bp, Homo sapiens
acataaaacattttgctgtcattttagtaggagactaggagaaagaatatagtgagtgcagaaagtgaaattagcgcatacttgaaatggttcttaaattttctcttcttctggacacctaagtttctctgtgccaaaagtcaacattgtagaaaggtacagtagagtgacaagagcattgagtgattccagcaaaaccatcaaaacaagtgcatgaaaataacttcctcagataatcttaaggtagggagtatgtaaaaggcaatttttgaatcttactggaaattcaggagacattcttaccttctgaactgattcatacaattctcatatttgaattatctgtctgatatagcacaagaatatgttcctttacatagttaatttattgcatttttcccccttcctttttccctgcagcattgacaaaatctctaagataacctctccagtattaataattcatgggactgaagatgaagtcattgacttttcacatggcctcgcattgtttgaacgttgccaaagacctgtggagcctctctgggttgaaggagcaggtcacaatgatgtggaactttatggacagtatcttgaaaggttgaaacagtttgtgtcacaggaactggtaaatttgtaaaatattctgtaaatttgctactgggttttcctttcttgctgaactgcactctttggtaaataacataaaacctgaaggttttgtttgcaaatcatgtcagttgccttcataaatgtacaggtaatgatttgttaacagacttaatgaaggttttaattaccagaactaaaaactggaaataacagtaccgtgcagtcaggctgtgtaatttatattttttctgtgaatttttttttaacatcaagatgagtactgtatgagattttaattctataaaatcaaatgctgtaaaagtattgccaaatgcttttgcatactagaaacaaatttataaatatttttaaaacatctcaatatattaaatcttatcctggaatacaactgtaatattttgaaaaaagctatgtatctaaagcaatttaagtactcataatggaatgaactgtaaaagagatttaaaaccatgcaagttcactagaattaacctaaaccctgttgtacagggatagaggtttaaagttattttattgtaaaatacattgaattttctgtatactctgattacatacatttatcctttaaaaaagatgtaaatcttaatttttatgccatctattaatttaccaatgagttaccttgtaaatgagaagtcatgatagcactgaattttaactagttttgacttctaagtttggtactgtgaggcaagtacttaaaattttcatgctggttacttaaaaggcatttagagatttcaagaatgattttgtatacgatgttttaaattttgactgatctcatagtcttcatagaattgcagtagtcttcattgtatgaaatcccgaaagtccatgagttgatcttaaagaccactaacagactggctatcagatcccttttcactttggctatttttttcattttttgagatggagtcttgctgtgtcactgaggctggagtgcagtggcgcgatcttgattcactgcaacctctgcctcccgggatcaagtgattctcctgcctcagcctcctgagtagctggtattacagatgcttgccaccacgcctggctaatttttgtatttttagtagagacagggttttgccatgttgatcaggctggtcttgaactcctgacctcatgatctgcccttggcctcccaaagtgtcggaattacaggcatgagccactgcgcctggcccactttagctatttttaaaaataggacctattgttttggattactatctgagaatttcatggattcactcctgggtataggagataagaatacgtttaattcataacttttatattaaccaatatagtaaaaaaataaagctcacacatacaaaaactaagttgcctttccttgaatgaaccctgtctgaataaaacaatgaaaaataaaaataaaattaatggtatgtagtctaatttgtaaatgaatgaatatggaaataatacacactgtggatatattttaaggccttatgtagttttaattgttctgctcgttccgtggttatgtttaagactatagtatatgactctcttcaaagtatatcaagtattgtgaatgctttggttcagatgtgtcaaattaacagtaaaacaacaaatataccactgacctgtgcttatttgcctttttccatgctccccacccccacactagaaagagtgaaaaaaaattacccttcgtttttataggacatagtttgaaaatttttaaaattatatcatcacttttttggagaggtctttctttctcaagattgtcttgtaaccta

SEQ ID NO: 16577 - DNA, 1185 bp, Homo sapiens
agccaaaaatctgtttggaatcatacctaaaatagtaatagtcattaaccaccaataaaatttacccatgtctgtgttttaactttttattgtatgagtctacattcagttattaaaatatttgctatctccttttctttttcagagcatgaataatctttcatttagtgagctatgttgcctcttctgctgtccaccttgtccagggaagattgcttcaaaattagcgtttttgccacctgatccaacttacacactgatgtgtgatgaaagcggaagccgttggactttacatctgtctgaacgagcagactggcagtattcttctagagaaaaagatgctattgagtgtttcatgactagaaccagtaaaggcaacagaattgcttgtatgtttgtacgttgttcacccaatgcgaaatacactttactcttctcacatggaaatgctgttgatcttggtcaaatgagcagcttttacataggactaggatcacggattaattgtaatatattctcatatgattattctggatatggtgccagttccgggaaacccacagagaagaacctctatgcagacattgaagctgcttggcttgctcttaggacaaggtaaattgtggttggaatttatttttcatactcgtggtggttagctaaaaatatcttgtgtaagaatagaataaaagctgtttttattatacataactgctatatagaggttatatttactattatatacctgtgaataaatattttagacagcaattttaaatttcacataatagcaaaacaaagtttttaaagacagtttcaggtttgtttgtctacattaatacacgtatatatgtatgttttttttaacttaaattcttagctggaagtccatggtgcatgcctatagtcctagttacttaggagacaaagtcaggggaatcacttgaggccaggagtttgaggctgcagtgagctatgatcgtgccactgcactccagcctgagtgacagcgtcagacctcatctcttaaaaagttaaaaaaaaaaaaaaattaaatccagtgacaaatgtttggtttttgtaagctttcttattggagtgtgatataaaaaatgtttattcaaagctgcaacctttcaaggaaatgagagaaaatactgacatagctaattattcacttgatct

SEQ ID NO: 16578 - DNA, 1275 bp, Homo sapiens
ccaggaattgacgcttctgtcaatgacccggaagaaacaaacgcagcctttccgccccggctctgggtcagcccacgtgactcttctgggaggtcaaagagcatcgctctgccctccctgctgttaagccaagccactccacgcggcgcagcctcgacccctccggctccgcgcagcctctttctcaaacccggagaacaagtcccactttcttcgaaatgagaattcccccattggcccgaatgtgtagtccatcaaatcaaaggggcggggaacctttgttcctattggttcttcttttccgcaatccccgcctcctgctgagcgagctcagcctctccttgagctcagagcgcctcccaccctgccgggcggcctctgattggtggaagtgaggcaaggctgggctccgtctctccccccgcccgctagtaggctggagccggggtcagctttggcaccttcctccagtcagtggccaactcctggctcagtggggattgtgctcgtcccctccgttcccctccagtcttcctcccgctaccggaacgagcctcgcgcttggcaggctgaggaggagcaaagaaagcaggattaaagagaaggaagacctggctaggtctgggtggcgtctgcagtgccagaaagggaggcggtggcggcggcggctgcgaccacggccgcgcgggacgtgaggcccgagagcaaccgacgggcagcggcggccgctccagcgccccgcaccggggccgttagtcagcagaacgcgagctcttgtggaggagcagggccggcgcgaggcgagactcgggagcgtgagcggggcccctggggcgccgccgtccttcttcgccccggcgccgggggctgtagccctggtccccgctcctctgtcgggccagtctgcaggcggagagagtcggacggcgcccggagcgcggatctcgccttgtggaggacagcgcgtcggctgcggttctctctcgaccccttctgcccggcgcttcggcccgggccgctcaggtgcaggtgcgtgcggcctcggggtttggggacgccgcagcccggctcggggagggggcgctaggccgggagccgcagcgcgggagggacgagcccgggccggcggggggaggggagcgggaagcgtctttgttgttggcgaccgggatcccttctcggcacaggggaaaggcggggaagccactcctcatcgggtctgtgtttttgagaggattctctgatggttgcgtgaaggggagcggtaggacagtc

SEQ ID NO: 16579 - DNA, 1219 bp, Homo sapiens
aaggactggcagtctacttctaccatagttaaacttcaccctctttaatttcacaacatattctttggaagcaggaagaaatgctcataaagaggatcagaccttctttcccgtgaaaccagtatttggcgccatatataagcctggttaaattggtcatctaaagctgtcaaataagacattctgtgaaaggtaaacatcgaaactggttataagtaaaaccatcaagccaacaacagggtcttgagataacctttgaagcttattgtactggcctgcaccagaagatgtctgcattactcattgctaaaaatgtgtagcacagaactgcactaggattaatttgtttacaagaagaaatttaaactctacgtttggttttcacatacagcagctctattgaataacatgcatctgaattttaagttgcaaaggtatctgaataatttttcatgtgcatcttttgtcgaatgttttggttcaagaaagaatgtttaaagctttttaaaagacttcagttcttaatgtaactgtacccttctgcatggaaaatcataaccaacatggctgcagtagacttcttagtggtatccagcaccacttgcagagggctgctttatcatattgtacttgggtgtaggactctagtgttcttgggtgtattgcatgggctgcattatctacagcattgtacaataacaactagaaaaggcagtatacttcactgatgcttgtctggtaataatcacttctgtgttataatggaaggttttttgtgatgtatgaaacttgtgttttttatatataaatgagtatagttagtgttgtggtaatgcctgttttcatctgtaaatagttaagtatgtacacgaggcactacttctgatttattgcaatgttcagtcctagtttttacttttattcttaaagcattcagttttgctttcaattttatgtaccttagttctgagttagacctgcagatgtgtacagatagttcatatttatgtattgcacataatcatgctattcagcattgatgctatattgtattatgtaaataataaaagccatgtacagagggaaacttcacttgttcattgggtttttaagccatagttggagtcctaaagggggaaaattagaaaatgttactttacatggctatataattttttttcctttgccatcgctgaacttgttcaagtgataatcaaga

SEQ ID NO: 16580 - DNA, 1598 bp, Homo sapiens
aaaccatagcactagtcaattataaattcaattattttttcctattacagtattattttatgtagttaagcagaagtgtttacacacacataaatcatcaaactgcattacttataagacatttatagtttttaaactaaataaataatttgcattcaagcaagtacctcattttgttcttttaaacaattattttattcattctattgcttaaattctgccatgttgtatttcagaattaattactaatgtatacctatacaatttattcttaacgaaagctttatgactgtgagttttcaatcacagtattatctaaattgctcccattgcttcatatgaaataaattcaatgatccaaaaatttacctgctttaatttttctcttcttatttaaaaatgataatattttgcaacatgttccataagtcattgaacactgtggcactgtgaattttcaaccaacttagagatgtcagatattcttattattattcatcactggtttactataaaatctatttttcttttttctcagaactgaagagagatctggccaaagacataacctcagacacatctggagattttcggaacgctttgctttctcttgctaaggtacaactcagatactttaggaaatgcctcttgttttataaagactaatttcttagtccattttgtgttgctataagggaatatctgaggctaggtaatttttaaagataaaaaggtttatttggctcaggattctgatggctaacaaattcaagtttgggtatctatgtctggtgagagcctcaggctgcttccactcctgacagaagaggaaagggagctggtgtgtgcagagaccacatggcaagaaaggaagcaagagagagaatggggaggtgccagcctcgttaacaaccagctctcgtggttctcatgagcaagaactcattcccagtgacggcattaatctcttcatgagagatcagccccaggacccaaatacctccctctaggccccacctttaacactggggatcaaatttcaacatgaggtttggaggggaagaacatctaaaaccatcgcaagtaaaatcttgtatctgagctccttctagaaatgagtaatagaatacctttttctcaaaaaatattatttatctgagtttaagataattaagtaaatcatgcaattacatgctagagaagagcttacaatagaatgggatttctttcagggtgaccgatctgaggactttggtgtgaatgaagacttggctgattcagatgccagggtaaggaagtgcttacaaaatactgctgcagttcatcttcctaccttaagtggggctaccacatgatcccctgtgaaagcaaatctaagatcttctgagagaccaatggcttcttaatgttcatttcctgaatgaggcatgtctttctgtagcccccacacacaaaaaagtagtctttgtaagttttcaatatctctcattattcgtaaaaccagagagaactgaagaaggacaatacaaatttgatttgtcattcccaagaattgtttgttaaaaaaaactctgacctttcgttgtactaggtataag

SEQ ID NO: 16581 - DNA, 1474 bp, Homo sapiens
attcctttaaatttaacaaatactttcacaaattgtaaatattaaaatgcacagatttcatcgagtacatgaagtacttagatgagacaaaatttaaaatgtatatttgttaaaaatacaaaatagaagattacaaaatcttatatgagtttgcctttaaaacaaatttgttttctgaaaaaaacttaattttttctaagctattgatgctctttgatctctcttttttctctaaagcacaatgaagaattttggcagtataataccttccagtactggaggaatcctttgcctcctattgatctggcagacattgaagatttaagtgaagacaccctgacagaagcaacacttcagggcaggaatgaaggggctgaggttgacatggagtcctgatgtaaggagccgaagcagtgggattggctgatttgaggagatgtctctaagtgaattctcgtattcttaagggaaaagttattttccatacttgaagttatatttccaaacctgagaaatgaagaaagattgttctgacattaaatacctacagttactactgaacctcttaataaggatttgtcaaggatagagtacagttgtaggggaagtattttatgtatgcattcttagagcaaaaagttttgtttaaattctagaattgaaggtactgatcttataaaaagaaattctagcagttttagaaataggtgggaaaaactcaaatattcctcctatctgcaccaaaaagtttatttgtggtatataaaatgaatattgttttataataacttgttaataaagtactttctaatacattctattgactctgttagttgaacaaatagctgacttgaacatctatgcaaacttaagatgggcgggattgttgtaaaagctattgttttaaaagagctttctaaatgtaaagtagtgataatttcaatttgggtagcgtgtttgcaaagcttccaatatttgatgttggttaagctctactatgggcaactgaagatggataaagaaaaatgaaaactgaatcggtgcctgcttccccctgttttcccaggattagaggaaaaaatttattgtataatcagcttcttggttttgaattgcttcgaggcatggttttattccttattactttagacctgtagttttcaacactgacagcactttaaaaatctttgcctgggcctcactcttgagagattctcatttaatagttctgaggtgggtcttggatataactatttttttaaacacctgtcctgtttccctccattcctctcatgtgcagacagggttgagaaccagtagactaatggtcgtttttcctgtttaaaggagataactaatttgagctgaagcaatgcttcttaattagctttgtttttgttttgctctgttggtggctttgttacaactgaattattgtgttattactatttcattgttaaagaaataaagtaag

SEQ ID NO: 16582 - DNA, 1279 bp, Homo sapiens
tgaatcttcctcctcagcctcccgagtagctgggaccacaggggcaggccaacaagcctggcctatttttgattttttgtagagacgaggtcttgctatgttgcccaggatagtctggaactctattataatctttgtcttaatctcatggagacgcccccgtggtcactgactggaggaaggaaatacacattttaaaggttttaaatttcctatagaagggtctagaacgtaccgcgctataacgaacatagtagtaagaccaccgccacactcctgaggaaacaaggtcacgcccctctgcgggccgcttgatcgggtctttaattaatcccgccgcggccttcccgcctacccccgagcgcgcacttccggtcgcgagggcgctcgggagcgcgccccgcgagcctccaccaaccagcggctccgcctggccagacagagtgcgcgcgcgcacgttgtgcgcaggttcgaatctccgccgcttcgcggttgcttctcaacgtccgggccgcatctcggcggcggcgagggctgagcgcgggagctgcctccgagccggagccccagccctaggccctgcgcgagctgccccgccctaccccctccagcgtcctgtcgcctcctcgcccgacttcggcctgtccctctctcacgcgctcagtcctcgctcttcgccccccgcagctatcggcactcggtctcccgcgcctggcgggctccgcccgagcctctgggcccatggccaagcggcgtgcggccgagccggtgacgttccacgtgccttggaagcggctcctgctttgcgacttcgctgagcagccgccgccaccgcctctctggatccggccgcccggggtcgcgcatgctgggcagctcctcggcgtcccagagcagcaccgaaagcgcaaaatcgacgcagggaccatggcagagccctcggcttcgcccagcaagcgccgtgacagcggggacaacagcgccccgagcggccaggagcgtgaggaccacggtctggagacaggcgatccgccgctgccgccgccgcccgtactgccggggccgggggaggagctcccgggcgcccggctcccggggggcggtggcgacgacggggcggggcgcgcaggacccccgcggggagactggggggtcgcatcgcgccaggtaggggctgggggcgggtgggctgaggggcgaaggggcttgccttttccccacacacacaaaacgccccggttcccactcatgacttgtgtaggttaagacgcctgagggg

SEQ ID NO: 16583 - DNA, 1214 bp, Homo sapiens
aagtgtttaattttgggccaggcctggtggctcacgtccaagcactttgggaggccaaggcaggtggatcatctgaggtcaggagtttcagaccagcctgtctaacatggcgaaaccccatctctactaaaaatacagaaattagccgggcatggtggcgggcacctgtaatcccagctcctcgggaggctgaggcaggagaatcacttgaacccatgaatcggaggttgcagtgagccaagattgcaccactgcactccagccttggtgacacagcgagaccctgtctctcaaaaaaaaaaaagtgtttaatgatttttaatgcattttccttcttggtactttcttttttctttgcttcagtgtgacaaacagtggcaaaacaacactggctaagaatttgcagaaacacctcccaaattgcagtgtcatatctcaggatgatttcttcaaggtatctataaaacttcttaaattatttatttaatacaaaaatgtttaaccaccacgttaattgaattacatccaagaagtctttggctagagatttacgttttgtattgaaattaggctcagtgcaatggtgttacttatccactagatggcactgtctatcagtgctgatctttctttgatcatccaaagcatttattaaagacttctctcctttttagtctataattgtattatttctttcctacacactgttttgatgggtactttattatttttccagccagagtctgagatagagacagataaaaatggatttttgcagtacgatggtaagtagatttacttgtcaaatattatatgcttatgttcattttctttttcaaacccaaagaacttcactatgttgaagttgatggttctgtggaacaaaaatttaaaaaaagaacttcactatatctgtgaaggcagtcttaaaatgtgtttaaatatattgttgtactttaagcctgcatttgtaggtttctgatttatgttgaactatttaaataagttaaaacctttttccagttttatatttaaaactgaaaacactggggccaggcttggaggcttacacctgtaatgccagcacttttggaaggccgaggcaggcagatcacttaagctcaggagtttcagaccagcctgagcaacatagggagattccatctctacccaaaaaaatacaaaaattagccaggtgtggtggtgcatgcctg

SEQ ID NO: 16584 - DNA, 2179 bp, Homo sapiens
ttaaattaatagttatagtttagcatataagagcagcagctttgagtaggttatttagcctttcttataggaactgaagatgcattttaaatatgaatatgaatagtatctgcttgttcttaggtttgattgttttttcctcaatttccagaatttcacaaagaaaaaaataatatatacacatacacacacatacacacacacacacacacacacacacacacacacacacacccctatatattttttaacagaatagaaataccttaagtatacccatttgggcaactattcccattaacttatcattagaaacattgatgttaatactttccattaataagctggaagtcaaaatgtaccataataaatgcattaatggggaggtcttaatttaatacttgctgattaatccattgcaaatggaaatttatgcagaatgacattgatttaaaagcaaaataaaaagtgaaagctttttttcttgtgttcttgtaaatgtaaaattctttcaggcaacttgagctggttgagagagtgtttggacaacagagtgggtgttaatggcttagacaaagctggaagcactgccttatactgggcttgccacgggggccacaaaggtattacattttgtttgttatatgtttctatgctgctgaaaatgtgtttcacctacgggagccagatttacaaaaaatgagaaaggaaaagcattggctattctttttgaatcctttagaataccggccaaaacccttgttcctggaagctctgtagaacagtgggtagaatgtggtcagtcagcctcactgcatgggtccctctcgcttgaaagactggacacttcctttcctctctcaggcttagaaaggttactggaaaacagcagtaatataaaaacaaaaccactgtctaatcttacagaaggaaagatcagaatttgctcctctagcttagcttttcacaaggtcttcttttatgatttgcattttaagtttaatgcaaactattagattcaagagaaagccaacatttgccaaagttagtgattccattgatactttttctgttgtaatcaataataatgacaaattgaatttttagatgtatttcttcctggacaaaaatttatcacccaccgcttttctacctctctctataacaaaagaaataaactcaacaacaataagaaatgaagatctcaacaaattaaatagcagtgccaaaggaaaatttgtaactgtctactaaaaagaagcctatcttatttcagctaataaacatgttagttatatgaatgaaaagtattatagtgaatgtaaaaatattcctctaagtgtcatatgaaaatgcaaaagccaaaactattagaaaaagtatattttcctaaataattccactttttagattcttaagtttttctattttataaattttacaaaatgtgttaacattttcttgaaggttcttctgaagaatctctcttttataaaattattgtacctagatttgtcaggcttctaattttcgttcttaaaaggtatcttttctctttgaatttcagatatagtggaaatgctatttactcaaccaaatattgaactgaaccagcaggtaagactgcttatttgaaaattatttaacacatacctgcttgttgtctttagtacagagcaactcatgggcatgtgaagtattgtagtcaaaatcccacaagcacataatttaaaaattataattgtactaaaattcaaattatccacagccccaagtgccaaacccactcctcctcatatgtcactttcagcttttagctctttcttcctgtacttacctttgtgttactaaggaataggctgacggagctatctcgccatgcattgtcttcatgtgtactttggcctcctgttgggtatgtgaagggttaagcttgtcagctgccccagctctcatctttcagcaccccagcaccaagcctgttctcctctgctcctcagtgtacttcatcacagtttttggttatattactatataatatttactttattatgggtgtctaaatagtgttcactgcttatataacctttttttgtttctgtacttactttttaaaactcattttttgttatctcactgtgacttctctactgttttatacagtcttgatatataatac

SEQ ID NO: 16585 - DNA, 1237 bp, Homo sapiens
agggaaaagcataaagttttagttaaatagccttcatactgtggatttttcctcctactaactaatatgtgggaaattaagattacagatgctttgggccccctcaaacagtacattgctacagttcactgtagcaacagatttggtggtgatggggggatagaggtagaagcagatagaaggtaattttaaagttaatttattatgaatcattttcccctaatctgcataaatgaattagaactgattttaataaaaatattctgtgtaaaaagtactcagaaaaacatctaaagctgttggagaagagggactcatataaatagttggattgcgttttgctttttatttctttataaaaatatgtcaaaaacagtttttaattttagaaatcttatacttgaaagaaacctcaattatcagtggctttatgaagtaaagttaaaaacaaacataggaaatgtgaaaatatttgtgtttgttttgtctgactaacttgctgctaaatgctatctttaggtgtgtgaaagttctttgatatgttattgtccttttacatcttgttaaatagccattgcttttgagaatcagatagtgtgttgtttaggggttaattgtgtctatatctttcaaaaacttttatattatgtattataagaagttacagtagtaccattttgattagtctgaatgttttcaggccttgaaataaattttgactaagtgatattttttctttccctgtgtcagcttgaatcttactttatgtatttcgaatttgttggctgattgctactcttaagtgtgtgaagttgcctgaagagcaagatataggtggcagctgtagttctacaacaaagggccttgccttcaggatcccctgtgttttatgcctgcaacacagtgactgaggtttatttggagagcaatcacagggcatcactactaaagtccacttcctgagagtaagggttcctgttacattttggagatagaagagccagaagagtatagataggtctgggttcccttgcataactcctgccccaaaacagagttctgtaaccttcttgtcttttgccaccaaccccataagcagcaacttagaactcgtttgcctttctctgttgcatgctggtactctttgaacagtcatccccagaactctcatcttcctcaactatggaggcttacagcctgcagttagagcttaccatgaaacatgattctgattggg

SEQ ID NO: 16586 - DNA, 1170 bp, Homo sapiens
agcccaccccctcccacagcccacctccacttttgaaagcccaaattacacctctcccagaacacagtgttgacgtaaatacagttacccaatattcctgtttgttcacctatttgctactttcactcagtagcatcccattttgtaaaatgaattccatggtcaccctgtcacaggaagtaatgaaaaatccagtgttcagtgtagtggtgcaaacctgagggcatagagctgttcatagagggctcttgttatagccaaacagacacagcaacaatctcaccatttatatatatatttttaacttgtccagctcatctatggaaaactactcaggtggtatgctgtttgaagcctcatcttcctacatgaaaattatgggcatttgtcccaatgattttgtttcagctgttctgtaggctgcataaccactctgatatttaggtatctgctattttattatcttaaaagacaaattaatttaattgcatgtgctagggaaaagctaccatgtacattcaccccaagtaaatagaatcctagatgaatcctagaaaaataatccctaagcagataggtagacagaggtaaacattcacatgatttagctctctagctcttgcactctgaacattcttgctttggttctgacttctgggaactgctttgcatttctcctatagatctgtagttaagggaaccaaggggtcattggggcaaaagcattgtttctcaaagctccttgattaagagaaagaacagaaatttgcacagaagatagtgtcaaggagtgagaaagtttgtttgagggcagtagctcagtgtggaagaaaatcctgaagtttctgttgaagccatacaatgttctatggggttactctctaagacattctctgaggtgtgtgaggaagtcactactcctagcctttgttaagatgtaattttaaatattcagttatggtactatgtttgcaactctcgtcttatcacaatgcctcagtagtttgttcccttagaaacatttagatgtgcacaaattaatcttttatatatctaaaggtttttctatcatgcattggattgctcagaataaagtgtctgttagacttcgttttggtaaataaattctccataatgtagattaataatataaaagtctttaatgacaca

SEQ ID NO: 16587 - DNA, 1258 bp, Homo sapiens
taaattgatcattttaattattgacttaaataatgttctgtgaaatgtagattcagaggaggaattttttgatgcaccatgtagtcccttggaagaacctcttcagtttccaactggagttaaaagtattcgaaccagaaagttacaaaagcaggattgttcagtaaatatgactacatttaaaataagatttgaagtaccaaaggtaggtactacggtaaaattaacatggcttaatttgtttgctgtttctatatttacagcttactatatagtctcattgttaagaagcactatctttttcaccctaattaaagtaattccagacttgctgtgtgattcttggtcactccccgccccccccttttttttttaaataagattaacttccttaatcaagagtgaaggatttaaatttattcagtacatgtttttgtgaaaacgattatttatgttgtgtgtgtattgtatgtctgtgtgggtataaaatctctcctaaattttaaataataatatatcaattgtatgtatacctcatatattcacatgtaaccactatgcacataaacatgtttttgttttatgtagtggtaatttcttttttctttcttctccaggttttgatcgagttttatcaccttgttggagattgtgaactatctgtggtagaaattcttgttttaggattgggtgcagaaattgagattagaacatacgatttgaaagcaaatgcctttttgaaagagttctgcttaaaatgcccagaatacttgggtaagaatctctattttttaaaataaataaattaatttcattgtttgactacctgctagagagttttcaattctttaggctctgaatcagtacatttgctgaaatattctcagagaaccattcctttttgagttaatctttaacttttatagttggtaatgtggggggcacaccggagataaaatgaagataattttattcattatggaaaatcagatgataatggttgaattttaaatctacttaactgagtattggaacacttaattagttttctattgttgctataacaatttaccacaaacttagtgcttaaaaacaacacaaatttattatcttagagttctgtatgacagaagtctgacacaagtctcactgggcaaaactcaaggtgtcagtaggacttccttttaggaggctctagaggagggtccatttcattgttcagtcaggtgttgacaaaattcatttacacatggtttaa

SEQ ID NO: 16588 - DNA, 2668 bp, Homo sapiens
aaagctggtatcttaaaatgtaagagagtaagactgtgaagcctaaaatgactggctgagaatgaaccagaaatgccatttgccaaacagttgtaactagaaatttgattctcacggtccattcttttctttgtccttaagatgacattgttagtgttcacgtcccatgttcagtgtccaaaccggcaatgtaaaaagtatcctgtgtggtttaacaggaaatctgtttatgtctctttatttgaaaccagttttactctcagtggttctttaagttcaatgaagtctgccaggaacattggttggtagtattattccgacacctttaatttccaaaatctgaagttcctgctagtttaccaccttcatgatcttcttgaactggtaactgattaggttgaacttatggaagatttgtggacttaactcaaaagtaacctctcagtgttctatagaacatgtatttgtgtaactgaacctaccaggagaaatgtttggaattctatatgtgcaatttttcaacaaatgcaaaaaaaatacagcacatgtattgacaagcttctgtcaagcagcttgagttgaaatttgatttaagaaaataaatcatgattgttcaaagctgctgggacgttagaattaggccatgatactggtctcattttaactacagtggtatttggcactagtgtaaacttccatataaatcactcttttggaacaacaaagggggagggagaaaaatcacggcctgttaaatgagtaccaaagccgcccaacagtaatgagatgttctcatccttgattctcccagcctcaaacaacacagcttactttttttttcccttgctcagaaagtacctgtaatttaacaaacagactgcctgtaggtatagtgcaattacaaatgctctaatcattgtacatacatctctcttgatattgcagcatccatactggctttgtaatcattaattttttggcagattgaatgtgctgtattgatatgtatctatgtaattgtattgtatgtctatagctaattcacgttttgaataatgttattttatttacttttttaagagaggagaatgtaaatttgtcagtttatttctgactagggatattttctttccatttagaaaagaagaaaaaaaaaaaaccttactgtcatacagagcggtactagcgtcgtgctgtataaaatcatttgcacattcctgagtagaggtatactgattataagacccaaaggtaatttcatagcaaaatacataaaatcagtcggagcttttatacaaacatggaaaccaactttgtagaacttttgccatttgatctaggattggaatatgagcttttatacaattcatattcttatttggcaaatgcacagtttagtattacctctctgatggcctttactagaaaggcagttttagaagctattgtgatccactaaggaaatgttttaacagctagagaccactgcttgcctgaaagggcgttcttaaatttggtgcagcaaaaaaaaaaaaaaaaaaaaaaaaaattaaacaacaacatttgaaggcctacagtgtgtatagagaaaacctcatcacaagatcataagtgttacagttttagggaatcaagatattctatttaatagagctatagtaaatgtagtcaattaaacctgatctcaaagcttgaagaagctgagcaaaacagggaaagattgttatatttgtctttatgaaattgggatggaatttgctatgcagaattgaggtttgtggcttcgctgttcctgtagggtgcatgacaagatcccttctcttgagaaaggaaaaaattgatcaccctagcagcagtgatgcatagaaacctaattttagccacaccagtcaatcgaagctaaaggattttcttttttgtttcttcggggttttattgaaggggctaggggcgggacgggattcttttcagttttgtataaaaacaaagtttactcatgctttatattatattgtgattgcaagcgttataagcgtgtgccactggcctcctattgttgatgcttaggtaatggaggcctgtggtgagttttatggtgacttgggcatgtcttattcaaaaacaaaaacataaaacacagaaacctttcttcagcataccaaggcaagcagccatttcatgactcacttaacacattgcagtgtaccagtttacagatgatttttccctttttgcgtgacatggcagttctaacccccagagaattccttatttgtaaattggaagtttctactatgccttacagagcttaaattcagaagtttgtgcctcatatctgaaacaaagggaaataacacacccattcaaaagtaaataaatctcctagaagtttttgtttttaacatttccatataaagagctctgttgaatgtcatgaatagactggaaaaaaaaattttaagaacctgcatatgttgtttactagcagatgacaactacaaaaggaatctgaagaacacgtaaaacttgtatttttttttttttggtagattaactagcaggcctattttaaaaaggtaattcagctaaagggcaatttacttttttgtacttcagactatcttgattgtcaaagtgtacgaactgtaattttaaaatttatactgcc

SEQ ID NO: 16589 - DNA, 1161 bp, Homo sapiens
tcatatataacaggcagtatattataggcatcatctagttatgggaatgggaggggcaaacctgtctgccacaggagtcccctgctgcttttcctctggccttacttggagcccccatctgccatctcagccagtctcagactggtcttggcaactgacgacttgaaaactcagtctacttataaattggatactgcttacatgtgcatagaggataggaaagatactaattttcttatagaataaggttcttttttttttaatgagggagacataaattagtaataattacagaaaacacagaagtctgaaaatgtgctggacctactcctggctatagctaagttaagttggcaatcacttggcaagatataattagggcaaaaatgacctggaaatcttctaagatcacagaataacattgacgttttgaactcgatttttaaatggatggctttgtttgtcactaaatttttgttttgtttttccttctagtttcagaaaattacaggtgatgctagaattcctttgcctctcgactcctttcctgtcccagtttctactccagagggcttaggaacttccagcaacaacctaggagtcccagctactgagcagcggcaggagtcttttgaaggattcattgctagaatgtgttctccttcaccagatgcgacttctggaactggaagtcaaagaaaagaagaggagttgtccagaaatagcagatcttcttcagagaaaaagaccaaaacaggtgaatataccaaaaaacactctgataagcaacaccctggaaaggacctgcattcctgatctgactgtcctgaaaaccagaaaagcaaagaaactagggaaactagttctttggttaatgaaccaattaaaagtaggtctttgaaaaaatacgtttctgtcaagaaagaaaatagaatagtgactgtttcatccaagacaaataaaagtaaatccagtccactagaacattctgaaagtgatactcttggatgtgattttgaatttcaagaaagcatccattctctatcacacctttcatatgactaaatcttttgaaactatgtttttacctttaaattttaataaattttcttatgtttttattatggcatatggtgtcttaaaatataggattggaagcca

SEQ ID NO: 16590 - DNA, 1175 bp, Homo sapiens
tatgtgttctcttcattgggtggccaccattggttgcaggattagctcctacaagtttcttctttccctcaatagaaacagctttccttacctagaagtttgagtaaaggtctcagtaccaaattccattggccagcctggggcaggtactcatccccttgagccagggttgaccacagttgaaccatgtcgactgagagtggcagaggggtaatttcctaaaggaacatcaggctgttgtcactaagaagaggaggaagagcttcaggtcaaacagtaaccctaggctttcaacacagtctccagtaaatagttgtccaaggattgcataaataaatgagtgaattagggaagacaaagtagtattgtaacattaccatatttcttgtagtaaatccacccaagttaaagcacttggtagagcatcacttgttctcaatctttgaccacatgagtttatgtattgactgttacctatgcttctgcccagagctgttccagacaactataaggtgatttttctgcaaggaggtgggtgcggccagttcagtgctgtccccttaaacctcattggcttgaaagcaggaaggtgtgctgactatgtggtgacaggagcttggtcagctaaggccgcagaagaagccaagaagtttgggactataaatatcgttcaccctaaacttgggagttatacaagtaagttctgggagctgagctgggtggtgacgtgctcaatggtgggttaccccgacccagggcaatctgtagttttcaattattttctccccttgacagtgttagttcattaccatttagattgggtggctgtactagctaagactagagcctatgcatactcttactttattttattttctattttttttctagacagagttttgctttgtcacccaggctggagtgcagtggtgcaatctcagctcactgcaacctccgcctcccaggttcaggcgattctcctgcctcagcctcccaagtagctgggattacaggtgctggccaccacgcctggctaatttttgtatttttagtagagacagagtttaaccatgttggccaggctgcttttgaactcctgacctcaggtgatccgcctgcctcggcctcccagagtgctgggattacaggcgtgagccactgtgcctggcctatgc

SEQ ID NO: 16591 - DNA, 1221 bp, Homo sapiens
caatggatgtaggatagatggatactgggcgacaagtaaaaactcagatatctcccatgccttttgaaaaaatttactttattttattttgttgagacagagtctttctgtgttgcccgggttggagtacagtggctcttcacaggcaggatcatagcacactgtagcctccagctcctgggctcaagtgatcctcccaccttagcctcctaaatatctgggactatgggcacataccaccatgcccaccttcccatgccatttttgaagatgatttgttcccagtaaaagtcgaaaggttggatcgctcatcctctcaggatgttgataacgatggtaacaaaggatgaggctgggaggttgctttcactcgtgcaatgctttggagtcagttagtctttccctgctaggggaggcctgtcagtctcctggttgactcccatctatgtaaggaaagaggagagtgaaaagtgcaaagtctcaaacttgtcttctgtgatagaaattccagatccaagcacctggaacctcaacccagatgcctcctacgtgtattattgcgcaaatgagacggtgcatggtgtggagtttgactttatacccgatgtcaagggagcagtactggtttgtgacatgtcctcaaacttcctgtccaagccagtggatgtttccaaggtagagtataaaaggcagggtgaggggaacccactgactcggtgtctgcagggacattttaatatatacaagagcgggaagaaccatgggtgtttgaggcctgcagaacccctgagccagtgcagctgccagtgagcaggctgccaggtgcgaattcccagctgttgcagtgcctgagtcctgctgttcccagcctcgtggtgatgtttgcctcacagggtcccactcgagtccttggggaactacctgcttttgagagtggttcttagaaacgtgtttggtcaacagacggggagagacttgtcttcaagagcagatgcagattatcccgagcccaggggacctatgtgagggagcttccccttgcctggtacccacctccaaaagcatcaacaggataccgttttatgagtggcttgccaaggcagggcagtgggactggcgctgtaggtacatgccccagggtgcgatgcgggtagagaatctaagaacaacagttgaactgactgagtggtattctgcctttttaattgggataaaatataa

SEQ ID NO: 16592 - DNA, 1196 bp, Homo sapiens
aaaaattcactgggcatggtggcacacgctgtaatcccagctactcggcaggctgaggcaggaaaattgcttgaacccgggaggcagaggttgcagtgagccgagattgcgccactgcactccagcctgggtgccagagcaagactccgtctcaaaagaaaaaaaaaatgtttcttctcttggtaaccagggagagttagaggccccacgttaaagactcctttctactttgggggtagaaaggaggtgtgcagagcgaatgtgaatatgtgccaggactttgcagtgatgggcttgggttagccccatccaggtgaggaccaggctgacggatcatcctcaggctttggaactctgagtatgggtttgctgtccacatggagattgctttagagcatgaactgctccctacacaggatagagtcatttccttaaaaaaattgtgcttcgggaagagttgggaagtttgcatacatgtatgaaaaatggccaaatccttcttaagcagcatgtctttctctttttaagtttggtgtgatttttgctggtgcccagaagaatgttggctctgctggggtcaccgtggtgattgtccgtgatgacctgctggggtttgccctccgagagtgcccctcggtcctggaatacaaggtgcaggctggaaacagctccttgtacaacacgcctccatgtttcaggtaactctgggagtcagtcttgtggacccagggaggggtctcactatttttcatcaaagcggaggttacattttaaaataaaacatgtaagcctgggcgcggtggctcacacctgtaatcttagcaatttgggaggctgaggtggatggaccacttgaggtcaggagctagagactagcctgaccaacatggtgaaaccctgtctttaccaaaaatacaaaattatccaggcgtggtggcacatgcctataatcccagctactaaggaggctgaggcaggagaatctcttgaaccggggaggtggagattgcagtgagccgagatggcaccattgcactccagcctgggtgacagagggagactccatctcaaaataaataaataaataagcaaacaaacaaacaaataataagtaaaataaagtaaagcatgtttccaggagccggtgatcaaatgccccagatatcctatcagattctctgcccagctcacctctc

SEQ ID NO: 16593 - DNA, 1466 bp, Homo sapiens
acatcttgcttgctttctttgccaagagtgaatagttcgaatgactctaaatgtgagcatggtgaaccttcacagcttaagggagaattttctgatgactgagacgtgtgaagctctgtgccaggtgtcgggagtttttaggtaggagaccggaaatgatggtctcaggtgctgcaactctcaggagccagtggctagaaaaaggtgttttgatgcgaaattagacgtttttgttctcaatgcctggatctttggtcattctaggtctgtgggaggcatccgggcctctctgtataatgctgtcacaattgaagacgttcagaagctggccgccttcatgaaaaaatttttggagatgcatcagctatgaacacatcctaaccaggatatactctgttcttgaacaacatacaaagtttaaagtaacttggggatggctacaaaaagttaacacagtatttttctcaaatgaacatgtttattgcagattcttcttttttgaaagaacaacagcaaaacatccacaactctgtaaagctggtgggacctaatgtcaccttaattctgacttgaactggaagcattttaagaaatcttgttgcttttctaacaaattcccgcgtattttgcctttgctgctactttttctagttagatttcaaacttgcctgtggacttaataatgcaagttgcgattaattatttctggagtcatgggaacacacagcacagagggtaggggggccctctaggtgctgaatctacacatctgtggggtctcctgggttcagcggctgttgattcaaggtcaacattgaccattggaggagtggtttaagagtgccaggcgaagggcaaactgtagatcgatctttatgctgttattacaggagaagtgacatactttatatatgtttatattagcaaggtctgtttttaataccatatactttatatttctatacatttatatttctaataatacagttatcactgatatatgtagacacttttagaatttattaaatccttgaccttgtgcattatagcattccattagcaagagttgtaccccctccccagtcttcgccttcctctttttaagctgttttatgaaaaagacctagaagttcttgattcatttttaccattctttccataggtagaagagaaagttgattggttggttgtttttcaattatgccattaaactaaacatttctgttaaattaccctatcctttgttctctactgttttctttgtaatgtatgactacgagagtgatactttgctgaaaagtctttcccctattgtttatctattgtcagtattttatgttgaatatgtaaagaacattaaagtcctaaaacatctaagcccttgtcaatgaatttctctacctgctttttagacaaattgttctttatgatgggaaagcttgaggtctaaaaatagcacctgctaa

SEQ ID NO: 16594 - DNA, 1152 bp, Homo sapiens
acagaacggcgattaatgttcagccacctctgattggttggtggagacgcctaccgcaacgggggtgggcggggcgcttggagagctcgccagagcgctcgcatggcgggccggtgattgtagtcaatctggccgtattctcaggcagggtcgcccggggcggactacatctcccgggatgctgcgcggccgccccgcggaagattgtgaatatgtatcagaatgttaatgattagctgctgctaaatttggtcaaagaagtcacctacacagagcgtgttgttagagctgtgctgagcgggtgtttgggttgttggctgctttcttccccctttctcacacacttgtatattattttgaggtggtgttcgcagagtttgaaaggagagagaattaaaaaaaaaagccgcaagcgtttcactcttttatttttataatccccttcaatttggggttaaaaaaaagacaagaaaacaggaaggaagagaaataaggaaatgagatgtggtaaaagaagctaaaaggtgccttttaaaagatcgttgctgtgaagtgaaaaaaatctccagagaaaccaaaaagcaccgccgagacctcttccgaaccaaaggagtttgtgtttgcttttagggaagaagaaagatcattcattcggaggaataacaaccaattaaaagacaaataaaaaaagtttggagtgggacgcagagcgagcgagaggagctgccggcgggcggtggggcgcggagcccgcactttcccggccgggtgagcggcggccgcggcgccgggctcggcgggtgcgcctcggcggagcgaacgtcggagcgttgccttgggagacgcgcgccggacaatgcccgcggcgggccagtgacgcccgcggggaatgcggagcggcccggcagccggcacccagccgccgccgcgcgttcctgccgcccgtgtcacgcgagacccggcgggggccgggaccgcccgagccgcccctcagaccgagccggccgcctccgctgccgcggccgcctcctcttcggggtcattaaagccaatgagccgcgcgcctctgccgagcgcagccaactaaatcggcttggatgattcgcgacctgagcaagatgtacccgcagaccagacacccagtgagtgcgg

SEQ ID NO: 16595 - DNA, 1169 bp, Homo sapiens
taactgaggagtctcacaaggcagtgagtcagccttgctatggactttgacagaagtatatctgaagggaagggagtgattgcagtattcagggtgctggggaacagcagacctggttcagcaaggggaggttaaggactatactcccacccctactcaagacatgaatgcctctcatagtgtgatccctggttgctttgttttcagtgaagattagcctcagtttctccgttaaaaaaaaaaaaaagtcagtctggaagattttatacggcctatgctttttaggccattgaaacaaaacactttttttttttttttttttttttttttttgcagaggtggtggtgggggaggggggatgccctttcagtgattagtgccctgctacatagttgtcttccagagctacaatgtcaaggagccctcctgtcctggggagagagggtgcgcagaatggaaattcagcttgctcaaagagtcataccaacagggctctagcagatttcatattttcttaataagaatgacaaaggggccagagtcctggaaagtaagatacacactgggcataagatggtgtttgccctcatgggaagagtgtggttttcccacaggagaatccagaataaccaaccaacatggccaagtttcccactgtgggcgggcagtgaggggcccctgagcagacaggatttcaacttcccacatgagccagggtgggtctggcaaaggtttaggagatgtctttcaagtgaatctgtttttctacatgttttctacctctggatgtatagagtcagcttcctgcatgacctgtttttgtgagacagaggacctgggaaacatgaggccatatttgaggcggttcattcttaccaaccgccagacctttgtttttagagaagtggaatcttcaccaaaggcccaagaagcctttgtggggtcagctgtgcttgagaattcttgaatctttgttactctttatcacctacctgagatgccacttttgcttgcttagctcaggtttggaatttgatttaagagggattcacatttctctgtttatcagaacttagcatcaattgtgtttctttgtagagatgtatgttacttaaaagataagggaaaggagcatgtgtttctgtagctcagaaaaccctaagaggaag

SEQ ID NO: 16596 - DNA, 1218 bp, Homo sapiens
tgtggagatggggtctcattatgttacctaggctgggctcaaactcctgggctaggattacaggtgtgagccactgcacctggcccaaaacatattcttgatttctaaagggacccactttttatttacataaaaattatgtactactgattttatatgttattgatctttttttttttcattgttcttattctattaagaataaggtgtcattctctactgcagtgaaggcacaccagatctctgtggtcagcctgcaggtctcattgacgtgcaatttgcagatgggtggggttttgatttttctttgggttttaaataagtactataaatactataattttggggccctcaatactgaatattttcgttagtagtttcagtgagtattgttatctgttctagcacatttgtgcttctaagcatgcattaaatgcttttggctagaaatgtccacacccaacaaccccagcattataaatgtgctgtgcttgcattactgtccacgatgttcctttgtaggatccatcttcccctcgagggagcccagcacattcccccagagagaatggcctagacaagacacgcctgctcaagaaagatgccccgattagtccagcctctattgcatcttccagcagtactccctcctccaaatccaaagaacttagccttgtaagcagctccttaccatctctctgagtgtggcctctgccaatttgatgtttgaatttgatgtttttatctttatatttctcacatttttaacaggacttttatttccaaatgtatatatgttcggtatttaagtttaattggcaaaagtatgtagagcagaataagtttactaacttgttggtgatgagtgtttattttatgattctttttgcaaggatagaagagggatatggggaaattgagtgaaacacgtcttagcgaagatgaacaatgcacattggggttacagagatggttttgtcgcctgtggtttatggtaaatttagtttggggcttgaatgtgattttgttgctagctttgtttgaattaccaagctacatatgacggcaataattttcccttcctatctaaaaagtaatctctcatttacaaaagtctatcttgacttacatcacaaatcacaaatgcaaaaatgaactgctcacccatcaggataatctccctgcaccctattcttctgtggctgtgtagttaattgc

SEQ ID NO: 16597 - DNA, 2339 bp, Homo sapiens
gagaccctgtcttattaaaaaaaaaaaaaaaaaaaaaaaaaaaaaaaagcagcagtactgtccatgaccacctttcacctttccttgactgggctttctgtttggtcaaggagcacattacatttgcatttgctctaagtcctccatactcatgggattttctttcagtatttaacatttttgattatatgtttctttcctagtccaaagaatcctcatcggtgcttagctgtgacatctccgtggacgacaaatacattgtcactggctctggggataagaaggccacagtttatgaagttatttattaaagacaaatcttcatgcagactggacttctcctcctggtagcactttgctctgtcatcctttttgttcacccccatccccgcatctaaaaccaaggatttcagatactcattgcagttgtggagtttaatcccctttcttaacctcacttcccacttgctattgaattgtgaatagtcattaaaaacctgtgataccaaatcttcagctgtctacttggaagaacatggaataagcatacttaacagtgaaaagaatctttaattatgtattatatctgtaatatatttattttgtttaaagaaggctttctaacaatgactgactaaataaagctgtctgctcctgcattgataatgaaggtgcgttgtatttgatacccctccccccctttttttggcaaaggaggggaaaggaaggtttaaaataattgatttaaaatgtcactaagtgtagactgatgactgtatagagatgtgaaatgtataattacacatggaagcaatatgttgctgtgttgttattaggttttttttgtttttgttttctacatcttttaaagacttttggaaatttggctgaacaattagaacacaacaggccaactcatactcatttggatctatttagacaacgttaaccaatatatctatagctttagattatattcgataaaagtaattggactttttttctttttttgactcgttgacaagtgtctttgtaatatgtttttagttccctttttttgttgtattataggcagatgaacaaattaaatttggcctcaaagagagaacttactcccttctggatatttttgccacatttctttgcaaaaggagatatatatatctttagtcagttttgttgttatgagaaattatgggttattttgtggcatgctctttgggagctgcacagttatggggaggactcccactgctgtgcaagttaagtcttttacaaaacaaggacagcagaggagggtttgcagagacctccctctgaaaaacacaaagaatggactctctcctgggatgaggacttgctttctttacctccggttctttccatgtcttagttggatgtccctgaaatggacacaggctgtgccattgtgccagaaacattgtgttatcttttatgttgttgttgttgctgttaaactataatatgtgacttctttttttattattttttgtttgaatgctttaaaaatcttttaagtctgtggatctgctgatgtacagtgcctttgctgctatggatcaaaatcaaaagaaccgtgtagatatactttattgtataagtagaaaattacttaatttcatactagaaatggatggatgctgcaagttgaaatggactgtccattgacgttcctaatgtggtagcagaaaaaaaaaaatggtgtcttaagtgcttagtgtttgatgtcattaacagtttcgtaaaactctacagtgtagaaagattttgatactaaactgtgcgttgtacatagttctaatgcattgtattgaccaccagtacttctataatggtagattgtttgtgaattcagacttttaagcattaaacataaataacttctagtatgcttatttttctaattctttgtcttgatgacattagtttattttttatctttggctgtgccactcctatatattaaaaatgcctagttttttcaagggagattgttgttaaagtaaagtggttttttttgttgttaaagtaatgtgggtttttttcactgttgctgtttttgttttggttttgtctttacttgagaggagctagaaaaggtaggtgatagaagttaacagtgaccagttggtgctaaatatttattgagtacctctttgatttataaaaatactgcttaccaaaaggttatcatgtccctcaaacccttgatgctttagagctatgctgttcaatatggttaccctaggcatttgtggctctttaaatttattaaagttaaataaaactagaaatctaatttaccagtcacacaaact

SEQ ID NO: 16598 - DNA, 1199 bp, Homo sapiens
gtgagcaaaatggaatgatggagccagggccgaacgccctctccaccttttatcctagcaaaagttacttgtttttttctttttttaaaactccataagtagcactttcaaaatatcaattctaagcacttttcaaatattcctccacttagttctcataacgtctgtcctgctatttgccccattttatagaggaagtgcctgaggctcagagagggtaagttactggcttcaggtcacacagtcagatgtggtggagccaagttgaggcccaggcattctgctctcgtctgtactctgaacccttgctccgtgccggctcctggggagtaaatacctgttggatagaatggggtagcgtcttacaaatctttctctggaccactcacaggtggctagtggctgctgcatgtaatagggccatgtaaagcctattgaatgtctttgtatccactgtaacccagcacgttctgaacagtcataggatgtgcctgagagtaatgctggagtatagtatatggacggagagagggcagagggatgggggagcagctgccaggtactgtatgtcagcagaggaaggtgttttcagtcaaggaggaacagcgtttcatgagttagaaaggtcaaaagaagtcagagggtcactggatttccagagctgtttgaagggaaggaaagcaacactttcaccaagtgaagcagggactgctccaggcctgggtgttctgtggggatgtctgggaagcaagcggaaacattggaggtccagctgcacggccgcaggagagaggactcaacctggatcctaaagtgcagaagttggggatggcttgcagagagaagattttaaaagtgatggttcacgtcttggcttagaatttagggcagtagtggtgctttttccttcccttgcactctttaaaatccaagctcaggttaaaagtttggagctctacaggaatgataaggtgtggggatcctggaggaagaagcagcatggtaactttcttctcagtgttgaaattcccacgcagttctttactggatcccgcctgcttctgagggtgggtctagactttgctcgccttttctggctgcctcccccaccaccttcctctcagcatgcagaactgagtccaccagtcaccgtccctgctggggcttacactgacctcccctcagcagctctgctagtt

SEQ ID NO: 16599 - DNA, 1170 bp, Homo sapiens
cctccatcgccatcactgtcaccactacctcctcctcctcctcctttttctctctcaccaccaccaccaacagcagcagcagttgcaagctcagcatctttctcatggccacggacccccagttccccttacgcctcacccttcgggacttcagcctcctggaatcccgcccctcgggggcagtgccggccttcttgcgctgtctagtgctctgagtgggcagtctcacttggcaataaaagatgacaagaagcaccacgatgcagagcaccacagaggtgagaggccgggcaagccagattaggactttgtcctcatactcttacagtgctgcaaagttgtgtgcatcgctaaagagagccccaacctatacagagagcaaacaatgagataagaggaactgtcgcaaagctttccactgaaacacaggtcaccctggaagtttgcagggtttgctgtgggcatctgtagatttctcgatctcgttagattgcaggcatcttgacatcttggcaactgcctagttaatgccagtggcctgtaccatattatggaaaactgttaactgcttaattgggtaattttcaaagaaagtaatgttgttaaatggggcgaaataagaagttaaatttgaaagtgaatgtgttcaaatgaaaggtttgataattgcatctgttactacttagtttcataggctttaattctagtatgcattaaatattgggcaaaattgcacttgactaattttttgaagaaaagtaatttattctgtcaagaaataaaaaaataggctttgtgtatggttaaactgtaaatcttatgtttacaaaatactgtaattttcaggaaatcactgtattaggaatgtgcaatgacttatataaataaaagccatttttaaaactgtttggggcttgtgttctaattattccccccttttttttatttctgttcttgcctctgtgtctgaacgggcatgtctgtgcgtttcttggtaacctcgggagcagacagagagccgggcacagtaagtactcaaacgcctgctgcacacacacacacacacacacacacacacacacacacggtccccttctgacaacacttctccacacaggcacagacagacatgcacactctccctgtctctctcagtgacctggctttttt

SEQ ID NO: 16600 - DNA, 2447 bp, Homo sapiens
ttatttaggtacaaactagactatttaaaataaactgctaatggacttttaaatatgttggataagtttcaagaggtgggcagtgtttttaaagctcagtagatcagcatatgttataaaaaagcaattaaaaaattttaaaagtcatgtgtggcagggactggcttcctttagagttggattaattttttttttctttaatagctacagaatccagaagtcagatttcagcaacaactggaacaactcagtgcaatgggatttttgaaccgtgaagcaaacttgcaagctctaatagcaacaggaggtgatatcaatgcagctattgaaaggttactgggctcccagccatcatagcagcatttctgtatcttgaaaaaatgtaatttatttttgataacggctcttaaactttaaaatacctgctttatttcattttgactcttggaattctgtgctgttataaacaaacccaatatgatgcattttaaggtggagtacagtaagatgtgtgggtttttctgtatttttcttttctggaacagtgggaattaaggctactgcatgcatcacttctgcatttattgtaattttttaaaaacatcaccttttatagttgggtgaccagattttgtcctgcatctgtccagtttatttgctttttaaacattagcctatggtagtaatttatgtagaataaaagcattaaaaagaagcaaatcatttgcactctataatttgtggtacagtattgcttattgtgactttggcatgcatttttgcaaacaatgctgtaagatttatactactgataattttgttttatttgtatacaatatagagtatgcacatttgggactgcatttctggaaacatactgcaataggctctctgagcaaaacacctgtaactaaaaaagtgaagataagaaaatactcttaaagctgagtatttcctaattgtatagaatcttacagcatctttgacaaacatctcccagcaaaagtgccggttagtcaggtttgttgaaaatacagtagaaaagctgattctggttatctctttaaggacaattaattgtacagacacataatgtaacattgtctcaacattcattcacagattgactgtaaattaccttaatctttgtgcagactgaaggaacactgtagtataccccaaagtgcatttgcctaggacttctcagcttctcccataggtagtttaacaggcattaaaatttgtaattgaaatgttgctttcactgaaaaagtgtcttgatgtttcagttatttttaatcgccataaaaaaatagaactatcttttgggtttatctgttttctcatgcacaggcaatacacaaatttaaaatgagttgtgagccaattgtttctgaagtgttttggtagttctattaagaaatagttaaatattgtgcttttcagagcctcagagaaagggggacggggtgggggggtggggcagcggaatctgtcctggatggggccagcttaaataatactggcaaccaagattctgttaggatttctgtgcatatagtgtagtaaagaagtatcattcaggggtgaaaaacaaagagccgttttaatgatgttgagtacatttggctgttttatagcctttttcttccctcccccaaagaattctgtttgcctaactcccaaactgttggggtggtacattcctttaggaccaattaaaacataattgagggtcagtgatacatttggctgactctggttcagtattctcttaggtgattatattctctcatgtacagttacaggaaattaaaatgttaaagtaacctaaaatgaattcagaccaataaaatcaagggaaatacaagttgattgcattacttctgtatgttgcttgctattaaaaaggttaagaggccaggttacccaccagtccttgcactgttctgacactttccccaggaggaaaacaagtacaaaggttacggtggaggcataagtagaagagattgttaagaagggtattcatgtgtctttgctctttctgctttatgcctcagtttggtttaaaaacttctgtactggcaaatggtggtattcagtgtgggatagtgtcataactaatttgacaatttattaatcataaaataacaataaatctctagcttttacacttgatttgtcttgcctcttttgtagaaagaaaaaaagtctttaacttttgctaaccatgtgttttaaaggctattggagttgatttaccccagattttgtcacattttacattctttatttttcaggttttccaattaaaacgtcacagtcttttgtggtgtgataaaaagatagcacactgggaaggtaggtgacttgagctccacttttgatcttggtacttgactagttatgtgacattgaggcgtcatggtttctttattatacat

SEQ ID NO: 16601 - DNA, 1183 bp, Homo sapiens
taccattttactcagtgagtggcagtacacagtgaaaatgggtggaggcattacatcttttgttgccttgggcatgaaggcttacttctttcataagggtgggcaatattaagtgccgaatatgattctaattaattctttgcagtcttggaggaaaagttggctcagtccttttcactttatggaatttttcagcagtaattttgaccatacgtaatttttgccttaagttgacttcagaagctagctcttcattagacaagattttactgtaaatgcagaatgtttaaactcatcagtcctcttttcctggtatatgttgggcatgtacttttagagatgttttagttttaaagttctttcgtagttcagttgatacataatatgtataatcatttgtacttggtgaaattaaacacagtgcatattatattttaaagctttaacttttgtttaagtatttttccttaatatgtcttttttaaaaacaaactttcagctagtatgttcaacacaccaggaatgcagagcttgttgcaacaaataactgaaaacccacaactgatgcaaaacatgttgtctgccccctacatgagaagcatgatgcagtcactaagccagaatcctgaccttgctgcacaggtgagtttgtaattgtattgaaaaagactgtgcagtgtgaattaaaataacctaatcttgtaattgtgattttggcacatttgtgttgtgtatgatatcttaatacactagaaaaataagtaaactgtgtctccaattttttagaccgtgtgtttctttgcagtaaattaatacttcatatgtaattaaaacaactttatctctgccattcattgactagaaagaagtgcaggtttagtttgtttctacatatgttgagttaggagacaagtacagagttctggaatgcccactcttttgaagataaactacttaatgaaatgtaaatcttgaaagcaattaagagcaatgttaatacatttgaaatacttttatttagtagatcactcagattataatagtcatgctcagaatggcagttgtaaaatagcatttattaaagacgggaatttgtcagaacaatgttctccttctttcaactattgattcccctgctgaaaatcgtatacaggtcccttattaatgtattcctttttctaat

SEQ ID NO: 16602 - DNA, 1912 bp, Homo sapiens
gcccctttcatagttcactttgattacatggcacttggcacaagtggctctattttggtttgttgtggtctgctggggcatagtgcaggaggctggtccaaaacagtggcctcctggccgggcgcggtggctcacgcttgtaatcccagcactttgggaagctgaggtgggcggatcacgaggtcaggagatcaagaccatcctggctaacacggtgaaaccccgtctctactaaaaaatacaaaaaaaaattagcggggcgtggtggcgggcgcctgtagtcccagctactcgggaggctgaggcaggagaatgggtgtgaacccgggaggcggagcttgcagtgaaccaagatcatgccactgcactccagcctgggcgacaaagcaagactccgtctcaaaaaaattaaaaaaacaaaacaaaacagtggcctcccataaactttgtttaatggcagttaataaagtaattaatgtaattcatgtgtatttcaatgccttttttttttctttttttggaaatatttttcgtagacgttggaacttgccaggaatccagcaatgatgcaggagatgatgaggaaccaggaccgagctttgagcaacctagaaagcatcccagggggatataatgctttaaggcgcatgtacacagatattcaggaaccaatgctgagtgctgcacaagagcaggtgatccactggctccaaggttcaggccaaggagtagcttctgttttaacacaaatatgtgtatgattgagggtagcttttatatgaggaatgtggttttcaatttttaaaaagttcagtggccgggtgcagtggctcacgcctgtaatcccagcactttgggaggccgaggcgggtggatcccgaggtcaggagatcaagaccatcctggctaatacggtgaaatcccgtctctactaaaaatacaaaaaattagctgggcgtggtggtgggcgcctgtagtcccagctactcgggaggctgaggcaggagaatggtgtgaacacaggaggcggagcttgcagtgagccgagatcgcgccactgcactccagcctgggtcacagagcgagactccgtctcaaaaaaaaaaaaaaaagtttcatatcttatttaaaacaaaagcttattctttgtgattttttatgtcttttattacagtttggtggtaatccatttgcttccttggtgagcaatacatcctctggtgaaggtagtcaaccttcccgtacagaaaatagagatccactacccaatccatgggctccacagacttcccagagttcatcagcttccagcggcactgccagcactgtgggtggcactactggtagtactgccagtggcacttctgggcagagtactactgcgccaaatttggtgcctggagtaggaggtatgcttttaacaactcaggcttttttctttgttgtcctcatttacataattaaaacattgtttatactcttattctttgtgcttttgtgtgtatgtatagtgagtatcttttataaactatatttttcatgttgcttttgttttgttttgttttgtttttttgagatagagcttcgctcttgttgcacaggctggagtacaatggcacgatctcagctcaccgcaacctcttcctcctgggttcaagtgattcttctgcctcagcctcccgagtagctgggattacaggcacctgccaccatgcccggctaattttgtatttttagtagagacagggtttctccatcttggtcaggctggtcttgaactcctgacctcaggtgatccgcctgccttggcctcccaaattgctgggattataggtgtgagccgctgcacctggtcacattttgttttttaaaggaagctttaaatgtagagagaacacttatttacttgtgt

SEQ ID NO: 16603 - DNA, 1155 bp, Homo sapiens
cttttcattttgagttttcttaattttattgttgaagaatttgcatagagctctatctccacctccctacccttactttcttggtgggtggggctgaaagttttagccctttaatcactttgtctttctggtgaccagctcctttctgaggctttccaggggcctaagtcacttcattagcataatgatcaaaagggcttgtaatgaataataaaagatactcctgtcactcagaaaattccaaagttttagtaactcaggatcaaggagaaagaccaaatatatttattattatactacatacatgaaaatatattttgttgattttattactttaattaccaaagtgtaaatttttggctaatttcaatgataggaattaaatattagtaataggtattcgatttgtttttaaatgatttcttgtaatagactattgggtcagctaatacttttttgcatcttcatattttatgtcatgttaatgataaattttctgactttgatttgtatgtttttgccctttatcctcttaggtggccttgggggacttgcaggtctgagtagcttgggtttgaatactaccaacttctctgaactacagagtcagatgcagcgacaacttttgtctaaccctgaaatgatggtccagatcatggaaaatccctttgttcagagcatgctctcaaatcctgacctgatgagacagttaattatggccaatccacaaatgcagcagttgatacagagaaatccagaaattagtcatatgttgaataatccagatataatgagacaagtatgtggaaagttctttcagttcgtttagctaaaaaatgatatatttgttatttaattttctgtggttaatgagattgtcctgtatgtatggttaagctaaagagagaaatccttatcttggtttaagaaaactcaacaaagcgctaatttggctgtttgaactctgaattttctgttaaattgaaggatctttgtaaatagtttattttgaaggcttaagaatcaaaaagtccaatgctggagatgggaaattcactcataacaaagtgcttccttctttatgttatttgaatgctaagttgcttttttgaggtgaaatacaccagggattatttaaaataacctcctgcctta

SEQ ID NO: 16604 - DNA, 1839 bp, Homo sapiens
ttagcattgaaattgtcttgatgttgattaagatgttacgagcaaaaattctaattcgcacttttttttcttttcttttatagtgtgaagcagtatgcagatgttgaaggattctaatgcaagatattttttcttttttatagtgtgaagcagtattctggaaagtttttctaagactagtgaagaactgaaggagtcctgcatctttttttttttatctgcttctgtttaaaaagccaacattcctctgcttcataggtgttctgcatttgaggtgtagtgaaatctttgctgttcaccagatgtaatgttttagttccttacaaacagggttgggggggggaagggcgtgcaaaaactaacattgaaattttgaaacagcagcagagtgagtggattttatttttcgttattgttggtggtttaaaaaattccccccatgtaattattgtgaacaccttgctttgtggtcactgtaacatttggggggtgggacagggaggaaaagtaacaatagtccacatgtccctggcatctgttcagagcagtgtgcagaatgtaatgctcttttgtaagaaacgttttatgatttttaaaataaatttagtgaacctatttttggtggtcattttttttttaagacagtcattttaaaatggtggctgaatttcccaacccacccccaaactaaacactaagtttaattttcagctcctctgttggacatataagtgcatctcttgttggacataggcaaaataacttggcaaacttagttctggtgatttcttgatggtttggaagtctattgctgggaagaaattccatcatacatattcatgcttataataagctggggattttttgtttgtttttgcaaatgcttgcccctacttttcaacaattttctatgttagttgtgaagaactaaggtggggagcagtactacaagttgagtaatggtatgagtatataccagaattctgattggcagcaagttttattaatcagaataacacttggttatggaagtgactaatgctgaaaaaattgattatttttattagataatttctcacctatagacttaaactgtcaatttgctctagtgtcttattagttaaactttgtaaaatatatatatacttgtttttccattgtatgcaaattgaaagaaaaagatgtaccatttctctgttgtatgttggattatgtaggaaatgtttgtgtacaattcaaaaaaaaaaaagatgaaaaaagttcctgtggatgttttgtgtagtatcttggcatttgtattgatagttaaaattcacttccaaataaataaaacacccatgatgctagatttgatgtgtgcccgatttgaacaagggttgattgacacctgtaaaatttgttgaaacgttcctcttaaaaggaaatatagtaatcttatgtatttttttgtgtgaagtgtttttctagcatttataagtgaaagctggcaggggtggtagttgggctcataattaacgtggtaatttagcaaaatgagagcctagtcatccaattttttttttcttatagtcagccagagctttcctcattacctatgagaaattttgagtgagttacttggttcctttctctaaaatagctttagtttgatgtttgagaatatcggagataatgtaaaataactgcagagtatggttcccggctcatatttctgaagtactacttattaacctccagctgtccagaaagcttgaaaactgtttttgttttgttttgttttgttttttgagacagtgtcttgctgtttttcccaggctggagtgcagtggcataatcttg

SEQ ID NO: 16605 - DNA, 1238 bp, Homo sapiens
aatggtgtaatccaaatagtctacaactcttgatctattttgaaagtaatttagtaattatttgtttattgtttctgtcattctctctacactttgttctttgaggtcagagattttattcttgtttcggaatccccataacctggtgttcagtgaggttcactaaatttattagagaaatatagagtaactgaagaattttttttataatagtggtttttttttttttttgcatataactcgtttcagaatttccctgcactttccataacaaagcaaaaacaaaaaacactatttcttcatgtggttagcttagatggactttaaggtgacttgagttgacatttactaaacaatttgtatatgtttttgcctatgtatcactaagtatacacatttttggttgtcaaaccttaaaataattttgcatctctttctccccctctcagctgtgaattcagtatccttagggaaaaatggagttgtggaactgatgtttaaaatcattggaccatttagtaagaagaattccagtcttataaagtgagtaaatgttttgaatgtaaacataggtatagcctttgttactctgggcctcattatcttgatatgtacaatgagcaggttgaattaaattgtctccagggttatttcatttcttagttcttaaataatgattttatcatgataaagattttctttagtataaaatttaatcttcacaaatatctcaaaattggacagttttgacttcattgaatataatgtttatagtaacttagactgaacatttctagatactgtaaaaggaaaaaagattatctatagagtattcattcagaaacatttattgagtgcctactatatttctcacccaattttacaatcttgtaatgactttttcattcttatgaatacctgaacaatcttaaattgatacatttctattttgtcaaaatcacatcattctttttcccccatcctgagatgtgtgtgtgtgtgtgtgtgtgtgtatgtatacacacacacacacacacacacacacacacacacacacacatgtatgtatgtatgtatttttattcattcctaggcctttcagcctcagaaaatgaaagccatgtctcatttattggttacagtttaatattttcttaagccattttagaggtctttctttaaaatttttttttattgtggaatttttaaaacatacataaaatagagtttatattaaa

SEQ ID NO: 16606 - DNA, 1138 bp, Homo sapiens
tacaaatatttgtatgataaataggaacagggaagaaagaacataggtggaggataggtaggcttaaggatctggtgacaggaaagtgagtgtattcttgctggatttataccagttatgaagcagggcactaactgagaatggagtcggatgggaagaaggattatcagagttttgaggagagcagagtaagtgtaaaaagtctttgagagtggaaaggtgaactttccaggtgtgatgtaagattactgaacagggttgaagggatatttgtgatttgtggttttctgaaatagaatgtgtttctcacttaagtcagtagaatttaagctatagaacaatattaagctatattaagctatagaacagagtaaggaagtgcgacgtgtaaatgctttctgtttttaaaagagtagaattgttttttaaacagtgatcgttatagtattgaatttacaccattgatttagaatgtgccctaacattctacgttctttttagccttaccaataattctaggatcgtaggactcctggctcaactggagaagatcaatgctgagccttcagaatcagacactgcccgatatgttacatcaaaaattcttcatctggctcagagtcaaggtaaacattgatctcttctttgtttttgaaatgcttttttaattctttaaaagtggatgctaaaaatgttcaaacttctaataatggatgattttccacaaaaattgaactttcaggccgggtgtggtggctcacacctgtaatcccagcactttgggaggccaaggtgggcagatcatgaagtcagtagttttgagaccagcctggccaatatggtgaaaccccgtctctactaaaaaatacaaaaattagccgggtgtggtagcatgcacctataatcccagttactcgggaggctgaggcaggagaatcactggaacccaagaggtggaggttgcagtgagctgagatcgtgccactgcactccagcctgggcgacagcaagactccgtctcataaaaaaaaaaaaaaaaaaatcaaactttctcaaattgactcgagtggaaaactgaataactttggaggaaattgatcttcaaagcatggtttctaataatgattacaattttact

SEQ ID NO: 16607 - DNA, 1095 bp, Homo sapiens
tcatttagaccatggtagcatttgacatggacggcaaagtacgtaaaccgaagtttgagcttgatagtgaacaagttcggtatgaacacaggtttgctccattcaacagtgtgatgaccccgccgccagtgcactacttacagttcaaggtgaacctgctcaatgaacttgttatgaaatctttagtcttagaccttcttagagagatgctgtttgtacctagccatcttgttacattaacagttatttaaatcataagaataatatgaggtagcatatgagggttgagaattatatattacctaggaaaaaatagggagatgtgctgaatgtttgccccagtgtctgtgtatgagtggatagaaaatgtagaattctttaataattagaaatgggattttagagttgttcatattaaacgtgttttgaattatacttccccttctttttaggaaatgtctgacctcaataaatatagccctcctcctcagtctcctgaactgtatgtggcagctagtaagcactttcaacaggcaaaaatgatattggaaaatattcctaacccggaccatgaggtgagactggattcacagtaattctaggggaaaagcgtggcaggaaatacatctcttactgctggatgaaagttaattatgaaagtgaactttaatagtgttagtgaatagaacttggcgtgtttctgcgaaggatttcaggtagttttgtcaaactaacgttgtcagacttcaagttattttaagaatgaggtgatataaatatctgctttgtataaatttagaagtcaatgcaaagacaaattacaactcaaaatcataaagaaggataagcataagatccagactgatctgattcatagctcaaaatgtaagcattgaaacatttctgttttaatcagtagtttgttaaaggggccaggcgtggtggctcacacctgtaatctcagcactttgggaggccgaggtgggtggatcaccttaggtcaggagtttgagaccagcctggccaacatggtgaaatcccatttgtactaacaatacaaaaaattagccaggcgtggtgcatgcctgtctgtaa

SEQ ID NO: 16608 - DNA, 1212 bp, Homo sapiens
attgtacaggctacttaaaaaataattttttttaagatttttcggttctgaaatttcaggacacctaatggctgttcttgaataacacaagtattaccgctcttggaaaggagagccaagagggctcattagctgcaaagaggggcaacaggaacacccttagcaagttcagtcaggttagctgctttaaagtactgccagaaaagtttcactatactatcatgtttttatgaaaggtaccaaatcagagttaagatatttgaagctgagaacccttttaaccacagaccaaatataaaactgtcactagtcttaggctaagccaccaaagccaatttacaccacagagtaactcattttgctaagagtattgcctgctacagaggacaaaaaggaaggcccaagaggcctagaaagctgccaccgcaaacatcagagcagacacaggacaagcaggaaaggaaggggagggcctctggcagcaggcacttgcaagcacagggggatgtagtcagtttttcaaagccagaggatactgaacagacacccatttgaaaatgtttcatgggttaaactgaatatgaagtaaacaaaaagtacaccacatttaaacctagtcctaaattttaatctatatacatttctatctgcctcctttttgcatgtcaccagcaaacaatgtataatcttttaaaagtgctaaaaggattttttttacacatctgtattcttacagatatataatttgtgatgtcatgacacataaaaatcacaattttcatgtaatttagaggccctcccaaaaatcccttctaaatgtattttaccaaaatctcatacaagtgtttaattaatcccttgatttgaaacttcttttggataacgtttttggaactactcaaatgttaaagagcatacaccttcttcagttcttaacatggacaaagacctactgtttttcatctccagcagtgcattttttttttgtcaagaaatttattaacctttataaacactattttcactcaatcattcataaaaaatgatttgtgattaaatctgtaataaaaccatataacgttcatcaatgcattcaataagaccagtttcttccatggaacataataaaccactttaaaacagcagttttcattcatgtcatataaggctgtcaaactaaaagtattccttataatgagttgttacccaaga

SEQ ID NO: 16609 - DNA, 1152 bp, Homo sapiens
tggtggtgcattgttttttccacccaaacttaacatagcctttttatacatttttatgaaaaatttcattgtcagctgcctcactgcatactctttaatagtaccaggcaaagattttcttcaactatagtacagattagttctgagtgatggtatcaaaaggtgagaaagacgtcatccgcctttttttaatccatttcttttgccaccctatatgtctgttcagagatgggctctcaagctgactttgattcttttagttgagaagtctcttaaagccatctagcccacctccatcaattccctatgtgaggaagcaaaaccccagggaagccaaagggctcctgtccaccctgacaccacaggccgggggagagtagggactctacccccctctccccttgtaggtgacacatgctctgccctctgaggcagtcagcgaaggcaaatggtctgacttctttatgtggtcaacattttgatagaatttctttataatttgatagagattatattatttttattttattttgagtgggaagaattttaaaacctttttatgtcaattaccatcttgtttctttcacctttgaaacaatggtttgtagcagagatgacattgtagcaacccagaattatgcttttggaatgtggtcctcactgtacaggagaatgtgtaatcttttgttaaaattcccagtgtgcatacattttctggttcctcggtccagttgctaaagttcttagtattttagcctaacatatttatcaccaacttttctttaaaagtgttccttttgtcacttagttactgattttcctgggtttgacataagtattctatgagatgatatatatgctttttttgaaagctgattctcatgaattcaagtagctgagttcctttatgtttcgtttattcactaaagtagctgacacaaaacacaccaaaacctagagcggtagttttatgtaaatgctcatgagtttgtatcaataatataattgttgatccacttataattcgtgcaacactgtatgtatgtagagattgagttgtcaattaaaaaaaatgtggcctctttgtgatcataaaattgccttttattattgaggggagagggtttgggacagcagctgctaaagccaata

SEQ ID NO: 16610 - DNA, 1389 bp, Homo sapiens
gtattaaaatgagatcactctaggaacctgtctgcattcagaaagaattttgactaagcttatatttaattaatcatgtgcatatatacttttcaatatcaagtcttattacttgattcaaaacaagtgaccaattctagtatgaagtttttgtgactacttaataagaagtaattttatggcttttgtcataaagcgaggcttgtttcatttatattgggttttgtttcttcccctcctctaggtagcctttccagtaaatatatgactcagggaaaagcctcagcgaagaggacccagcaggaatcatgagggaaggaaaatgcagcactctaaatggccactcaggcgttcctattcactcggaaaattaggttcatttcacaggacacagcagtgtagatcaggcttcaacttaacatttaagggaaatgtcagatttttttttaatttaatgaaattgttaatgaggaaaaatttttaatatagtcttatctaccacacatccccatagatttaaggattttaatagaaagacatgatgtatgtatttaagccacgttaaaagaaaaaatataactatggaccggtattcagtgaatacagtttcatggtttttaattctttcaaagcacattaaaaatggtgtgctgataaaccccaagtaaattaaccctttttccgtataaatccattttttgttttgaagaggggaaattatatttattgttgtttactgaatcctggtgtgaaagcatatcagatatgtatgaactgctactgctgtacttccgatttacggacatcattttattgctatttgtagacgtgataacatgaacatgagtacctatttatgtgggccttcagtggatgggcagtgccactcaggtctctggggtttccctctctaattttaagtaaattgacatataactactatgcttataaaaatgaagtaaggaaaacaagtagtcctgtttgccactaaaaacattttcaaaggaaaaataaaatgaaagtactttttactttttatgatactcagaaattaggatgaagaacttttaaaattgctgaagatcaaagaggttatctctgccagtcacaagtgtggctggtgtcattctgggtctgactggagccctcctggactgtttctttaatttcaaaagccctgcagacatagtacctggtcagaactatgcctcggtttatttatcattttgaaataaaatcagaatttcaacctgtaattttatctacattattttctagtgaaagattcctaaatttcctggggaaaaaaaaaaaagatcaaggagtgagaacattgggaatgatagtaagaggcgtttaacaaaaaagaagaaaggacaaatatactcc

SEQ ID NO: 16611 - DNA, 1183 bp, Homo sapiens
gtttattgggattttgttacagcaaacgctttttgttcataatataatgagaaattcatattaaatatgtcaaaagattatttttattattgttttactaaaacctccttatagtaaattacaccaatgggtgcattctaaaaggtgaaaagaaacgtttgcattagctcttgaatatactatcaggtttataaatttaaacaaagacattctttttcaactggcacatttaaaaaaatattttaaatagtattttcttcataaaatgtgatatttagataatagtattttattcataaaatacatgataacgtagcaatttgacgttttacaactgacatgaagcgtggctgttaagctaaatcatagttgatgcagccttccctattaaattaagtgaagagcaaagagccacctatttctgtcctttgtttatgctagtcttgaatacaagtttgcttttgtgtgtaattttaattgatggttctgcttctgaaatagcagtgttttgttataacttttgagaaattctactgtatttattacttttatttatttatttattttttagattgttccctaagattatatgggtcatcctgtagcagattgggtttcaaaaattcggatgtaaacattgacatccagtttccagccattgtaagtacaaaatgaaatgctggcactttcagagtggtatggaaattctttcttacaaatgtaaactgtctatgaatatattttagatatttgaagatattttaagtgtaatgacagcatccgcttgccttcagtttcagagcttttttttttaatactctgcaaattttcatacttattttagtctatagatcttttatacatccaacactggtttttcaaccatgtgcacctgatgggggtgtttaggttctgttacttaaaaagagtaaattttcttgataaaatcaactttccagtggcagaaagggaattcagattttaaagtgtagatatttaaacatttatgatctgcaagcttaattgtctctggagtttcctctttttgtatacctattttgttaaaataattaggcttttaaagaatcacacctagcctggatttctggtttaaacatgatttaaaagtatgttgatgagttagaattttaaaactggagtgtagctggacacggcacagttc

SEQ ID NO: 16612 - DNA, 1155 bp, Homo sapiens
gcctacaaccagtacgccgaggcgtgcgcgccggtgctggcgcagcacggcgggggcgacgcgcccggggccgccgccgccgctttcccggcctcggccgcctctttctcgtcgcgctggcgctgcccgagtcactgcatctcggccctcattcagctcaaccacacgcgccgcgggcccgccctggaggactgtgactgcgcgcaggacgagaactgcaagtccaccaagcgcgccattgagccgtgcctgccccggacgagcggcggcggcgcgggcggccccggcgcgggcggggtcatgggctgcaccgaggcccggcggcgctgcgaccgcgacagccgctgcaacctggcgctgagccgctacctgacctactgcggcaaagtcttcaacgggctgcgctgcacggacgaatgccgcaccgtcattgaggacatgctggctatgcccaaggcggcgctgctcaacgactgcgtgtgcgacggcctcgagcggcccatctgcgagtcggtcaaggagaacatggcccgcctgtgcttcggcgccgagctgggcaacggccccggcagcagcggctcggacgggggcctggacgactactacgatgaggactacgatgacgagcagcgcaccgggggcgcgggtggtgagcagccgctggacgacgacgacggcgtcccgcacccaccgcgcccgggcagcggcgctgctgcatcgggcggccgcggggacctgccctatgggcctgggcgcaggagcagcggcggcggcggccgcttggcgccccggggcgcctggaccccactcgcctccatcttgctgctgctgcttgggccgctcttttagccctcgcgccccccgccgttggctgcgggagagcccgcgtcccactcccgtgctcgcctcgaccccgcgccgggcacctgtggcttgggacagatagaagggatggttggggatacttcccaaaactttttccaagtcaacttggtgtagccggttccccggccacgactctgggcacttcccctgaagctcctctccggagcttgacttcttggacctcctcccccgccccaattccaagctccagaaactcccaactcgtctgccgtccagaaagctagctgcagtgttcaggacgtccgggag

SEQ ID NO: 16613 - DNA, 1150 bp, Homo sapiens
tgcagccttgcatctatatgtcctttttaatagaaaattaggatcatatggatgtatgtagttgcatagcttgcatttttaaccgaatattacattatgataatgcatgatatatttttaatttcatcttcaaagctggcatcagattgtactatgtagatttatcataattagctccactgttttcctctggtgaatgtcattcttttcttccatgatgggtacaaatagccttgtaaagcaatctttgattgcttttctgattatttccttaggatagattgctagaagtagatgcactgagccaaaagttataaacattttaaaggttctcgttacatggagctaaatttgtttccagaagggttgtgttgtctttactcccactctgaataagacagtgcctgtttccttgtacttttgctaaagttggctattatcttaaaatacaaaacccaaacaaaaccagaaaacaatcccatttgccactttgcagagccaagtgttcgtgcccttgacctctagcagctctctgtgaatgtggtcacagattcctacacccatgtgtcttcatcttccttttactcatctttcagagtcatgtttatctttcaatgtctgacagctttagtttggggattttcgtcttatcttgggatttgaggccatctgggcttctcagctctgctcttgctgctccatctttattgtatctgggcttcatctctaatgttttgtaccatttagcctctttgtgccatgcacaccagcctagaccagtgtggcatttaggatgacaccctcataaaggcccttaataaatgctctgggatattgcagcaaaaggcacacatagcattgcaaagttaaattattcaggctcaccgaagtatatataatctattccaaggtgagacagcaccccctccccactgatgcacacatttccccacctgcttcacacacactcactcaagtgcacttcttcagtgcatcacaaagggaagtctttgagggcctctcactaaaataatcagagaatccatcttcttggacctccttgataaatgatgtttgattgaagcggtgaatgacttgttgcatactttcctttcaaactgagtgtgcattacccagatagagaagagga

SEQ ID NO: 16614 - DNA, 1182 bp, Homo sapiens
gttgtatcccggtgagggcagcctctggcttgggcagggtctgtttggactgcagaagcaagggggtgatgtagcccatccttccctttggagatgctgagggtgtttcttcctgcacccacagccagggggatgccactcctccctccggcttgacctgtttctctgccgctacctccctccccgtctcattccgttgtctgtggatggtcattgcagtttaagagcagaacagatcttttactttggccgcttgaaaagctagtgtacctcctctcagtgttttggactccatctctcatcctccagtaccttgcttcttactgataattttgctggaattcctaacttttcaatgacattttttttaactactatattgattgtcctttaaaaaagaaaagtgcatatttatccaaaatgtgtatttcttatacgcttttctttgttataccatttcctcagcttatctcttttatatttgtaggagaaactcccatgtatggaatcccactgtatgatttataaacagacaatatgtgagtgccttttgcagaagagggtgtgtttgaaatcatcggagtcagccaggagctgtcaccaaggaaacgctacctctctgtcccttgctgtatgctgatcatcgccagaggtgcttcaccctgagttttgttttgtattgttttctgacagtttttctgttttgtttggcaaggaaaggggagaagggaatcctcctccagggtgattttatgatcagtgttgttgctctaggaagacatttttccgtttgcttttgttccaatgtcaatgtgaacgtccacatgaaacctacacactgtcatgcttcatcattccctctcatctcaggtagaaggttgacacagttgtagggttacagagacctatgtaagaattcagaagacccctgactcatcatttgtggcagtcccttataattggtgcatagcagatggtttccacatttagatcctggtttcataacttcctgtacttgaagtctaaaagcagaaaataaaggaagcaagttttcttccatgattttaaattgtgatcgagttttaaattgataggagggaacatgtcctaattcttctgtcctgagaagcatgtaatgttaatgttatatcatatgtatatatatatatgcactatgtatat

SEQ ID NO: 16615 - DNA, 3138 bp, Homo sapiens
ttaggatgggggtgacataattttcttgagtttaacaggagtgctttacccaagtcagtcatggatatgatatcactgctctttatttaaaagtaaactttgggcacaggaaccatatgggaacattcagcttgtttaaaaaaaaaaaatcagaagttcagagcaccttttcaatctggagcccttaaaccataagtccaaatatgaattatttgtgaacagttaatgacccatattagaattttacaatctggtgaacaatctgggtaaaaggctacctttaattctaagcttcatttttttttgggggggggttacattttaatcataaattcttttttgcaaagcccaggttcttgttccacacagtgtaatgtaggtgtattttggacagcacatatggtccattgtgtacaagtcagtaatctggatttcagtacatggatttaaaaggcaacaatccatcactggtttgtgtgtttttggttaagtttctggaagaatacaatgcttttatattggaagtataagttttgagtggcattgttgccttctaacaagctctctgggacttttaaagttttattactattattgctaatgtatgattatggtcagagactttcaacccaccccttcctgcctacccctggcttttcctcacaaagaatgtctagacaaacagcagcttagtctcctgacacctcttgtggggtgcatgttcctgctccaggtatgctgttcatgtggattcattccattcagtggccccttggggtttgcatgccagtgaagcgttaccatagaagagccagccgtttgtgttcgcttggtaggtgtaagtaatagcagcccttagccacggagtctttatgtggtttattcctgcaaggttgttttaaactgaaatagaactgctagtgtgattggttgatcagcaaaacagctgctctcattttgttttggaggaaccctggtggtttgacagccaggagaaaggccatatgtgaaaccagtctcttgtggagattggaaatcctccctgatatttgggcagagcctaaacgtgcatgcttgtcactcaaacaccagaagtttgaatcagaggtctgagtgacctcttttgtggctgttcttgatggtttccaggcctcgttatgcatggtttgcttgatgcccattttttgtgccttgtgctgttggatggtaacgaccactcaccatgtaaacacagtacctcagttttctgtccacagctgcagtcgctctgtccctcgtgcttcactgtgggcagccagggacaagcttctgaaagcagtgtgatacccaagtcataggtgcttctcgtatgtgaacaggtgtcattctacagatctgttatgtgttttcctgttgactcttaagagtccctgcatgtaaatctcaaagctgagcctggctcccagagtccagactgacattacagcgcaagagtttgcaagtgtgtccagcatgcaccaactgtgcagaacttggctcggtaactttgcgtggaaaaataaagtacattttgaagtatcttgagggttgggtcaattgagacatttctagcattacttaatgacttgcattgtggtttttctgcaagcaactttaatgactttttttataccacatggtctcccagtttctagatgaatgcaacatgatgatggtgatgatgacgatgagtttaatcattgttcatttattgcctttagggctgagggaaagggaaggtttgtttttttttctccccattttcccccattctgtctttcttttggtgacttacaccacatgtaatgacgctatgactaattctgctcccaagcccttgtatcttgggcttcattttaggctcatgtgtcagatctgcatgcattgcttgcatttttctggtatctgaatgttggttccttgttccaggaattcaacattaatttccaaaagtatcatgggacttgtgacaatacaagacatgaatctatgtataaaatttatcggcctttctcatttacctgctctagtattattgtattgtgtgtgcgtgcgtgtgtgatgtcaggctgccacgtaaaacttcagagaaaaatcttaaaagcagaccatccttttttgcatgctctattctaagtagaatgttcaatgtaactgactaaaattgcatgttaaagatatttaggtttttttgttttctttatttttatttgttttcagtttcctgtatatttgcttactgtgccgttttagtggttttaggataaaaatgcactggtgaagcaaatgtagtgccaacagaaggtgattttccagttgtaaatgtcatgcagcatttgaagggactgtgttttcttaaaaaaaaatcacagttacttctaaaccagatttcatttcttttattgttttatgtgccaaaccacgaagtgcattgggcttcaatctctgaacactgtagacccattagaagactgttccgattgttacaaattgtagtgcctgaaaacactcttaagctgattgtcttaacaaaatgaaagttctccaaagacaaaacagaacaattattataacaaaataattatggttgaaatgtctgtggttccttggaaatgctgcgctctttgtgtttttccatcattagtgcagttggaatgaatgtgtataggtcagaggtcttcgtgttcacattttaaaattaggtaaatgacctcatctttcaagcttgaattcatttttaattttaattttattttatacaatgtgtagacagttccctgttctctgcatttagaagtatacacaatataaatctgttaattctgtaagtaatttttataattatgatgtaactctatcttatccttaaaacatttaaaataaaccctttatgtgcaactcctgactgtaaagtttgtgctgatgagcaacatgtgatgtgttaaacttgattctgaaaagttttttgggccaagtaaccttttcaccacatgtaaatgtcagatatgcatagaaagaaatagaatttttatttgataacattcaataatacctgaaagaagaggaggcagtcatcaatatcacacatatattaaatattgaagtttgcaatttgacatt

SEQ ID NO: 16616 - DNA, 1199 bp, Homo sapiens
ctcgggagagctaccttactttgaccaacagcctgcccagtgtggatgtctcttacagagggggcccaaggaatcaccaccccgcttcagtgtaaacaacgtgccttgtccactttgggctccagagtctttcagatgtactaagctgctgacatcatccactgccttctgctgcatcctagacaccctccctgttgttcacagagagggaaggtcgtgggccacacaatgctgtgtgaccctctccgtgtgcctctgaatggtgttttgatgattttacactacatttcctgtgcgtagaatggatgcttgtatattcgtacatctctatgttacacagaatttgtgttgcaggtgtttgccatgtggtacctacatagaatctccatacaacacacaggtaacaggttatacaagtggattcagactgaacccccagtacaaggacattgttttgaactaggtggacatgccatccctggtctccttagactgacatgattctcatgttaaccaagttttaaaagttcaaattccccaaaaaggcttgtccaaggctggccccagatgtgtgggtctgacccacaccagccctgtgtcctgtcctttcagtcatttgtccctgcgtaattttaatcgtattccaaagcccaattatgtgatggttttcaggtttctgcaaattacagaagagccagccaagatcacccaggagcttgtgcccccagatgggccaaagaaagagcctatgaaggagaagcagaagcagacggctggcctggctcaccttcccacgccagtggggcaggggtctgcttcaggaaatggaagctgtccaggaaatgagcagagattcacaagacagcactttgattctatgttgagtttgtttctatattagaaaagcagcaagtcagtaatcccccgtggcatcacagctaagtagctgtggccaccggcagtttcacagcatcctgaaagctggcactgatcgtgactatcagtgaaagaagtttaattttcaggttagaaaatgtgatctggcagtttatgcattcttcagagtaatgtaataatacctatgtgatgctgtaattttacttttcaacataagttgaacccgtagcagtctgtttaccttgtaaagggattacttagaagacatttttgtacatgctcttccccaaggattgtacgta

SEQ ID NO: 16617 - DNA, 1150 bp, Homo sapiens
gccagggcacctctgagcaccgtgagctgctgggcagtggccacaggctccctctctcatgctgctggttttcttacaggagttttcctacttgttgatgcctattcctcactcgtgctgttttctcattttagttgaaatctggaaaaaacatctggaagcatacagtggatgtaccctggagctagaagaatccttggaggcttcaacctctcaaatgatgaatttgaatttatgagagttcttgcctgtgtgtctgtattttgggtaaggaggggaggtctgaaaaagactttggggctttttcttctgtttttcatgacaatgtaatttgtgtaactgttgaatctggaaattgatcagcattaaagggcacatgaagcagtgtctgcaggcgttcagtgctgcggagcctgttaaaggtcactcagatgtgcaggtgttaatcttctctaaaagcctggtgatacagctctggctttctgagcacactacggatctggaaaatactggaaaatgtgatacttagaatactttggctgctaaggaaacttcctctccattgcagaatagctgagccaagtgagtgagtttgcagaaagcaggtggtgagctcctgcctgctggaggttgccatggagggccattcctgcccggcaacagcaccgtcctgcagggagccacttggcagaagggtgcagggctgctggtgtcagagcaagagggctacagggaaagggccctttctcaggggatgtagcttttttaaaagatttgggaacacttggaggatttgctaaaatgagcctcagaaggaaaattggttttctaacctgtgactttttgaaatgaattattcctttcagtctttatttttcaaagaaacaatgtgtattgaagtacctagatttgtttgataatcaacaaatctttcctttttcaatgaacatattctgaatgtggtttctgtcttagaccaggaggacagagtttgctttcatattttccctgtaagtaagagggcttatttattttaaataaagagtaattattaaattttgtttcagactctggtgattttaggcttctcagtggtctctgtcttacttgatgattcctatgtcttaatttacctcctttggacagtctg

SEQ ID NO: 16618 - DNA, 1412 bp, Homo sapiens
ggtagtaggattgccaccaaagtgttggtggcatccacccaagggtcttctcccccaaccccagccgtgcaggccacctcctccggggccatcacccttcctcccaagcctgcgcccaccggcacatcctgcgaaccaaagatcgtcatcaacacggtcccccagctccactcggagaaaaccatgtatcttaagtccagcgacaaccgcctcctcatgtccctcttcctcttcttctttgttctcttcctctgcctctttttctacaactgctataagggatacctgcccagacagtgcttgaaattccgctcggccctactaattgggaagaagaagcccaagtcagatttctgtgaccgtgagcagagcctgaaggagacgttagtagagccagggagcttctcccagcagaatggggagcaccccaagccagccctggacaccggctatgagaccgagcaagacaccatcaccagcaaagtccccacggatagggaggactcacagaggatcgacgacctttctgccagggacaagccctttgacgtcaagtgtgagctgaagttcgctgactcagacgcagatggagactgaggccggctgtgcatccccgctggtgcctcggctgcgacgtgtccaggcgtggagagttttgtgtttctcctgttcagtatccgagtctcgtgcagtgctgcgtaggttagcccgcatcgtgcagacaacctcagtcctcttgtctattttctcttgggttgagcctgtgacttggtttctctttgtccttttggaaaaatgacaagcattgcatcccagtcttgtgttccgaagtcagtcggagtacttgaagaaggcccacgggcggcacggagttcctgagccctttctgtagtgggggaaaggtggctggacctctgttggctgagaagagcatcccttcagcttcccctccccgtagcagccactaaaagattatttaattccagattggaaatgacattttagtttatcagattggtaacttatcgcctgttgtccagattggcacgaaccttttcttccacttaattatttttttaggattttgctttgattgtgtttatgtcatgggtcatttttttttagttacagaagcagttgtgttaatatttagaagaagatgtatatcttccagattttgttatatatttggcataaaatacggcttacgttgcttaagattctcagggataaacttccttttgctaaatgcattctttctgcttttagaaatgtagacataaacactccccggagcccactcaccttttttctttttctttttttttttttaactttattccttgagggaagcattgtttttggagagattttctttctgtacttcgttttacttttctttttttttaact

SEQ ID NO: 16619 - DNA, 1188 bp, Homo sapiens
caggtgctcacattctggctcgggggacgaggttgggcttcgaggtggtgtgcttcagcctctggctgcagccccttctcacctatagtgaggccgggaagatgaccgggagtgccaggctcatgcatcctctgctgcagggaggagatctggaggtggggactgaacagcctccccactggctaagagaaacacgtgcagagaagcgctttgctggagggcaggcacctgtgggtgcccagacaggggagagagggatttggacctaaggcccagtgagccctgacatagcacgtggattctgcaggaaggtcacagacctgccttgtttgcctctggttctgagtacctctcctccttactgcaatgtcccctgaaggtacactctggctgcttcccacacactggtgcagaagcagaggccatgctcctggatgcctgcttgcctgatgctagttcttctctgtctcatacacgcagggcaacaggtttgtctatgctggctctaactcgggcgtggtccaggccccgctggccttctgtgggaagcacggcacctgcgaggactgtgtgctggcgcgggacccctactgcgcctggagcccgcccacagcgacctgcgtggctctgcaccagaccgagagccccagcaggtatggggcgggatgcgctgcctggggatgtcccccatgtgtgtgggtgaataacacgtgccggttgttttgcaggggtttgattcaggagatgagcggcgatgcttctgtgtgcccgggtgagtgactcctcgacgtcccatttcctttgggagtggcgaggtcttgtagccatttcacggtgcttcagttctgtggcatttgtgtgtgttttgtttttctttctccactcggaacagaggtcaagtgttctgtagcagactcgtggtcttctctgtctttttttcttgccgaaagagtacttgaagccacttagagtgtatctgcttactgggaagcagtctccttccaaaaccatcctgttttctttctgcttagcttggggctcattaagcaaaacctaagcctgttataaatggggagaaaggagcccatgagtgattaatcctcaggcagtgtaagggctggggtggtgtttcccctggggctcccacctgggattcacccgcctgtggatgtctgaaatagcaccaca

SEQ ID NO: 16620 - DNA, 1241 bp, Homo sapiens
cgcttgaacccaggaaacggaggtcgcagtgagccaagatcatgccactgcactccagcttgggcatcacagcgagactctgtcaaaacaaacaaacaaaaaaacaacttaaagaggtaatttagccatcattcttatgccagcagatataaataaacttggacccatctggtcttcagctaaacctgagacattttaaagtgcatggacagccatggacagcaggccctcctctaacaggggatgcaaggcatggagaaagacaatcagtacccaagctcagccacagaagacaggagtcactcatataacttgtgtttagaagtttttggtagccacgcacactttctgaaatcacactatctggtggtttaatcatatttttaaagacagaatccctgagtgctgagcagattctcaaaacacatttagaatccctgaaattagaaagatcaatgacaaaatatctgtcagccaggccacaaacaggtgtaaaattatgaaaggagtggttggatgtgccaagtttggtaaagtggtgactgcatctgagaaagaggctgtgaggctgaactcttggtggcttccttctgtaacttccagagggagtcttcaacacaggccccgtgctcgtaggaatacggtagcacctatgtaggaagtgcgtggagttttctgtcttctttctgtgtgatttttggcctttttatcagcacttctcccctcccaggagcctggggatgccaaacatccagaatgtgatgggacaagatgggggcaggggcctcacctccctgcagaggtccggccaggtctccttgtccctggacaatctcctgagcctctctgcttggtggagcaggcacctgtgtgcagaattcccactgtggccagcacgaggaagtcttttctagtgaaaatgtgtcttgtggtcaggaataattatcctttcccctgtagccaccaaggagggcaaatagagaaaggtaacctaattgaaggattggtcatgtgaaaagggctacatttgggaagctgggaaaggcctccaggcttctagagcagctagcttgggctggattctcatacccaggctgccccttggattgttctacccaagcttttccctggggtctgggctcactccataaggtaaggtgccttttaccttatggtccttctttagcaggtaacaaaggagcatcaggggcaggctgccctggtggcatcacactggctag

SEQ ID NO: 16621 - DNA, 1378 bp, Homo sapiens
tagccaggatggtctcgatctcctgacctcgtgatccacctgccttggcctccaaagtgctgggattacaggcgtgagccactgcgcctggcccacaaagataattctttgtgtcctttactgttctcagcattcgggttgtggtcacggtggaacaaacagaggaagaactggagagagctgcgtccaccatcaaggaggtagcccaggccgtcctgctctaggcagagtcccgggaccatggcctcctgccacacaacacgcagagaggactcaagactcccgctggccatggagtggcctgaaagagagcaagaacatgtggatctttgataggattgttaccaaatggtgtcagtatggaccaattgtgtgaccatgagaaggatgcttattttttttaaaaagaaaacacatctaaaagcccaggaactgatttttttaagaggaaaactaatgacagtgtataactgatgtttaaattgtgcatttagtactatttaaatgttttcttatactagtattttatattcttttgttgtcgtttaaaactggagcttcagtgtctcttccctccctctaatagtaatggttcagtaagcactccttaactccttagtatttcatagaaaaatgactgcaacattaaagctaagaggaacacttcaacatatgtggtacaaatttatattgaagatctaaataaaccacgtattttccagtcttcgttgtgtgaagctaaatggtggctaaaaggaacactttttgtgtgattattataaactttgcattgtatttgaatcttagaacttttgtacacactaaatattgatgtcacaccatttctaatctgagcatccttagccagagaatattcattatacttcctaagtgagcaataatttaaatcagaagctattttattttaatgtaattaacctttctttacatttcttatgtgttcacctctaatctgttttaggaagagagttggttattatgttgatcccataatataaatcatatcctttatattttagaatatctcaaatgtattccttttttgtatggtgggtttgcctagggacgtgtaactacaggcttttactaagccaaggaaaaagagaatttttcttttcatcttacaaattccagatatctacaaaagatgtgaaagcactaaaaataccatttttaagcagtactttacctgttttttctttagcaaaccaggttatgtggtgtaaaggtttgttatacgtgccacaatatagcatataaatattatgccatcattccttctcttgttaaaggtagaagaataaaattgtgatttttataacctgtgcttattactcaaatggtcttcaacatcttt

SEQ ID NO: 16622 - DNA, 1411 bp, Homo sapiens
ggcatgattgctgtctttctcaactgatataccatgtgacccaaagtccccatcctaaatcatatacttggtctttctgtcctggccagcactaccctgaattgtctcattagcaacaactgtcaggtttggtgaacatacccaccatgagaaacaaagattcctaccaggaaattccaaggatttagaggttcacctcaggagctgggacaaaaggcagaactcttaggataaggccaaattccttactacacaagcagttaacatttttttaaatattcacccccaataggtaaaatactgattttttttcaactttttctttccattctagaaattacagaagacatccccgtgaagactttgaatatgaagactgtgtatgtttctgtgttaccaacaacagcagacttctagcatgtacttatcaatgttgttcggtcagcccttccctaattacacctatcccctacacatacatgcacatagacacacacatgaacacactgaagatatttccttcaggtgtgtgtaaaatatgctgcttggattgaaattcaaatgggattgattagtcaagtaacttgagacctcacagtaatcttcacacttaaccttagacacctatgcagtcatgttgggagcaggttacaatgttacttcagcccacagtttatttctatacttgagttcttaagtacagaagatagaagtgatttaaatggcatagtatatatatcattttctggccttttaaaatttatttgagacctcttgatgaaatggacatattatatatttctgccacctggattttcctggataatttgatggaatattttaagtttcagtaaatcagaacaataaacaaactcagatataaatgtgttgaaagtaattcattctcccatagataaatgaaacttgaaatgtgtaaactttgaagaacataaaaacttcatggtggtttcttattaagacagtggactagacatctaataaaacttctttccaaaatcccaggtgataatttgagtcctcagagaagcagatgacatgacaaagttagatgtgcaagaatttattagaggaaacataaatggaggataaacgggagatggagcaagcgtaggtcgagagagccttcagactgcagtgtgggtctgacacctgtaaaaagagaaaatgaagattgattagcaaaaacttagactgcagtgcaactctaagatgaagtcttggtcaggccaatggagagttcccaagcaaggattccttttagtagagttcagaattgggcagaaatagcctggctttgtttctctgacttcctcaagtcagtttctgggaggagaccaaggggagcgtggccttcgcacaaatgccttgatggatctgaaagtaccaacta

SEQ ID NO: 16623 - DNA, 1068 bp, Homo sapiens
ggtgcagaataaatcaacatcaggggtcagatagtatttttaaccatcgtgacctgtgggaatatacatatggcacaaaatgaaaaatgacaatcataaataagaatcatgaatacaaaggtttaaatctagaaaaagacaagaacagattgcctggtagagttctatgcctggaccatagctaccaaggattgccaaaacacatgccaaggatggagatgtgtgtgtgtgtgtgtgtgtgtgtgtgtgtagtgtatatattgcatatacactatatatgtatatatatgtatatatatccatccttggtatgcttttatatgtatataataagctatatatacacatatatatagtgtatagttgggggaaaaggaaaaatattagggcttgaacccctttgtatcccttttcctccaaatgtaacattttctttttagttttatttgtctgattgaggtgttatttttgtggctttttaggtggagtattgctcctggaaaatccaaaaggtgacaataggttggaccttttaaagctgaagagtgttgtcactagcatttttggtgtgaaaaatacagagctggctgtcttccatgatgaaacaggtatgtggaaagtgagaggagcctacgtcctttgactcaagatggattggtgaaggtcttaatttgctgtcagttgtactatacaacttttgcatttttcctaactctcttgagtcagggcccaactcttcagcagtgcctgcctgcagtgtctattcatgcctcctcattgtgtcatgtgactgaaaaccctgggcttaatggatctaatctttccctctcacctgttagctagctggtggacttcaggcttcagagtcctctgttgtgaggttgtttttgtttttgagacagggtctcactctgtcacccatgctggagtacagtgatgcagtcatggctcactgcaccctcggcctcctgggctcaagtaatcctcctgccttgacctcccaagtaactgggactacaggcatgccaccaccatgcttggctaattttatttaatttttttggagag

SEQ ID NO: 16624 - DNA, 2810 bp, Homo sapiens
ctacacactgcccgtctcattttagcctcaccacaccttgctcagcaggtagcagaacaccatgtcatacaaccagcaaatagtggacctaagttcactttctctttaaagactgtattttcttcatgacatcctgctgctctgtgtttatggtgagcatttgttgcctcttggtgccttcccttagctttgtcatgtctttggacctgagagtttatataaaacagtagatactggtgatgacttaactgtcttcaaggtagcatagtgtaatctaaagaaagtttgtcatgtcttggctacaaccatgacatgagtcagagggaaatgatctcttgaagcctctgtggctttgttattgtgaaattttaatcaagaaggggcataatacacgggtagtggggcagcttgaagaggaggggaagctgattaacagtgtagctgcttctccatagggaccattgttgtggaaggccatgaattgcacgatgaagacatccgcctcatgtacacctttgatcaggccacaggtgggactgcgcaatttgaagcacactcagatgctcaggtatttttctgtttcctagaacatttctttaccaagagatgagagcataagaggagaaagtatttgcctgtgcctttcctgataatgttgacagcttgtctcagggtaaaataaaccagttacttggtttagattggctttattaaactaatatattattatgcccttaacatatgcatttgtttagtgaatacataagtaagcattttgtgatttctacatgtcagtcattgtcccaagtgtggggttgcacaaaaatgaacccttcaaggaatgagtcagtcaaggacacctgaaattaagccagttcttagtattctacctgataagttatctggtagaaataagtacacagagggctcctatccaaaaataggtgtagggtgaaaagtggtcagggaacactcttttcaagagaatatacaaactgttttagattccaggatcaatattttttgccatattggagaagagactatctctttgcagtcctgaccagacatccccagtcagcatagttgtaagatctcgcatgtgggtttggggatattgcaggggtccctctgtgcttagcataccatgtgcaggggaaggtagagcagcacctccatgaaaggaaggtcgacctcctcagtcctttacccaggcgcttaagttagatgtgtacagaactctacgtgggaagacagtggcaaggagtcggaggtatcgtagctgggaaagaaggcagggaggaggtttctaaacactgacagtgggcagttcttcctcattacagcagatgttaggggcctgaaaagttgtccaccttacaaaagtgtcatgtgatgcttctgagtttcttgacatggcttacatgttgtagtggccctgcactgactggaattttgagtttatcatgcatttcactacctctgatgcctttatgaagtgagtcatttcttaacttctctgtttactcaaaggtaaatgagatgatgcctaatgtacaagtcttttgtagagtatattttactctgcaacatgctgtgtaacagaagcgatagtgtcattattgctacatcataatcagcaaccttcagaatagatgagatagaaacattaaccttagcaaaaatatggcagtttaagtcacagaaagttttgtggtccattgtagaatttgtcttgagtcgttctgacaaacctgaagatcacaggggtcatggtataggaaagtcacttggagttgactgcgctgaggccgttgatccacttgttgtggcctgaaaagctgtgctgctccaagggcttcatgattattgatcttacttattagaagagttgatattacttcttagatggccaaaaagcagagtcatgtgagggactctgataagaggtggtcccagggcatctcctgtgagcagcaccctacaaaaaaacaagaaacaaaaacctgcacacctttctccagagacagaggactagctgattatgaagaagtacctgaatgataaactagattaattttattgcttttgctcatttgtgtgaaaaaatagtgctgcattatagactctccagatttaaataacattttgctgagttgggaagaagtgtttctccttatttgattgtcatggtgtgcactgttcattcccacaggctttggtcctcttagatgtcactcctgaccagtcaatggtagatgaaggaatggctcgggaagtcatcaatcgcatacagaaacttcgcaaaaaggttagtttgtcagttaagaataagctactgttttggctttttgtttgttttggttgtttggagaagataggagaggcaggtaatataaaccatagtgatcaatgcataacaatcactaatccatagtccatttggaatgtattctgcagaaaagtcactcctcttcctctccccacgtgttcactcccaagtcgtagctttcagccagcctgtgccttttcccatccttttttttagctccgttgggcttctacagaatatcccctgtgactggagcagaaggtaatcagagctgatagtgtctttgcagaagggcagaggtgcagtcagcatagacaggcttctagcttaggggagattcccggatttggacagagttgggtagtttttccttattagagagctgaggaatatgcagggagctcatcctggagcgcagaggggctgcaaagcccctgctagtgagagaatcaggaatttcttgccctgtagagggcag

SEQ ID NO: 16625 - DNA, 1719 bp, Homo sapiens
aaagtggaacggctccaactttaattctttttatcctgtttcctttactccatatgttataaggctcctatttattccttaaccgaaggaaaatctgctttgtacaaggtgctgtgcctggtgctctccatgcctgatctcatcacctccatcctgtgaagcagggggtattttccccagtttacagatgaggtttctgaggtgtgggacagtcagtcttctgtgcatattgacttggctgatacatcattaggtgctcctgtttctattttagacatccttcagaattctagaggtgctttgggtttttctatctacagtcctgcagctatgcttcagggatatgaggccatttctcattcacagggcatgttttgtaacctcatgctcattttggtgcctattactgtgtcattctctaacatgtttagttgtttctcagtataaatgagatcagttgttgatgactgcatataactgacatgatgtcctgtgtcttcatacaggctccctacacaccttttctcactgaattgatgtaccagaatctaaaggtgctgattgaccctgtttctgttcaggacaaggacacactcagcattcactacctcatgctgccccgtgttcggtaggactcaaatagaaataagcctcacctgtgccaaggaggggagagttgctcaagcatgtggggaagaggagggatttccctgctccagctccatctgtgccttgcctcccgccccagctgacatgaactcctcaggctgcaggatggggcccactttggtacacggtagcaaggatgcttggtgtggaacccctttgtagagctgtggcaggtggggtgtgggcatgccccatgggggctccttggggagatgccgggtgctgagtggtaggcactgcgctgcccttccccagtgcttcaccaggagggcctagccacacttctctagcctgaccctcttcctcgcttatgcatgcctagtgccttcaattttctcctcttaaatctaaactctttcatattcctacctctaccactcagagaagaattgattgacaagaaaacagagagtgcagtatctcagatgcagtctgtgattgaacttggaagagtgatcagagaccgaaaaactattcccataaaggtttgaaattttacttctattttacatggcacagacctaaattaattaagtgtttggaatgcttttttaatatagagagcttccaccaatggcctttttccttttctgcagtgagggtgtgaatgacttagtactagtccagcctgactagagcttgagattcaaataaacatttaatattccatttttctgcagttttagaggactggctgctgagtgaactttcccctcccttttcctcctagtatcctttgaaagaaattgtggttatccatcaagatccagaagctcttaaagatatcaagtctttggagaagtatatcattgaggtaaggtagatgatttgtctgtttttggtacagatagacttagaacattattttgatgaataatcctcaaagtacatattgactctataatttatttttattagtatagtcataacaaatgtaataatccatattttacactgtgcttggaatcaacataaatttgttgtaattcttttaaaaatatttcaagatcaatgaatttctttacctatcatctatcatcttcattcact

SEQ ID NO: 16626 - DNA, 5102 bp, Homo sapiens
ggtagcacataaatgaggtacataacattttacagaataaaagcattttctagtctgccttatcacttttgggtgagagtgcattttgcatcttttgtcatcaaattgtcttttccatatgatcttgtgccaaattcaaaacccatccttcatcttcagctaggtgcttctgggtggtcctgagaggccacccagtgctgccatgtggctctccacacagacttcctgggagctctggtaacagagaaatggtcagtaaatcattccagacgtttatttcaatgcttctttcaaatcttagacagtaatttgattggtctccagtaaccaggattaagaatcattgctttaagtgattctcaagaagtgtgacttatcaaaaatagaaattcaatgaataaatacagtttctttcttatgcttggacttcatttctatttttattgaactgtttggggttttttttcaggttttataccctgctggtgctggccacggccctctttggacaaccgcctttcaagaacgtaattgtgaatgggcttgtcctggcaaggtaggtcaactttgttgtagtgacgggtggaactttgtctccactgtttcttaagaaggagtgcgtgagagcggtcaactttgttgtagtgacaggtggagctttgtctccactgtttctcaagaaggagtgtgtgacagctaagcctgatggaggaggaggaaggggaggactttcagattgtgctactgctagtaacataatgctactagtgatattactagtaataaaatagcatttactaaacttagcactttatgaaatacttttgcttatagatcttatttaatctgtacatcagtcctttcatgtagattttgttgtcctttttttaacacacgaggaagctgtgggttctagagaccacaggtgcccaggatcaaagctagtgacagccacactgggcttgaccgaggtactctgccaccagatcccattcttcccctcatctgaaacttcctcccaatgggcattatttcccacattttgctattataaggaagtctcatttttcctttactttattacctctagtcattaagaataaaaataaacataaatgaaaattttaaaatgaaatattttaaaatagaatttgtgctgagtacccacacagaaatcctactttatatgctgtgtgaggaggaagaggatgtcacctaacattttgtgcatccttattttttgccaggccccactgtgtgcattttcacattttaactcatttaatccccagaaccatttgagatgggtcctataatccctttgtgacctttgaggaatctgagggacaggaaaaagtgacttgccaaaggacacacagcaaatgagtggtaaatgcaaattttgaacccaggcagtctgcctctgtagtatgtgtactactttttttttttttttaattgaaaattttattgagggctgggtgctatggctcatgcttgtaatcccagccatttgggaggccatggtgggcggatctcctgaggtcaggagttggagaccagcctggccaacttgataaaacccccgtctctactaaaaatacaaaattagtgggtgcagtggcacacacctgtaaccccagctacctgggaggctgaggcacaagaatcgcttgaacctgggaggcagaggttggagtgagccaagatcatgccactgcactccagcctgggtaatagagtgaggctccatctcaaaaaaaaaaagggggaaattgtattgagatcattgtagatttgcatgcaattgtgaaaaataatagagatcccttaaattctttgcccagtttcccccagtggtcacattttgcaaaactacagtatatatcacaaccaggatattgatatagcccactaatcgtattcagatttctctagttttacatatacttatttgcttatacgcatttacctgtatacggctatcgtgtgtaggatcctgtatccagcagcacagtcaggttactgaatgaattcaacatcaaaggctcccttcctgcattgccttcccctcctgccttcccactgtcatccccaatccctggcaaccactggttttttctccatctctgtaattttgtcgtttccagaatgttatataaatagaattatacagtaactaacttgggggaattggctttttttttcttttttttgagacagagtctcactctatcacccaggctggagtgtagtggcgtgatctcggctcactgcagcctccacctcctgggctcaagcgattctcccatctcagcctcccgagtagctgggaccacaggcatgaaccaccacacccagctaatattttgtatttttggtagagacagggtttcaccatgttgacaggctggtctcgagctcctgagctcaggcgatccacctgcctcggcctcccaaagtgctagtattacaggcatgagccaccgcacccagctggctttttttaaatccacataattccattgagattttagatgactgcacctaccaatagttccttcctttccatggataaatagcattctgtattatgggtatgccatggtttgtttgatcatccacctcttgaaggacatctgggttgcttctaacatttggcaattgtgaataaagctgttgtgaacaattgataataggtttttatgataatgtaagttttcatttctttgggatatattctgacacatctttcttcttcagtctaccctgaagcttcctcatggacttagtatgatattcaaaaagaagtttgcaaatattaacaaaatatcttaccattgtaccttaacactgtttgtttcttttttgagacagagtcttgctctgctgcccaggctagagtgtagtggcgcgatcttggctcacttcaatctctgcctctcaggttcaggcaattctcctgcctcagcctccccagtagtggggattacaagtgtgcgcccccacgcccagctaatttttgtatttttagtagaaacaggtttcaccattttggccaggctggtcttgaactcctgacctcaggtgatctgcctgcctcagcctcccaaagtgctgggattacaggagtgagccaccgcgcccggcctattagcactaacttctatctaagttactccttcccatttcattttgtatattcctgtttgcaaatgatttgtatccttaaaacaagatcatctgtgatattgacttacttaattggcatctcccttttgttttacaagtgatggccaaaaaatgagcaaacggaaaaagaattatccagatccagtttccatcatccagaagtatggtgctgatgccctcaggtacaaaccagtgctttgccttgtgtgtatctattgtttttttatgtaagcatctcctatactattaatcagtattcttagatttggtttatagttaggtttttagcaacatatctctgttatttggatgttatgttggtatggttgttgattttaaacccccaaaatagttttctaaataataaaggcatttttaaacctagaggtctgtttgaggaagaggacctgtgttgggtgttgttgagctgtccaagtcctccccaggctagatgctgattgcctctgccttacttcctttctaggttccctgtcttgttggtattagaattctctttcatcatttgttttaattttgtacttacagagccatgtgagatatatctatgctagaggtgataaaaaaactcatattgaaaagcttttggagaaatttgagccactgcttgaggtagctgtaatcatgaaaccacacagtgttcaagttgaaagggacctagagatcttgttcagcatccctgtgtcctaggcatgagaccagtgcccaggcctgtgactcagcaccttcacacagtacctctgttgaccaggagccattagtggggctctcccccaattctccactgtctcttagactcacccttggcactgctgcccatttgggctgtgtaattctttgtggtggtagttctttgtaggatgtttagcagcatccctaacctctgcccaccagatgtcaagactctgctctgtgaaggctcttccttgtgagtccctctctctgcaagcagcagatgcaggtcgtgtccgtgggaaggacacagtggctcttgacgaggaccaggccagcctttctcttagtgctggtgtaccccattggtcctgcagtgagagtggcataagatgcatttctgtgctatacagtgccatattttggtgtcagattatatacgtcttttataatttgctaagtctcttatagaaagtgagagtgagttttgtgagttttaaattgaccactcaaagagtattcataattacccccttttgtagaaaataggactgattttcatcttgctctctcaatatgtcgagtagtaataattggtttactgtctaagtaccttttctgtctaatttttctccctcttccagattatatctgattaactcccctgtggtgagagcagaaaacctccgctttaaagaagagggtgtgcgggacgtccttaaggatgtactgctcccatggtacaatgcctatcgcttcttaatccagaacgttctgaggctccagaaggtatgggctgtagggggctgcacatgtacctgccgtgtctccacagcgctcccttcaccaagctgtgaggtggagctctgtgtgagactttagggctgctgttctctgctgcctgatgctggggtaacttagagccatggggaggccatacatgcaggtgcggaaggtatctagggtccgggctatgccaagaccatgggccctagcctgcaaaagagttatgtcatatagttgtttagtcgccagttgttgtttttgtttttgaggtggagtctcagtcttgtcacccagactggattgcaatagcacgatctcggctcactgtaacctctgcctcctgggttgaggcactgcctcagcctccccagtagctgggattacaggcacccaccaccatgcctggctaattgttttatatttttagtggagac

SEQ ID NO: 16627 - DNA, 1144 bp, Homo sapiens
ctatagactctggagccaggctgtttggttttgaatcctagcattgctgcttcatagctgagttacttcttggtacctcgactttcctatctgtaaaataggaaatttttggtttttcagatgtgtgtgctgctgttataaatcaaatttgatttagttttaaaacattcctgtgtggctgctctgcttatggagtagccattctttattgctttactttcttaattcctttcacttaaaaaattgatgtatgtcatctatcttctcatttagtggatactctgctacatatggaggtctgggaaataatatttgagaagactagactgggtgacctaacccctgtccaactgtgagggtctgattctccgaatggtcttgagttaccttcagtttacaggacaaagttgatgaaatgtatatgttacaatatagaacaattatcttgggaatctattacctcatgctcacacccatacatagactgttttattcttccctctcttttgccttttctcaggaggactatcgggtctgtatggactttaacattattcggaaagactcactccctgtttgccctgtggatgcttcaggctgcttcacaacggaggtgacagatttcgcaggacagtatgtgaaggtctgtaatccatatagcatagaagggtgactgttacttctgattagtctctaccatcatttataattgtattgtaattcttctaggaagttgtttttatttggttttgtcatcgcatgaaatccgtaaagacagatgttatcagttacgttcagagggtctcatatctttagaggatgcatgctgaaatttcatggggaaagatcagaaaaactccagttcatgcctcatgaagcacctttgtgaccttggggttgtcatttcagatcgaaaaactttatgaccttaaatgttgtggaatgtacttgaaaattacttaaagttagtgactaaaaataataaataatatttgttatttgtgccttttattcataacaaggtatcagattctagtaatatattgttcctaagtattatagtatgttttaatggctaaattttaattttttttaataggatgctgacaaaagtatcatcaggactttgaaggaacaaggccga

SEQ ID NO: 16628 - DNA, 1114 bp, Homo sapiens
cctgatttaatttaggttatgcatttttggtgacaatgccacagaagtgatgctatgcccttctcaatgcattatatcaggtggcatgtgttgcggctatgtcacattgatggtgataactttgttcacttggttaaagtgctgtcagctttctgctttgtaaagttgtagtttttcctttgtaattaataagtatcttgtggggagattctttccaaatattcttttttttgtcatacattcacttattaattttaacatccatggatggtttttgccagtaataattatgcctgtgatatttgccaagtggtggttttggtagacttttataagtgaatatttatacttgtaaataacattttgtgcatgtaggatgaatgccgagaaaactggttcttaaccttacataatatgttgttggcagtatagatttacttgtaccattgattattctgttttcccaaaattttcatttgtgatgacaacagaaataaacacacattgatgtacaattataaatatcattgtctaatactgttctaatattaatattttaaagtctactgttagcagacttggccgatggattgactttgacaatgactataaaactctgtatccacaattcatggaatcagtctggtaggtttatttaaaattgtaaatatggtaaatattctattctgttgtattgataattggaaaaatgcactagcatgaatcagtttatttttgagtccatcgttatttctctgaaaatctttgggaacaggtttgtttttgaatgtagaacttttatttttatttttttgagactgagtctcgctcagttgcccaggctggagggcagtggcacagtcttggcccactgcaacctccgcctctcaggttcaagcgattctcttgcttcagcctcccaagtagctgggattacaggcgcccgccaccatgcttggctaatttttgtctttttagtagagatggggtttcaccttgttggccagggtggtctcgaacttctgacctaggtgatccatccaccttgatctctcaaagtgctacgattacagacgtgagccactgcgcccagcctgccagttgcttttcttaa

SEQ ID NO: 16629 - DNA, 1161 bp, Homo sapiens
taggcacttatacctaagtaccccatagaaggctactatagtactacctgcctttagtcctcattcacctaaaagactagtcctttaatcagtgttttcattatatgtctcctctggtcaaaaactatgagataggggtttattgccctattttactgatgagataactcaagatcaggataaataatttgccttatgtcatggaactaataaatgaaaaatggataatcaaatggaggtctctgtagctctaccacaattgtagcctttctgaaggcaggaccaccagtaaatatcaaatcaattatgtctgtcggtttcctgatcttgctgcttttctccttgaagactccactatgacaagagctatctatagaaaaatgccttaaattttggctgtttttaaatggcttgatatatttttattacctgttagatttaccttctatgatggtcctccttttgcaactggactgcctcactatggacatatacttgcgggtacaattaaagatatagttacaagatatgctcaccagagtgggtttcatgttgacagaagatttggatgggattgccatggcttacctgtggtatgtttgagtatccagctttataattttctgattttttttataagcattagattttgtcatataatatgttcaagtatgatgaacgttgactgtcagaccttctagttcatttctataatatttgtagtttgatttgttttgttttctagagttgcatagttgcagttgttttcatagggcagcgtggtaacagtcttatcacaaattttcaggaatatgaaattgataagacactgggaatcagaggaccagaggatgtggccaaaatggggattacagagtataacaatcagtgccgagcaattgtgatgagatattctgctgagtggaaggtatgttgggtttttttcagtagaatgaacagcaaatgtagttactaaatgggcattgaaatggtttatggtcccttgtgctttttttattaatttattttttgtagaaaaagtgttagcttccaccttcaaccctattacttaaacggttagcttaaactgaaccatctctcttctgacttctgtgtgcttaattggtctaactttcttgcatgatcaccaatagggaaaaa

SEQ ID NO: 16630 - DNA, 1097 bp, Homo sapiens
gatccacatgacttgatgattaattggttgtgtgtatcttctgagtagtgtcaggggtgactcaaaaatgtcatgcctaagtaatgggaagaatattggaaccactaatacagtagtttaaaagggaagcaattctggaaggaattatgaaattttaaacaaaacatggttttagtgtgcgtttctaaaatatattgaggcaaaataatatgaagtaatgtgaataatatgtagttaatatcagggagggtggtctcgaaattgctgaacgggaagttgaggttaaggtgacctgaaggagttgtggagcagcgaagagtcaagggcctggattataataagagggaagcaaaggggatggcatccctctgcacaacaaggttgttgtgcaaggttaacctgctctgtccctgccctgtggttgctggatgctgttgtgcatggacagctctccagtggattcgatgggccatagcaatcctgtgatttatgcatggaggctgcttctcctcagcagctgccatagcccggtcgctggtacatgattcttcctgaatagtcaatgctgttatactgagtgtttatgcttgacgtaataatgcagtgattcttaatctttggggaaagtagagactccctaaaaaacacagtaaaagctgaatgagctggccaggcatagtggctcatgcctgtaatcccagccctttgggagcccagggcaagaggatcgctttagcctaggagttgaagaccagccagggcaacatggcaaaaccctgtctctacaaaccaccccctccccaccaaaaaaaaaaaaaaaaaaagctgagtgtggtggtgcacacctgtagtcctagctacttggcgggctaaactgggaggaacacctgaacccagggaggtcaaggctgcagtgagccatgattgtgccactgcactccagcctaggtgacagagtgagccactgtctcaaaaaaaaaaaaaaaaaaggaatgatcctcttctcagaaagcttaaatcttattttctcaaaaataaaaattcagatagatattcctgaataattgttagaacagtgcaagagtggtgatgttcag

SEQ ID NO: 16631 - DNA, 1097 bp, Homo sapiens; identical to SEQ ID NO: 16630

SEQ ID NO: 16632 - DNA, 1338 bp, Homo sapiens
gactgcagcctgtgacagtgcctctcgtgcacgggggtttgttggtttggccttggctcacctcctacttttacaccttctgaggtcacacagccacttttcttctgcctgactgagcctccttctgcatcagaattcagtcagagcaaagctccccagtgacttcctgtgtcttctgagagctgcgatccaggagggtgagaaaagcatcattactgtgtctgcagagagcaaggctgtgcctagggcccggccactcctgccttgttgccaagcggttgggagatctgagggcccggacttgctcacagttccctgtggccctcactgtgggcctctaggcagccctgcttcccctttacaggcagtgaggctttccatgcctataggggtcagccccatgcacgaggtgtgcctatccccacaggcctccccatgttctgagagttgtgtgggtgtgtgacctcccccatggcccacacctgtgcctgcttcagtcctgcagaggacaccatgaggtcaggacggagttgccgaggcttgaggacatgccccatacaggttggacaaggggccagcacttactgcgccctgaccccaggctgtctccagtctggcctccctgctcttgcctgcagagtactgggctcccatcctccacaggcatcttggtgatgtcacttttcatccggtgtcaaatgtgctttgtatttctatctgaggccatacattcccagtgaagcgaagctcacccttgggagcgcttcctgttggagcccagtaccgtaagccctgcttcttgttccctccacggtcctacgcatcctggacatccctttctgggttgcagaggtggacttcggcacctcctgcccctggtgactgacagaccccgggcagccttctctggctgggacagagctggagctggagctgcgggggtaagctaaggagggtctacagggagggcagcctcttgagactggacatttgggatcccccatggcccctgcctgggagtcatcttcacaattcggaagaagctggagctgagcattgcttctagaaggcatcctgaggggtgacccctgctgctgttgtctttttctgtcttcccttcccatgaaagttgtctgatctcagcttcaggttatctcctcagcctgatggaagacttgaccttggtccttgtcttttgacagatctctggaacagctgattttgtgggtgatacccctccagagtgagtcctctgtgggtggcgggaaagtctctcctcatctgtcctgaaaggctcttgtagttagtagctttaattccacccataaggtgccccct

SEQ ID NO: 16633 - DNA, 1198 bp, Homo sapiens
gaagagctgagggtatcaggagggccgacgctgtgttggcatgcgcagtaggggatgagggttagccatagtattctttgcaaatgtgaaagcgagacattatatcttctcttgcttggtgtaactaatcactgttaatttcaggaaacagaactcattaaaactccttagcaaaccaggtctacatcctgttttgtttgctgagtgaggttagtgggagtggtcaaattggtactcttggaggaagaaaaactgtccttccttctccaaaaaaggaaaaattataataatataaatgacaaaaataaaagaattctgtttcctggaataagcatttcttattcctagttgtagggactcctatttttaccttccgttacagtgttgattcataagaaatattgttacatttgagataacttcatctgtatggggtatttatttgcaatgatgtctgagtactgtattttttctgtgcattaccttagtgtcagaatgttggtctttattttaaagtcatatgcatgttctcctgccaaggaacctttacacagacccaaacaaaaaaataataatcaaatgccttcaatttctgagaaaatgaggcagagcatggaaaaggaataggaaggagaaattaattgagattttcaggacacagacatatgatgtgaatgcctacaaagccagtgcgcataggaacagtgggcctgggtaaagagtcacattggtaggaccaataaagaataataaaaagacaaagcacatgtttgttctctgtggttgttctgactccgtgctccagataactgtggtttaagcaaggcacaataaatccactgcctcaaacaacaacagcaacaagcctatcaggtaaccctggtagtgggaactggaagcagcctggggtccaccttcaggagaatggggaggggtcatgtatatgtggggaggctgtcactccatccctgaaacaagaatgtgttcaaggacccagaagatgagggtagggaaagggtagagttggtgtctgggtgcttgtgccaatcaaatacaccaccaggcagaagtgagccaggccacactgggccacgcacatgagtggagtggagggcacagacaatgcccccccctggaaagatgcctgccccccagggccctgacgcctcataactctgtcctcaagggtcttctgaag

SEQ ID NO: 16634 - DNA, 1247 bp, Homo sapiens
actctccccaatccgcccctcacccctgctttctgggcactgtgcgtgcttgctctccggtgggggagatgggacaattctcagctgtgagccgactgtgggaagcaatgctgacctttgatcctactcagaatctggaatctggagatggccatgtgacagccctggaggtggctcagcaacatcagctgggacatggggttttctctctgtttcttctgtcctcatccatgttggcattttgtccctagtcttgcttggcctcatggctacagtagggctgccacagctccaggcatcacaaccacatttgatggtgggaaacaaatgggtggttaggtgggggccaagcagccagaaggtccatttttcaagtggctttgttcatattttaatccataaagagaaatatttaccagggattctctggtctccttggttagcatgtgtttgtgtggccaactgtaactgtgcttgtatctgggaaaagcttgattggtgtagcaggttatgatctgttctctggggctgggcatagtgagtttctgggtttctgttggtcaggaggggtggcgggctgtgggtggagcgtgcctgctgtgtctgtcttggttaccttgtccctccaagactgtcagtgtctgtgtgtgctagagccctcctctgcctgggcctgcagagaacagcacagcacacatgcccgctgcatctgcaggctcctccctgtccacagctcccacacccaggcatctgtgggccctgatgattttccttccctcctgtgtggccaccccagctccctaccctctgtgccaaccctggcaaagctttttcctctctgccaacaatccagttttcatttagccccaacattttattttggaaaactttggaaaaaccaacagagaagttggagttaccagttgttagtgtttaccactctcctgtatatctgtgtctgtgatttcctgacccatttgcagttcacccctgagtacttcagcctgtgtctcttgataggaacgaggatgctcccacatcacctccaccccctgccgtgctccaggcactccaggataggacctgaggcactcagtgaggtctcagatgggtggactgcacttcctagggaagggatccaggagccagtcaaggatcacgtgttgtgtctggttgtcatgtcaatttcaatccagaacagtccctctgccttttattattactgttcttaaatctgtcagcattgt

SEQ ID NO: 16635 - DNA, 1217 bp, Homo sapiens
ggtgccccccagctccgttagtgctgaatccagactggagtaagctgccccaccgtgagccgttcctcctggccatcacttcttgctgtcttatctccagagggctttgtgcatagagaaggaagggatggtacatattggatagcagggtggtgtttgattagacagtgagtgggaagaatcgcatccgtcctgtggcccacccgagtaagtgctgttggtcccagcaggtttcagcggcagctcagagcccgctggtttgcagtcaggtctgtttatcagaaggccgagggccacaccagggagcaggagggggaccttgctgtctgggctttcctacctgaagagcctttctgggcacagttagtggctacagaggggtgccttgtgacatgtgagggtcactgccagactcagtggctgtccctgctgtttggctggggaagggtccagaagtctgttgatgagctgggctggccaccccatggggtaccctgaatgcagcagctggggtgtcttgtctgtccgggagggaagtggttacctgctaggctggggcttggtatttctgaccctgccactggctgccaacagagggtctcagggccagcaggcccagtgaatgtggctgttccttccagccctgagaggtgagaagtttctctaaaatttcagccttctcaactccaaaatgggggcagaagacagagggtacttgcactttccaatccatggttcctccttccccacttgtcttaccttttactgccaaggagcttttagagagagacgagaacagtgagaaagccaagcctaagccgcagtcgccctccaggaggcggcaggtgtcagtgcgcgctctgaggccctatgcacactctgaccgggggccagatggggcaggctgccgcaggccccagtgggtggtgggggcctggctttgatgctgtgtgtcctgttctctgacccttcaaccaagcttggcaggttcatagacggagccccgttcctggcctttgcacacaagtagactcttccacagaaaggggtgtgagaatgaccattcctgtttgtttctgctcactccatctgctaaatgtgctctgagacagggactccccttggggagggtgtggtctggagaggggtgttcccatctcggcctgggtattcccagacacacctgggcacggccccctcagtgaaggcagcgccgg

SEQ ID NO: 16636 - DNA, 1211 bp, Homo sapiens
ttattttttaaattctgatgatttcacctgacacatttgatctactttgaagaaattgttttgatttcattgacagtgggtggcttctttctgtctcctttctcacagaactctttattttcttgtgtctttctccccctctctttcttgaaaatactgtcatggggtcagctggctttgtgtattttcaagcaaggtgatctttgagcttgacaagaattgaaaattgatttacagtctagatgggatcataagttactgacaggagatgatttaaatgcgatttcccacagaaatttcttagtggagcaatgtgttgcaaactttattatggcatttttttgactgtttggctttcacggatagttttcataaatgtgatttttcagcttctgtgcaaacatttctgcttattgagcttgttgctacagtgttaccctacatctgatgaagtttttttctcgtttgccaggttgcacagagcattgaggatcaccatcaggaagtgattggtttctgcagagagaatggtttccatggcttggttgcgtatgactctgattatgcactgtgcaacatcccctactatttcagtgcccatgccctaaaactgagccggaacgggaaaagtctcaccacaagccaatatctgatgcatgaagttgccaagcaactggacctgaatccaaatcgttttcctatttttgctgctctcttaggtaggtggagcagtgtgaaaatattttataagggagtgaccatatgataagcacattgatcttttaagtgtttctgtgcttgaatgttttggatatgtatcacacattgaaaagaaccaaggcgtgggctcttccttagcattccttgcttcgtattattttttggcatagctaatgtgctacttttgttcttaagtgtttgttgaggtattgttctatccaggaattgttcagattaattttgtgaaaaaactcatttaaggttttggaaaactaacattctaaatcacagatgtcaacacatggtcactatgtaaattagacatttaaacctttgacataaattatgtttatagtagaagaaaatatgctatggggttagaatggttatgttttcacctcattttcgggatactcactactttaaaagagaaacaaaaataagctatcgtagcttgtttccaacacctacattttaagtaaatgtataca

SEQ ID NO: 16637 - DNA, 1111 bp, Homo sapiens
catggttttcttttgttcttggttttggattaaacataaaatgatgtagattttattttgattctttgagcatatgctttggccacagcctgccaaatgaactcttcctaaacatctttatttaggcaagttgttaagcagttgatttggaatggaattgcaatgtcattaactggagataatacagtatatttctgtgagtgtattgtaaattcaacatgaaaaatgtgcaatgttattctgctttcttccatgcaaagggtgaaatcaaaattgctgtttctattgaagatgaagccaacaaggacctgcctccggccgctctgctctataggccagttcgtcagtatgtttacggagtcctgtttagtttggcagaaagcagaaagaaaactgagagacttgcttttagaaagaacagacttccaccagaatgtatgtactgtaacaatccattgtttgttttcctcggtacctcgtaatctcttgtgcattttctaaagccttagaagaatcatgactgagttgaccccgagtgcctctgtgtaaaggaggtgggcccatcatcggggcagtaggccagggtaaaggctcttagaaaaggaggagaagccacagactttcttcctcagtaacattccaataatgatgtttattcagtaaaataataaaacaggtttacactttaaagtgaatgttgatctgaaagcagacttgaattgccgccactctctgtaattaccacgtcttggtaatcaggacgagtgagtttctgtgctctggttttcatgaagcacagatctgctctctccagaaggccagggtcctggagaaaacttccagcaggtctctggttggccatgtttgtgctgttggagtgccaccacgcatggctctgcagctgtagcgaaggtcgtgggactcacggatcgtcgcaggattgtgatgatttgtctcggaatcctctgagacctgtgcacttccagctgatcaactctgggagtggggggtgcaggtggaaacactgaaaaggattgtttgaaaagttggtcaaagatgaggtcaaagcatttttctttatcttctagtgggcctgtgtaatacttggaga

SEQ ID NO: 16638 - DNA, 1107 bp, Homo sapiens
tactggccctatcttcggttatttacctgctccatggacctgcagctgcagagtggccaggcaatggtctttgcttttcatctcgggatttgtctttcttatttatacctagggtctgcctcctggctatcctggcttgaacaaaaaaatgaatgaatcctgaaaattggtacttagaatgtacttccagggtttaaatgtttcacaagagtgaggttgtatcaaaaatcactgactagctagttttcagtatccacaattcagtgtgctatttttaattattctaaagtaaaacattctgacatcctgttttcatttgtaatggtatcatcaaatgaaagtagaaaagtagaaaagctgaataagaaatcacatgggtcttcttagctcacatcatccgggatttacctagaacctcccactggacttgtctatatgacgggcgaccactcagtaatcaccaaccttttgtttctgcccctcaccaggtacatggtgcagtggccgggagcacgcatccttcggcgtcaggagctagatgccttcctggctcaggcgctgtcccccaaactctacgagcctgatcagctccaggagctcaaggtaatttatcagcctcattgcattgtcttggacagtctcactttggattttggtgtaatactgctaactttcaacaggcagaattgctaattctttaaactaattgctttagtccactaaactaataatactaatatgataagaacttgatcaatcgccttcatggcaaaaggaatattcctttctagttatggatttgctatccccagtttggaaatgattagtcccactttgtcagagaatgatttccccttgtttaccattggatgtttattcttatttatcacatcatgaaataaacttgccttttatattttagggggggattccaaaccctgagagggcttgatcttaagaattttctaacatctagcaaggattctttttcttatttcatttcattgttcctaattacaactttagttttctctaaaaaatattctttgcccctcaactattataaaatcccttataaaaaaccacttgaagaacgatgttacatca

SEQ ID NO: 16639 - DNA, 1538 bp, Homo sapiens
tttgatcctggataatccacaaactaggcctttcacatgcagatgatcaagagttgactgtactcgtgttaatgtttctcactctgcttatcagacactagaagcgtgggctctacgtatagaaggtaggcacccagcacttaacactgagggaagtaaaagtctgcacaaattctagtagtatgtatggttcaagaaccatatttttgttgtcttctttcatttataagctatccatttctccaaaagacattttgacagtcttattaataagttgcaattaaaaaccttgacatataaaataatgtgaacataaagtataaatttattttagaatgtaattataccaaataatcttttaatgtaactatttaaaaatgcagaatcttaatagagtgttcagttttgacactctttctgttaatacgttacctgtgtgcagatctgaaatgtgaagtgttattttacgaagagattgtggagccctgggctctaaggagaccacacatcattgctcattttgtcacacgtcagccttaagtacagtgttactctacactgcggaacgctttataaacccaacctgaaatacttgagtatgtttataaaatattctcttaaattcaaatgtgttaaatcacataagtatttctgttcaaatgaggccagtgttaggtcaatataaggtaatggtaggactacttagtggtgctgttttgttgaggaatattctgttaactttggagagttttactaagactttgaaagaatttaatactgtagtactcttattccatagaaattactcttttcaatttaaagattgagaacctagatccccgaggaattcagctatcagctctcttcatgagtggagtagacatggccttgtttgcaaatgatgcatgcggacagccaatcccctgggaacactgttgtccttggatgtattttgatgggaagctcttccaatccaaactcctcaaagccagccgggaaaagaccccactcattgacctctgtgatggtcaggtatgctgcggggccgggtggctgcctttaactgcaatgaaataaagctcactggttaaatctgtcatcttttataccatatttatcatcctgtgtttcaagattctgttttaggttgggcctggtactgagtgtcactaaatatcacttcagtacccaggatgagccaagctcctgatataacattgtttctcattatttgtggtagtaatgttctaaaattcaccttgaacgccaaattagtgaatactgaccattgctcctaggggcaatacaaggtgctgggttccttcaaggctctggtcacatatttttgttaaccaatcagtatataatcttatttcatgtgcattttcgttaaagacaccttatataatatggattgttgattcattattattgaactcacagccagtagcttctgtaacacgtatattctctgtaaggcacatcacagcctccttatgcatttaggaacaccagacagcacttcagcactacacttg

SEQ ID NO: 16640 - DNA, 1132 bp, Homo sapiens
caggtgtgagccactgcacacagcctttaacatcatttataatgtttgcataggatcccatttatagtattatgtaattatttaattaaccattaaataattaacaattattaaataattaaccatacaattttcaattaaccaggtgccttaatatttttaaagtattagttttcaaatcaaatgcattggatatgggagatgtagctcaggggtagagcatttgactgcaaatgcattggatatgaaccaaaaaaataagattgattccttggaataaatcttccctatgatcatacttaacctgtttacgcctagtgttccattattggaacgcaaagcatgtgggagttctttatgtcctactgctcaaggtctgactgcaaaaattcaacaaattgcaacttccggcataaatgggttaattcagtgcttcataaaacgtaagattggatggctttaaaatcatttgatactattttaaatgttgtctgtaacagatttaagtgtttactgttgtcctttttcattcatttaggcgtccaagaggagttatttccaccccagtgattagaacatttggaagaggtggaaggtactatggcagaggttacaaaaaccaggcagcaattcaggtaagaagacaacatgatgtttgtgccagttcaatgccctcagggatgtctcctgtctgagcttgcacttctagtacctgcgctcagacagaagagctgtgagggtaatgctttagctgtcaagtgtctaacacagtaactggcacacagctgctcaccaaatgtccattccctagagcccagatcattttgctgttaagtgcctcttcaggttgtctctcccctttgccatgaccctgtgtctctggtagcttcccgcctggtgtgacacgatgggcttggcttaccttgggcattgcctagccctgacagagctggaacagccacttgtagtttctttttttttctttctttctttttctttttttttttttttttgagatggagtctcgctctattgcccaggctggagtgccgtggcacaatctccgctcactgcaacctccacttcccgggttcaagcgattcgcttgcgtcagcctcccgaatagctggga

SEQ ID NO: 16641 - DNA, 1945 bp, Homo sapiens
tggaaattcagatccctctttgatatcagagatttaaacaacacatttttagttttaaccagttgtagtcaaaatgctacaataaaacaaaaaagagaaagaaaatgaagagcatttgactcccgcacttaaaatgaagtacacataaagtttaaactggttatgacaaaagcctttagttgtgtttcttgaactataaagaaaacaaattttggcagtctttaagtatatatagcttaaaatataatttttagcatttggcaccatatgtatgccattatatttgattttgcattactgtttcacaatgaagctttctttaaggctttgatttttatgattatgaaagaaataaggcacaaccacagtttttctttcttaaatttcatcactgttgatgtggttcttttgtgttaaaaaaaaaaagtgcaactatcaaaactaaaaaattatagagtaatattgccgttctgctgattttaaatatacaatacatcatacatactttacaagcaagttaaatggagataaagttgaaatcatagaagatgcaaatgacctttcaaaatcaacacaatgtgttctgaaactttcgtgactaataccatgcatctgtgatcaatgaactatgtggttttgaatcggatgtagaccattagtactactacttgagctaaacttctgcatggttcataatttttaaagtgtgtagttaatatgcatgttatcgtcctttcttccattcttaacagtatgtgcccatttgcaaaacaaaaatgctaataatcagtaatagtcctataaaagatgttaactctgtttagtcattgactgatcttgctctaaccttaaaattttgtgattattgacctctgttgcatttattctaaagccccccaaaaattatctagccgtttcgaatatcaacattaccctggtgtattcactgctgtatgcattattgttctttgttgctgttttatgccttcatattagcaaatatgaaattctgtgaaaaaaaaccctttgatcttaaaaaaaaaaaaaccaccccccccttctgtagcaggaaacaaattgcttgttcttgagaactttcccatcaagaatttagtagaagcaggtatacttctatcattttgatgtttttgttaatgtttccaaacaatgtactttgaaatcagaatcacttcttatcgttttcatatacttctgatgctcttcatcacattagtgatcagaaatgaggtgtaattccccaacccctgcccgcaagagctaagtaggatcttactgtaagttgaagggagttttgccctaactcatggattgtgcaagaatgaactgctgttgggtttgattgactgtcgatggattgtggtgtggtgtatctgaaggctattgaatgcaacttacaatgcttaataaaaatctttattcttttagtataaagtatggcgtggcttttaaattcacttgtaaaagctaattttatagaggtttaattcaaatcgaaacaactactgaaaagatcagaaaaccaaagttgaaaaatattttaccttttcaaagtaattccaggtttccggcttagagggacattaatatatgattaatttgtttgatagctcagtttcaagcaaccaaggggataaaaaaattctgtttgataaagcagacttacagaagaggtttttttaagccctgaggaagcaataaatttgactccaccacgttttaaaagctggatgttacaagtatagtccgtttttcatgccatccttttgactgaaggctcttctctgcagcctgatatgaggtccccgtacccaggtccgccgagcgcctggagaaagcgccccgtgctgccctctagcgggggatggtgggctaacggcgccggaggcggccaggagagctgcggcgatcccgctccagggagggg

SEQ ID NO: 16642 - DNA, 1191 bp, Homo sapiens
tgcaggaggaaggtcactgagtcggcttgctggctttaaggtgtgagagaccagtgcgtgaccatatgagggtctggaccctccttcccatctgctgtcttccgtctcctctccatgcccatctctgtctccaggcctccagccctccctgtggcatatgggtggatgagcagagctggatgaggggagtggctggcctcttccaagggagaagtcatcagctcactgccaccctctctgctccacgccctctgcctgccacctgggccaggagtttgtgcaggagtttgtgcaggccataggctgttgtttaagtgcctgggctgcaggccaagagcactgggctgagtgcctgtctctctgtgcccctagccagcccccggcctcccccagcacacaggaagccattcagggaatgctgtccatggccaacctgcaggcctccgactcctgcctgcagaccacgtggggagctggccaggccaaggggagctcgctggctgcccatggtgcccggaagaatgggggtggcagtggcaagagtgcaggcaaacgactgctgaagagggctgccaagaacagtgtcgacctggacgactacgaggaagagcaggaccacctggatgcctgcttcaaggactcagactacggtgagtgtcactcctgcgtggggcagggcccatgctcagccctagaaggcctggctgagaatggagacagtagcataaacatgcagctctccaagttacagcaggcctcagctcagcaaaaccctcggcctctgactgctgtccccggagaccctcctgtgagcgagactggccggggcccacatctggtggacaggcttgggcttcgtggtggggcctactctagtttgacaaacagaatgacagcaaagtgaactcctgttttctgggctctggaggtgtgtggcaccgggcgccatcttgcttcctcctgaaccttgggtcctgggcattcctcgacaggccccggaggttgaaggaccacaacctgcagtgagtgtagggtggcacttggcttttgagggtcacagggtcaccgcctcaccgtgttggggcagctccccaccagccacaggtcatgccctacagtgtcccctccacctagacccgccaggcagggtgggggctgtcagagcccaccctccatggacgttagacgttt

SEQ ID NO: 16643 - DNA, 1176 bp, Homo sapiens
tcccagcctgactgcatggagacctacccaggaagctgttcaaacccaggcccagcccaactcaactcagctgccaaggtggcccaggaggcacctgggctcagagcctaaacgggggatcccctggcagagcagctcgaggcagcactgggtgggtgggataggccagggccagggtacccagggacactttgagaccagctgggatgccccacagtaaaggggaaaatgtgagccagcaccgatgtggcccagggtgtgctgagatcgggctcctccctttccagtgctgatggacgtggtgtgactaaagggcacaatctgaggctaatggaaagcaaacagctcgctgcacggggaagagcctggacacacacgatattttctcaggagctcaaagtgcaggcaggagaggcttggctgaggctggggctgtgtcaatcactccctggctgtttgtctaacctcgccaagtgtgttttctccttattagcagaacacagatagggaagcagatctgcccgcagatgcgcagctgcaggaatgcgtcctcccagcagagcgggagggaggtgggaggggacccctgtctgccagccagggctgctctggagaccctgatggggctttgggaagccaggctcctctctgctgagccctcacctgtgccaggctctgggaagggtgtttacggatgttctttctgaatcctcgaaaacccccaggtggctgtaattctgaccattttccaagcctgaagctgaggctgggtggtgaggtggcccactcagaaccacacggtgaggaaggatgggggtgctggggtttgaactccactgcttctgcttcttaacccatttcagtgcctgtcccagtgcctctgggctgagcctggtctgggtcatccctggtgagtctggctgcctcccaaaatatctctgggccttcaattttcctcatcttgtgctagatcagggccagcaaactttttctgtaaatggccaaataaaaagtatttaggctttgcagctcacagaggctctgtcagtcactcagttctgctttggtagtgtaaaggcagccataggtgatatgtaataaaatgggtatggctatgtcccaataaaactttatttacaaaaacaggaagcaggccagatttgtcaacccctgtgc

SEQ ID NO: 16644 - DNA, 1165 bp, Homo sapiens
actgagttaatattattgtattaacattttaagtatatggtgtttacattcttatttcttttgacattttggaaataatcataacttgtctttccaaaataaccattttcttgatggaactcttcctagagtttttaccaaatagctaactttagtagtaaaacctcattgtgtatccattcccccacagatgaactaagaaagtcaccaagtgtcttaagctgttttatatttgttacgaagaaggctattgctacaatatttttaaaggtttcttttttaactttgaaattttttgtttttccttttctttttataaatgtaacagagggtttcaaagcatattatttttcagagagatttagttttactttaatggagtgactgtgaagtggttgggattttttgcttgtagaaagtagacttgctctttgtcagatttccaaacaaccttgccagccttggctgtcaaaaggaggcaggagcagttctcaacacaccaagccttattcccactcccttgggttgctgctgagccaaatagcatctttacagaggaagtgggatcagaggcaggaagtgtggaaagttgctaagaagcagggcttgcctctgtcctcccggggactccacagggatattcgtgcagggcaggggctctgtgccagccctgctctctcagatgccacagccactctgcagaggtgactcttggagctggaggaagtcaaaactgggccactgtttgtactgatggtgtattagcatgagcagcgtggccctggccccacactcccaaatctgccactccatagacccacttgcctcaaggctttatatttggctgctttcttacaatgagaattaagatttttaaactgaagttgaccatacaggttgcattagccctaactggcttcatgtaagaagggtgactgcctaaactagttccttgtaagctgaaccatcaattatcagttgaagccatacttttatttaaattaatatacgtagataccagaggccaagccacagagaggataatagttcttcccaataaaggtgatattaatcagactaatttcgaactaaagaagttactgcttaaagacggaatttcaggggaagcaagactcatttagaacaaatgaaatttctccagtcc

SEQ ID NO: 16645 - DNA, 2041 bp, Homo sapiens
gtggagttcaaaaacacagtaacagcagcagcggcagcctgaccaacaccccagaacggggcagtgatgaggacattgagccactactgcaagacagcagcatctgggagctctcttcatttgaggagcctgggaatcagtgcactgagctgtaaactcggcagaaagtgggattctgcatacgccatctctgagagccatggagggagccacacccctggtgacttcatggtgctggatgggagacgctagcggcatccttcagggccaagtttgataaataccaccgccatcattctgctcatcctcctcctgttttttttttttctcttacattctttttttttttcctgtttatacattagaacaagataagatttgaaatacttccttgcaaataatgtgcaactcccaaggtgaaactcaaatagaaaaagtcatctctctggtagaaaggatggctttcctgtaatgactatagagtaagagtggcagcaatctttccatgcccttttcagcagaaggcacagaacagtagcgggactgccatctctggcaagatttcaggtaaagaatctcttcttaatttctaccttcctgtttctctgaatcagcccataggtgttgatgagtggccactcttaaagagtcactcagtatcagggatctactgtctttgttcaaaggtcaaataaaaacctagtctccttttattctactttctattcttagctagaatgaaactcagcatatatacacttctggacataataatattgaatagtaattacctttactagatgaaagaaattttcattacaaacttaaatcatgtaaaactcaacaactcagattcctggacctggtgtcctggttgggtccaaggtgattttacagaagaaaaaaacaactcaagcattctggtggcaacatagagattgtaggctgcttctaagaaagttattaacaatttggaaattcctaagtaggatgagagttagtaactggatacgagtgaagtttatatccaagttcagactcaaaggcattattatgatttgcttcttcccatgtcttccatgtcctgcttctcaaagtttttctcatccatcacactcctgccttaactgctctgagtatgcatttgttttcaattcatctttatttcaatctgtttaacttttgaatcgcatgggaatacgcacattaagttcctttctaaaataaggttttatgaagctgagtttcacgataagtgtcttgctattttttgagatgttttatggacaaagaaaactttacagatttatatgtattttgctgcaccagtaaatggaccattaactagggcccacctttaacagagcacccctttgaaagttttataggtatgaaatatatgtagatatttgtaaagggttttaattttttttttttgatggggtgctgtgtaaatcttgtatttataaatgtaatgaaggtattgacagaaaaaaatatatacaacttttataaaggattgtgtactgactgaatacatttaaaagaaaatatattttgaaacctgttctgctatgaacagagataacatatctttttactatgctattggtttttaggttaagcttcctaatgcataataaatttacagtggttacttttatgtcttgtgtcttttttttaaagcaaatagtattgctcttttgggttctctgttgggtggctttcaattaaactgagttgtaatctttcagctgatgcaaaaggtatgtattttcaaaaaaattttatttttaacaaaattccttcaaagtctcccttcaaaaacatcgtaactacagatgctccttgaaaaaaacatcgtaactacagatgctccttgacttaccgatggggttccatcctgataagcccattgtaagttgaaaatatcatacattgcaaatgcattattaacacagcttagaagcttcagcactttcggtatcagcacagtagagtattggttggttgtttaccctcctgagtgcatagtgattgg

SEQ ID NO: 16646 - DNA, 1210 bp, Homo sapiens
attttatccaaagcacttggtactagaaatatattttaaaacaatcctttttattaaatttctttttaacaagtggagctattttggcaaattaaaaaattaaaagattaaatcacaaatactggctaccaactgcctataaccattaagttgccttagaaaggtcgaaattactaaccatttgaaatgtgaaaaaactgatcatgaaaaaagcccagttctcttagttctttccatcattctcgtttggctttaaaaattgatactgttacagaaaggaaattgaccacacaagagttaagtgatcccaaggccacaagaaggacaaaaccccacaaagttaagtttagggaattctgaaggacagctaggagagcaaagatagagtgagggaaaatattcccatcagcagaaagagaatgtgcaaagtatgatggcgagaaagcaaatgttatattcagggatacttgttctgtgaacttagtagtttgagattttcctaaatataatgtttacagtgtttttatattaatgattttttctgcttgataaaacttattaagttttcctttttgtagatgaaagccaaaaaattctaatatggtgcttatgttgtctaattaacaaagaaccacagaattctggacaatcaaaacttaactcctggatacaggtaagagagtaaatcttgctctgcacttctttgaattaaattgattatttaaaagtgctgcttaaaaaaattttggggtggggtggaatccagttctatgatgttttagaaactttttcaaacatacccttcactgttacattatcttgctgagtaaaaagtttttcaagagatttcaattttgcttgactgtgaattccaaaagataccagtctttaggatgaagacctaatgttgagtggttttgaaaagtttctttcaggtgattaaaataatgtattccatttcactctagcaattgctatccttcaaaaaattgtttttccctatcaacctggtttaaattcctttccacatgcttccatgcctctctcaaaatctattttgtagtgaaatgaaaattcagcagtgcggcgggagcagcactctttattttgtgtcccgaagttggtgcctgagccagcatatgcacagactggatcttggtgctgcgcagcctctgctgctcactcacactttccagttggctacctactg

SEQ ID NO: 16647 - DNA, 3079 bp, Homo sapiens
gcttatgtaataggattattttgtaaaggtttctgtttaaaatattttaaatttgcatatcacaaccctgtggtagtatgaaatgttactgttaactttcaaacacgctatgcgtgataatttttttgtttaatgagcagatatgaagaaagcacgttaatcctggtggcttctctaggtgtcgttgtgtgcggtcctcttgtttggctgtgcgtgtgaacacgtgtgtgagttcaccatgtactgtactgtgattttttttttgtcttgttttgtttctctacactgtctgtaacctgtagtaggctctgacctagtcaggctggaagcgtcaggatatcttttcttcgtgctggtgagggctggccctaaacatccacctaatcctttcaaatcagcccggcaaaagctagactctcctcgtgtctacggcatctcttatgatcattggctgccatccaggaccccaatttgtgcttcagggggataatctccttctctcggatcattgtgatggatgctggaacctcagggtatggagctcacatcagttcatcatggtgggtgttagagaattcggtgacatgcctagtgctgagccttggctgggccatgagagtctgtatactctaaaaagcatgcagcatggtgcccctcttctgaccaacacacacacgacccctcccccaacacccccaaattcaagagtggatgtggccctgtcacaggtagaaaaacctatttagttaattctttcttggcccacagtctcccagaaatgatgttttgagtccctatagtttaaactccctctcttaaatggagcagctggttgaggctttctagatctgtttgcatcttctttaaaactaagtggtgagcatgcattgtggtgtagaggcaggcattatgtaggataagagctccggggggattcttcatgcaccagtgtttagggtacgtgcttcctaagtaaatccaaacattgtctccatcctccccgtcattagtgctctttcaatgtgatgtgggaaagcaggaggatggacacaccccactgaaagatgtaggcaggggcaggtctctcaaccaggcatatttttaaaagttgcttctgtactggttctcttcttttgctctgaggtgtgggctccctcatctcgtaaccagagaccagcacatgtcagggaagcacccagtgtcggctccccatccaaatccacaccagcaccttgttacagacaagaagtcagaggaaagggcggggtccctgcagggctgaagcctaagctactgtgaggcgctcacgagtggcagctcctgttactcccttttaaattacctgggaaatcttaacagaaaggtaatgggcccccagaaatacccacagcatagtgacctcagaccctgatactcaccacaaaacttttaagatgctgattgggagccgcttgtggctgctgggtgtgtgtgtgtgtgtgtgcgtgcgtgcgtgtgtgtgtgtctctgctggggaccctggccacccccctgctgctgtcttggtgcctgtcacccacatggtctgccatcctaacacccagctctgctcagaaaacgtcctgcgtggaggagggatgatgcagaattctgaagtcgacttccctctggctcctggcgtgccctcgctcccttcctgagcccagctcgtgttgcgccggaggctgcgcggcccctgatttctgcatggtgtagaactttctccaatagtcacattggcaaagggagaactggggtgggcggggggtggggctggcagggaattagaatttctctctctcttttaatagttttattttgtctgtcctgtttgttcatttggatgttttaatttttaaaaaaaaaaaaactttgctgatatttataattttgtatcataagaatgttttcctctacagtatttgtcatgccagtttataacaaaaaaaaatgcagggattttatttctattggaaacattacagctatgttttacttttggacagaatttttatttgtatagagtgcttactaatgttaaatagttcagagtatataacatttacattaaggactcatggtaggttttagggtaaggagtttaaaggaaataaatattcaaactgggtctcattgccaattttggtggaaatgagtttgtgtcatttcaattacaaagataaaagtatgccatataatttatttatatgaagatttatttttgtagtgtacatagtagtcatcaagtcttttgacagaagtatatttttaaagaatttatatgtgatgaatccataatgtctggaactttgctgagacatgagtgggcacagttttcattgtaaattacagcaaggaaagaaaatgtttaacagtgttaagagagtcagagcagagtggatattcatgcgattatgaagtgtttattagttaccattggcgacctagcatgcttctcatttcaaaccttggaaggtgaaaatgtacaaactctctaaataattaatgttcaaacactgatagaaattctaacatgaataaaaaataatataacttgttggttatatctttgtttgtagaatgctttttttctttaaaatacttgggagagacagttagtgttggagccatcagaaactgttgtttcatcttgctgaccttgtgacactcttcttttttgctctatctgatggagagagttttaggttttcctcctttttgttttgtataaatagtgggtataagcatagctctgttacatggatgtattacaaagtgggggctgagcttttagtgtgatcatcacccaaatagtgtacattgtacccattaattaatttcttatcacctgaccctatttttgttttctcataccaagaaacttcctaagttaaccatcaaaattagtccttctgtcatctctcttagcatacttatttcccttatgtgatgcctaataatgagggaacataaataaagccaaattcaaagatgattatcatcagtgaaggtgtcatacttctaaacagtgtcaaagataatatggaattgattgaacctg

SEQ ID NO: 16648 - DNA, 1217 bp, Homo sapiens
ccacaagtcgaacagatggaacaaattgacagaatcgtgttcgctcaccctgggctccagaagcagctgagctgctgtttgaagttgggggagtttgaatgtgctttttcccctctgtgtggaatttctggttgtattgaagaactcatgacttagcaccccgagtggcacgaaacggttaatgaccctggtgcgtgtctttccgtcgcactcttgccttcttttgtaattgtcatggggcgaaaggaggagagtggtttttcttaagataaaatatgagtatttgtttcatagaaacagataatctccttccccccttttgagcagtggctggcagcagctgcagttcattcatgaaagatccagtgctttcagtcaaagtggatgtgggacacagagggtgtgtttctgatggacgtctaagagccccctgccctgctcagtctcctcagcccaccccgctaggaccagggtccttctggctgcgagttataatgtgttacaatcatttgccatttctaggacttcaggatgcatttgacagtgactgggaaaccgggaaaatcatgccaaacaattacaagaatggatcagacgatggagtccttgcctacaaactcctggtgcaaaccggcagccgcgataagcccatcgacatcagccaggtactccagctgctgggcactgagggcgcttccagggctgcggggccgctgccctggtggaggctgcttgacagcgtgtgaccccaccctgtgctctctggagacctaaggcactgggagctggtagaaagaatattgggtgactctaattcacctcctcccaccagctaattgtgtgacctcaggccagccagtgcacctcactttcctcatctgtcaaatgggacaggcgtgttcctaccaccagaacaattgtcagaataaagtgcagccaagagagtgcaggctctttccaatgttagaaatgcagcggcgtgtgattctttcagttctaggactcggtaccttgttggtcttgatggtattcaagcttggaaagatggatttcttgggtagcagtcatttggatgagcagaatttggggtaggtgggtgggttaggagattggagaggtgacagaaggatgggaagatttgttacatttgagatctttgggtggccctggccccaggagtagacagatcgctctgtgatgagtgaagcaaacggaaa

SEQ ID NO: 16649 - DNA, 1135 bp, Homo sapiens
tttctaaccttttgtttatatttcctgctcatgtttcacctctgttttattaaattatgtcacatatctgtgtacgtagagaaaccctaagtgaatatttatctagtttgatatttatttggtctcatttattttgctgtttttaactacttcccttttttgtaatagcccagtttcctaggagccttggagcataaatgagaaggggtctgcatagcactgccactgcacttagattttgttaccaggcacctcgtaacagcaacatttccatcactgtgtgtcatgaggataaatactttctgtaataaggattttctccctttatgaaaaatatagttgtattatgatttaccaaaagtatgcttccacattagctatttgtggatattttgtgcaatagttgaccatcattttcttggaatttattgtgccaaagtaacccgataataaatgttattgtaagtgatacattttatgatgtaagcaggtgcatagctatgctggtcctttttattttctatatttttctggttacagaccaattctcatggtgaaacagtgaaaaccttgtatctcagttaccttacagtccttcagaaggtagctaaccatgtcgcgctactgcaagctgctagtacttccaaacaacaggtttggttagcattttacatttctttgtgatgctattgttgtgaatattttataaagttttaaaatagttattaaataaagtttttgtggatgaaatttaagaggaaactgatttgcttatttttaaatgtagatatcaaggagtatgtgcacttaagtttttaatcaaagtgaacaaatttaagcttaatttaaaataagaactatcttttatgcctttaataatgttcatatctttatttttcaaaacagtctttggtataattactaaataacatatttgatgggtcagttctattcctctaataatgtctgtaatggtatttaatctactgggtaaaatgaggatttataataatttgtatattaaatattagggctgtttaccaaactggcaaaaatcagtaatttcaaagtttactttggttgtttccttttattctagagcacacataaatgaaaagatgtttttgtaatgatt

SEQ ID NO: 16650 - DNA, 1102 bp, Homo sapiens
agcatcagctggatgagccaaaactagaacgacggcctccggagagacacccaagctggcgaagtgaagaaactcaggaacgggaacggtcgaggacaggaagtgagtcatcacagactgggacctccaccacatctggcagaagtaagtcagcccaggatgcacgaaggagagagaatgagaagtctctagaaaatgaaacactcaataaggaggaagattgccactctccaacttctaaacctcccaaacctgatcagcccctaaaggtaatgccagcccctccaccaaaggagaatgcttgggtgaagcgaagttctaaccctcctgctcgatctcagagctcagacacagagcagcaatcccctacaagtggtgagggaaaagtagctccagctcaaccatctgaggaaggaccagcaaggaaagatgaaaacaaagtagatgggatgaatgtcccaaaaggccaaactgggaactctagccgtggtccaggagatggagggaacaaagaccactggaaggagtcagataggaaagatggcaaaaaggatcaagactccagatctgcacctgagccaaagaaacctgaggaaaatccagcttccaagttcagttctgcaagcaagtatgctgctctctctgttgatggtgaagatgaaaatgagggagaagattatgccgaatagacctctacatcctgtgcttttctcctagtttctctccaccctggaacattcgagagcaaatcaaaacctctatccagacaagacaaaataaaattcaccatctcctgaaaaaaaaaaaatttcagtaatacggaggaaaataatcactagattatactataattctaatatttgatgaattatttgaatgggtgcattgataatattaacttaaacaaactttaagatctacatttaattttcagttccttaatttcacataggccattagtctttcaagaaaatattctgcttagatcaagcttttccaacccacagccagcaggttgcatgtggcccaggacggctttgaaagtggtgcaacacaaattcgtaaactttcttaaaacattatgagatttgtttacgatttt

SEQ ID NO: 16651 - DNA, 1207 bp, Homo sapiens
aggctgctattctgtagaaatttatgaagaatgttattgccccagaatatggggtgagagagaactgcacttttttaatatggaaatgaattcatcgtaaagtttaaaatattttgtaaatatggactgcacagtacagggtagaaaactacatattgtgggaagctagattttgcaagtttaatgcattcattggaagcagttctcacaggaagcactttctgaataagacacttgtttgaaaaacagaatggtacaaatagccaaagaagattaaaacagattatttataagatcatttttaacaatatatattagtatgtttaacaatactgtaaacactgaagcaagcaagaaagtataaaatatgtaagatagataattttaattgcaaaatactgtgcccactaaggctagagaaatgggaggctattttggaagatgttctaagtaatggacttagaagaaaatagatatttgaggctcttggtaagatgcacaatagttcagaatttttgaaattggagcaaaatcagtcttattctatctggggctttacaactcagtataatgtttaagtttgaaaagcacttgtcatccctagcatgttaacttgggaacttttgcacatttcatatttctcatttgctgaaattgagtgattaatcttgcaaagtctaggtaacatagtaattggtaattttaaaaatacatattaagggccctgtaatgagatttggcacttggatttttactaaagggacacctgcagggttgttttgtagtgaaatgttttagatcttttgttagcaaacactacattttaattgtactgcttgtttagaattattagcaaatggaagcctccatatttatattttcagtgcataaagccaccttcttgctttacttcagagtaacatgccaagctattttgtgttcactaaatttagctatcagttaaacactgcagaaaatattagctactcaaataagtaggcttctgaaatagttttaactgcaagtgtgttaacttgtgtggtggtttgaagccatttttccaaataaagttattaaacaccactttatgtactgaagcatgaacagaaaaatcaagagctgagcagaccacctcctttatgtaggcaaaacttccatcattttggcttttgttctaaacagaactaaatgacatgcatagcatggt

SEQ ID NO: 16652 - DNA, 1171 bp, Homo sapiens
gtgagagcagaatggcctggcgtggccagtgcttcccggcagcacgcagctctgcggcctccagaattcccctgttctgagcttgatgcccctagcctgtcccctacctacttcctcccctcctctctagccctctcacaggggtgattgctacctctctgttttcttgggcctaggcaagttttagaggagttcccaagcattgttatgaggccagtgtgctcgctgggctgggcgggatggcctgggcttgtgtgtggcctgagggctctcctggggccttctcttttcccagtcacctttggagccacagaagcagtgcactcattggatgtctgttcttaacacagcttctctttctacattaaaaaaaatcattattgcattttggaaagcagtgctcatcaaaagcaacttttaaaacctattttattgttcctttaaatgttctctcccgctgaaactgccctggagaggctatctgctgctcttccatttacccacatcaggttattctccatgtcactcagtggagatgactccagatgtgtttaaagactggacaattcacctatactgtgtaggaaattacctccttaattacctggtagaattgtcagcagacatgttcatccgatgatagtactgcagttttctattaataatttgcagacttttatctaacctgcactcatgtacagattattaaaagttttaaaatgtaactgatcagtattgatcaatcattgtcttgatttttttttacagcgtatatttctaatcatattttttaaagccaagagaactggttgaatgaatgtttattttcctgaaggtatttttaagataaagcttcctaatggcgtgtaaactttgcatatgtatgtagtttgatacatattgtcacatttgaaaatcttgtgggttgtaactggttttatacaaaatatcgaatagtggaaattgtataattacaatcatgtaattaaaagtattaacccaacagcctttttgtttattgtgttacttaccaagcattttgaattctggtaggcagtgggttagatcataaagcagaggtaacccggaatctgtgtaagttttctaggacggccataatggaataccccagactgggtggctgacacagaagttcatttcctcacagttc

SEQ ID NO: 16653 - DNA, 1185 bp, Homo sapiens
aggtgattccagagtgtaaccagccttgagaaccactattgaaagaagcagagtcatgagaagccttttaaaaaaattctgcctgcccaacaaaatcctggagtacatcagcccaagtttcatttctgtgcttctttattttcctagctggccttggtcgcacgggcactctgatagcctgctacatcatgaagcattacaggatgacagcagccgagaccattgcgtgggtcaggatctgcagacctggctcggtgattgggcctcagcagcagtttttggtgatgtaagtagtagcctacgtctgtagttcccagggaacatgtggggttggaatctgatggggagtggaatttcctttagtttccaacaacaacagataatctggtaggaagaagttgttcatgtatctttctggaaagctctattttgatgttatttaaatgctctaggaagcaaaccaacctctggctggaaggggactattttcgtcagaagttaaaggggcaggagaatggacaacacagagcagccttctccaaacttctctctggcgttgatgacatttccataaatggggtcgagaatcaagatcagcaagaacccgaaccggtaatcaagccgtttctgttgcgatgttgttactgctttaactgctattgagaacctgtcagggtatggagaaaaccgtaggtaaaataataaagcagctcttggatgattgtcagttttttatatttataaccctctctaggcactttttacccaaaatagtggaaacaaggttgtgtgtccataaaactatgttttacttactcagcaggtgcataaaaggttgtgaagtgagctcttcagccagatctacccctgcccctcacccctttttgccatttcacaacagctgatttaggaaagcaatcattctcaaatagagagcttttaacaaatcaaaggcttagggggtagcagtactactacattaagtggtagtaagtacactgagattttaaaaagagcgttttcaaacttgaaagcccattaaccctcttcactgttgatgtgttttctaacaagagtgctgctgtgttgtctctgaaagtcaactttggctgtcttaaaatgtcacctgaagcttgattgtgaaagggaaaaatattctagagcttgcagaaacttggactgtgt

SEQ ID NO: 16654 - DNA, 1099 bp, Homo sapiens
cttttaaggccttattttagagcctcttttgggctatggttataatacagatagcctgttaaatcagtatttcggagtggattttttgaagtgagtgatttatttccttattatatttattctattattagatttaagaaacagatgtgattttccagcttgatatctatgtgagttccgtattctgcccgtctgacaggacattttatttaattatatttaataaaacctaacagaaggttataatttaaaaatctttccccttggatctcataaaacatcaagtatggctcttatttaaccataatccttgtcatactttattaccatgatttaaaattattatggcattatatagagaatataatgcactccaggtaattaatttttccctttggactaattaaaggttgaaaagcttccttgattttagtaagcagtaaatctgatgaataatactatgcctcagccttttattcttattctcttctaggtaacaacatccattttatacaccgcgataggaataggttggatcacaaacctatcaactctgttttacagcttgtaggagttcagcatgtgaactttacaaacagaccttcagttatccatgtgtgacttaaaatgcactcagtcactttcaactggaccttctggaatgtgaccttcaatgcctgggtgtaatatcctcgtgcagtgtctaacctgctgtcccttcccagcctttgaggagttagggaagcataaagggggcttgaacctgttgaattgcatgctgggaagcatcagttgtcaaaatatgttatatacttccattttataacttttaacattttatacaaaaaaaatgaatatacaaaatataactttaaaagctataaaatcataaatactctaaattattttacattatggtatattcagtcaatgaaagagttttttggcaatataaattctgacagtatataaggggacaggagaacaacacaagaccattatattcagtgaagaaggcaaaatatcaaatctgtcaacaatgtaactgcatttttatatgtatatatttgtatttttgtatgctttggaaaaagacagg

SEQ ID NO: 16655 - DNA, 1064 bp, Homo sapiens
cctgggccgcagagcgagactccatctcaaaaaaaaaaaaaaattattagcctttgcacagttctctggtgagatggtcaacagctaatggttaccatataagtaccattagatggttaacacacagctgttcttgcttttacataacatggagaataagcaaaccattctacatataatagaactttatccattgtgaaaaattttttatggacagattgacctaggggttctcattgaagaaatgtcaactaatttttcattttcaaatcaacaaatagcattttatttcatgggacgatttataagggtgttgatttggaaatcctaggttgcaaattgctgagtgtttcggttctagaactaatgttccccaggaggtagatggtagtgatcaagtctctccccctttaactttaaaaggatgaaatctgtaagtacagacctgagaattctgttgctaatgacactggcttcacagtggtcgcacctggaaaggagaaggccctgatgaaagcagtcgcaactgtggggcccatctccgttgctatggatgcaggccattcgtccttccagttctacaaatcaggtaagtgtcattttattatagaaatttaggcagaattgggaagcatcactgtgattgattcttggatatgacatcctgctttgcaggaatgtagtattttgagagtgagcatttaacatagtgatgtttgcatttgacatgagaaaatacttagttatgttaaacttctcataaatatttttaaatggctatgtaattgtatagagacaacctaattttccaaactattttccagttgttgggcctttttttctcaaagttttttactactgtaattaggactgtaaagaatccccttcaagtttttgtttgtttattttggtgctattttagactgacatcctaggaacagaaagggattatgcgagttggtatttgggctcagagatatctaaatcaccttagctgtaaacaataggttttatcttttggattttcattttttttggtagaaaatatcttgaacttagttgaa

SEQ ID NO: 16656 - DNA, 1099 bp, Homo sapiens
agagaatggtcctcgctgttgggagttgatagccagagagtagcttctagacaccagaccttaccaggcaataacctaacagcacccattataggtgcaatatgggcatatatctccattgtgtcttggcttggagaacagctcccagagaagtatcaacccatccctggccatggtttctcttccatttctgcccgcaaatcggcttggtgaacatgggttgggtaagtagacataaagtccaccagctatatgtttgcctctagaatgaagaaggatggaggagagcagtgtgggaaaagaatatgaaaatgattgaactgcacaatggggaatacagccaagggaaacatggcttcacaatggccatgaatgcttttggtgacatggtgagtgtggcaaggattgctgaactctgtgctgcttctcagttcttcaccaaaatagtcttgcttttaacattttatttacttctccttgaagaccaatgaagaattcaggcagatgatgggttgctttcgaaaccagaaattcaggaaggggaaagtgttccgtgagcctctgtttcttgatcttcccaaatctgtggattggagaaagaaaggctacgtgacgccagtgaagaatcaggtgagacagcgtcagattcagaccctgtctccacaggaaagccaagaaggaattggtgtcattgctgtggtagatggtggcacaacatatggtgatgggttttttgtatttttggtttttggtgttttttttgtttgcttgtttgagacggagtttagctcttgttgcccaggctggattgcaatggcgtgatctcgtctcactgcaacctctgcctcctgggttcaagagattctcctgcctccacctcccgagtagctgggattgcaagtgctcaccaccatgcccagctaatttttgtgtatttttagtagcgacagggtttcaccatgttggccaggcggatttcaaactcctctcctcaagtgatctgcccgcctcggcctcccaaagtgtggcgatgggttttttttttttttaaagaatattaaggtaattcaattatggggtactgtatttgtattggtct

SEQ ID NO: 16657 - DNA, 1188 bp, Homo sapiens
acatgtccctgtcacacaggttccaagaaacacatacgcagccatgcatagaccaacagatttaatattatattgcagttttcagcgatgcagaatgcagctgcaattgtgttttaaggagaagccaaatggggatggttgtccctgcaacatggtgccactcctgggccatgtgcagcctcagtggacactcttccatagcgctgaggccctggccccgcctccagttaccctgtactgcccactgccttacagttcagtgcgcaggccttcaccttttcatcaccagcctctctgctcagtgctctggagttcttgaccttgtcctttatcatgagatttgctgaaatcactaatgaaaataactcccaaaagcaacaaacaaaaatattagtttaactggcactgtggtatattaaaaggcacaagggcattgtggcttaacacttttgctggatcccaagagacgcacatgatgttaaaaagagatctggcagcagtactaatactacatttcagtgtaatcatcttggggtggtttggccaggatttcccaattccttgatatctggagtttcttcaccattgtccggcatcctgcggaggcttaatatacaggcgtaaggtcagcagcaatttgtctaataagtgatgagatcagtagctgaagtctctaagctgggccattactaaataccatagccatgttgatctggaaatttatccctctagtgtcttacctcacataagccatttgcccactgtgcaatatagaaaggtgttttcaaaagtatttggccgtagattttcacatccatcataaggttggcattcaataaggaaaaagttctaactccagtattaaattgtacataaatcccaaatgttcttaaagaacactcagggacatgtttgttgcctgggattggtaatgaaaggttggtttttgaaacttgaaatttcaccattggtttttttcctatcatttctgcatatccagcaaaaggaatctcatgttgactcctggcagagttcagtggcttcagtctgtctatctgttctgaggggaaaattgtgttctggatccagtaatcaatttggcaactttaatcgaggttttcaaaattccaaggagggttaataaagaatgataatcagttttatttgctaatagctaagacaaatttg

SEQ ID NO: 16658 - DNA, 1530 bp, Homo sapiens
ctataagaatctctgagagtattcatggcttatagaggaacacatagacaagagtatttcgttttctgactgtttatcttcctgtcagtccgtctggctgctttttaaaaagttacaatgtattatgccctgactggggagagagctagctgagcctagtccgtaatagtactaggagcaagcaggcactgctgccactgccttgaatcatgaattctgtttacatagaagttggtaagaactggattttttaaaaagctattgagcatccatttttttcatttccctttttatttttttaatgttggggattttcaggggtccattgttcctatcagcacttttttttccccttcctcttttcatcattctgcagcatgggtgggctgctgaaggaaatgttccacaagattgcttatatgctttttcctgacctaactacccccttttgtgtgtccacagcatcaccaaataatccagcagtacatggtgaccctggagaaccttctcttcactgctgaattagaccctcatatcttggccgtgttccagcagttctgtgccctgcaggcctaagggtcattttttcctcatgtcaaggttttttttgatatcttaaaataatttgtcttattttttgatggtttgaatgcttgctttcttgtagtatcctttcacttcttaaaggaaacaaaggggaagaggacagtgaatgaacatggcattacttttaattgccctgaaaagcaaatacttcctaacggcagtaatgtgactatgaccatgatatattatatatgtgacagatacaaattctctgtgatcagtttgttattttttttctccttaaggcacaaaataattggtttgaggtatgtgaaacactagaggtcaaccttacatagtatatagaactgatgggtttacccagctacccagtagcataacttttcacagctcggggatgaattaacatggctgaaataaaactaaaagtatggtttttaaactttggcatttcatgatttatcatctcactctactctaaaactggtggtttcttactgaaggtgttctccatttgaaattttatcttcaaagtatttttaagtagtatctttaagacatgacttgttagtaataaaagtgttactagttggaagagtagctctcaaatttgtcttaatgtaaatcacctgggaatctttcaagttattttgaaatttaaaccaccgtctgggggtggaacgcagacatcctcagtaatccttaaagtttccccaggtgattccaggtttggtcaccattatcttagagcatctactcacttcctctagccttggggttatttgtccaaggtcttgtagtgagttacagaatactaaagtggatgtagaagtggtcagattgactgaaactataccctgaattagatgtgagtttagattttgtttatatggaacctgatccaaaaaactacgaagtcctgagcttgtttcctgtatagtactgatgctgaaataagatgac

SEQ ID NO: 16659 - DNA, 1409 bp, Homo sapiens
ggaacactactcttgagaattttaaaagacctttagtttgagcatatcctaaagaattcaaattctagattttaacgcatttctgaagacccacgtgtgtacttctcttgcgggcactttggctaattttagctactccatattctacggatttgcaattacgccgcaatggaaaagtctggaataaacaccttctcaagccaagaaagcctctcaagttttgaggcgcgagctgggcgataggctagcacgtggcgggcacaaaatgtctgacggaaggtcggaagaacgcacgcccgcgaccctccatctcgcaacccccggagcggcccaccctcgcgggccctccgggaaggacagcgccgtgcggtggagcccggcccgccccgcgttagtggtgacctcaaagactagagagcaaggatttaaaatgtcgagcacaccaggtaaaccctggtcgacgaattcccacaagttcgcgacttgttaaccacagccacctgagggcacgaaacctggccgctcgcttagcccagagcgggtcgggaggccccgcggggccgccctccgcgggaaagccactggcccgctggggcacccggccgcggcgctaactggcccgcgccggtccgcggcggggggggggctcgcgacggcgggcagccgcgctaaacccgggagacgaatggggcaattcccacaggtcggacccacgcccacgcagccgcgccgcaagagggccgccctcaggcccctacagcccgcaaggcgcgcggccgaccgcaccaggccgctctcaagcacgtgggaggccagaggccgcccggcccacgagccgagccgaagcccgcccaaaatcccgcgcgcccggcgcggggcgggggcggccgcctgccgttgcccttttaagaagggggagggggtcggcagcgcgcccgcgacgggatgagtcggcggcggccgcggcgcgcggctcccgccagtgggagccaagccccggcggggcggggggaaacagaccgagggctcggcgcgggaagaggcggccgccagccagcgccgagggcgggcgggcaaggccaagctcgtgggccggctcaccaggcgcagggagacgggcacccgccaacatggcgctgcggcggcctgtggcgcgccccggctggcgtgaagagccgccgcccgcccacacggaggggccagcctcccggggcaagggcaggggccccgggcgccgccgccgcggcacagggggaagggcgaggccgtcgccacaacggttggccttggtcgacccgggctgcccctgggaggcaggagtgggcaaggccgagggcgaagagggagcgagagaacgggggagaaagttttatttttgggcttgaaaaatggcgggaaccacgtccttt

SEQ ID NO: 16660 - DNA, 1247 bp, Homo sapiens
ccctttcctgaggttatgaagcttctttatgggcttacttgtagggcccgttcctctcttgtagctttcagagcaacattccctggtggcttccaggtgtagaactctacagtgtatgtcagtattgtccagaaattaggtttcaagtgggcattgcaagctttgaaggcacacaaaatatgctgctcagaatgcacagactattaaaccatttaccctttctggcaggtatagggtattacaacttgtcaaaggattctaattggttttgacccactttttaagttagaaaatttatttgctgatgttagagaccagttcttgagtaagctgttattagcagctgattaggaaaacacaatacttctgaccttaccttctcctgttaattatttggatttaaacaaaatgaacatgcatgccctaatagaaatagggatcatttgatcttgataaatctttgagaactgtatttgttacttacaataccttaaatgatttctgtttctctgtgtgtatttgtgtttgtgttgtgtccattttctcttgcagcttgaactcagtgaaaatagaatctttggaggtctggacatgttagctgaaaaacttccaaatctcacacatctaaacttaagtggaaataaactgaaagatatcagcaccttggaacctttggtaagtaactgagaatttggaaactggaacttactggtcattttcattttcatatttctttatagtgggggaaattactggcaataataattggttgagaaagtggtggctttttttttttttttttttttttttttttttttttttgagacggagtctcgctctgtcgcccaggctggagtgcagtggcgggatctcggctcactgcaagctccgcctcccgggttcacgccattctcctgcctcagcctcccaagtagctgggactacaggcgcccgccactacgcccggctaattttttgtatttttagtagagacggggtttcaccttgttagccaggatggtctcgatctcctgacctcgtgatccgcccgcctcggcctcccaaagtgctgggattacaggcgtgagccaccgcgcccggccgaaagtggtggctttttactttttatgtaagtcccaattttaaagatcagggcctctctaattagatgtatttctgtggctttgctctctccctgcctgatattgtggtggcatccttcagaagagaatttttgggggtatttt

SEQ ID NO: 16661 - DNA, 1137 bp, Homo sapiens
tttcatgtctgtgccctaactaaaattgtaagcaccctaagattgtgttataaatctctgaatttttccctatactgccaccctagaacattaaagaccgcttgatacccaggaagttcttaatggccatttgattactcaaatgttaacatttgtttcagctaaatttattaaactgtttgattgtctcatactgtgaaaatacctggatttaataaaaattattttcaatttatatttctttagactactatgctgccagaaaaacacatagttctctgggagagtagataaaggaagagagggactaaagtctagtaacctaatataaaggttgcaaaagacttgatgtatttttctatatatgaggctgagtgggtagtggaaattgaatatagagcctagaattttacctcttcaagagatggatttgttacttatattcctttggtttaggagttgtggtttttgatccttttcttcagaaaaagttagaatgtctgaaaagcctggacctctttaactgtgaggttaccaacctgaatgactaccgagagagtgtcttcaagctcctgccccagcttacctacttggatggctatgaccgagaggaccaggaagcacctgactcagatgccgaggtggatggtgtggatgaagaggaggaggacgaaggtgagtaggctcagcatctggtgaacctgatgtctgcctttcaaagcctctgataaaagctattggatgttggccgggcgcagtggcacacaaccgtaatcccagcactttgggtggccgaggcagggggcattgcttgagcccaggagtttgagactagcctgggcaacatggcaataccttgtttctacagaaaatagaaaaaaaaaaaattagccaggtgtggtggcgcacacctggagtcttagctactcagaagactggaggccgaggtgggaggatcacttgaacctaggagtttgaggctacagtgagccatgattgttccccactgcactccgtctcagaagacagacagggtgtctcaaaaaaaaaagctactagatgttcttactattgaggaaaatagtgtgtgtttgtgtgcgtgcgcacgcgtgtattttttgaatgtaggcattccat

SEQ ID NO: 16662 - DNA, 1413 bp, Homo sapiens
tgtaaaaagaaacatttggaagacaacaccttaaaatcgaggaaactggattaacttttcctgggtgagttgaggtgctgctgtgcattttgcttttcttggttctgtggtcaccacttatacttgctattagtcacctatattaatctgatcaagtttacattgttttatctcctaactgtcaaaaactttgttgttgttgcctccattggcaataatctaagcaaaatgcctttccactgtcctaaagtcaatttttgttactgtacagaggaggaagaaggtgggaaaggtgaaaagaggaagagagaaacagatgatgaaggagaagatgattaagaccccagatgacctgcagaaacagaactgttcagtattggttggactgctcatggattttgtagctgtttaaaaaaaaaaaaaaggtagctgtgatacaaaccccaggacacccacccacccaaagagccaaagaatagttcctgtgacattccgccttccttccatgtagtccctcttggtaatctaccaccaagcttgtggacttcaccccaacaaaattgtaagcgttgttaggtttttgtgtaagattcttgctgtagcgtggatagctgtgattggtgagtcaaccgtctgtggctaccagttacactgagattgtaacagcatttttactttctgtacaacaaaaaagctttgtaaataaaatcttaacattttgggtctgttttttcatgctttgctttttaattattattattattttttttacattaggacattttatgtgacaactgccaaaaaagtatttttaagaatttaagcgaaataaacagttactctttggtaaagcctagttgtatgcttacatttttaaattatactctcattgtaagctcatgttaaaacaccaaagaactggtttatttggcatttttatattagtagttgttgaggggaattgcacaagtgtgtaggatctttgagcatttagatcaaatcctcattgataactgggagtaaatgaagcatactttaaaaaataacgttcaaaatggaatactctggggccctgaaaaccagtaaaatgttaggttcaagtattatgtgaattaagggaaagaagatagtgtaaagcaaaaggccttcaccagaatcccaagagatctgaattctagttctggctctgccactgattttctgtgtgaccttgtgttgactctgggtcaccacccagtctggaaaattgaaggggtgtgaccaaatggcttctgaagtcacttgtagcactgatgttctgtgacccttgctgacaggaaggtctgaagagaaaaatgggctttccactagtctgaagcatgtagggtttgactgatgggtgaacacagtatggtttgttgccaagacaggcgt

SEQ ID NO: 16663 - DNA, 1083 bp, Homo sapiens
ttgccttttctgttcctcttccttggaggtccttaaggtctctgtcagtctatgttgtttttaaagatggtgatgtcggctgggcgcagtgactcatgcctgtaatcccagcactttgggaggccaaggcgtttggatcacctgaggtcaggagttcaagaccagcctggccaatgtggcgaaaccttgtctttactaaaaataacaaaaattagccgggtgtcgtggtgggtgcctgtaatcccagctacttgggaggctgaggcaggagaatggcttgaacccgggaggcattggttgtagtgagccgagatcacaccttctgcactccagcctgggtgaaagagcgaaactctgtctctaaataaataaataaataaagatggtgatgtcatagtggttgctccagaattttttcctttttttgagaatctacgacagtcactgaaagatgtcctaatgtgtgttgtaggagtgtggggctgattgtgctaagttccagaagagtgagctagaattcaagtttaatcggaaagccttggagaggccatacacctcgaagcattcctgggggaagacgtacggggagcacaaacgacatctggagttcagccatgaccagtacagggagctgcagaggtacgccgaggaggttgggatcttcttcactgcctctggcatggatgaggtgagtcctctgctgctctgtcatttgtcactttagcagaccaagggtcagcaggcagcctggtgacttccggcttagggccacctccagcccttgctcatcctttctgttcccagctactggagaggctagcaggcgccaaagcccagtgagaatctgtgggaaggatgccattgttttaaaaacacattgtctctggccgggcttgatggctcacacctgtaatcccggcactttgggagactgagggggatggatcacctgaggtcaggagttcgagaccagcctggccaacatggtgaaaccccatctctactaaaaatacaaaaattagctgggcatggtggtgcgtgcctgtaatcccagttacttgggaggctgaggcaggagaatca

SEQ ID NO: 16664 - DNA, 1597 bp, Homo sapiens
ttgaggcatggaaaaaaaaaaaaaaagcggcacaggctcattttagtcccacccttctgtgtccagatttcctgttcccccatcacagaatttcacaatggccctgaaaaaccatgcagcaggagcattttatgcagagagataaggttctctaggttggtttcagttgaacacagtgactgattcattggagttttcacattgagatatagtgacctccttaagtagctcctgtatgaagtaaacattggttattcataccattgtcgtcttgtgatgattgatggtgagatgtgtcctacccctctccttttgaataggcttcagtgtttacagggtgcttatgaaccccttcttatgtgatcatcccagcaggatgggctgtcatcctcctggaggcctcgtctttggggtgggcatcttgtagctgctaagtgatctgactcccagttagaggttctttccttgccctcttttaggtgatcagatcactttcctgtgtcatctgaaaacagtttgttttcttattcgatgagtcttgaattccaagacgaaattttatttcagacaccttggtctgtaggagactttcccaatggagatgtcctgatttagggtggaagaagtggagtctccatggggtcagtgatttttgggcagagctgttggttttgtctcctctcccctccccctcccctcccctccccttccttttccttcccttctcttttcttttcttttctttccaacagtatctcactttgttgccagactggagtgcagtagcgtgatcatggctcactgctgccttgacctcccagactcaagcatcctccaacctcagtctctcaagtagctggaactacagacttgcaccaccacacctagctaatttttaaacaaaatttttagtagagacagggccccccatgttgcccaggctggtctcaaattcctgggctcaagtgatcctcccaccttggcttcccaaagtgatgggattacgggtgtgagccaccacatctagcctcagtcttcattttgttcctggaaggaacacttagactttgatttaaatcatgttcccgcttgacctgcccacgtgctagggaatgagagaatgtgagactgtttgcccttccatgtccttcttaaatgctcagagactgagctttgtagttaatgttggttttgttgcccaggagcaaagccatgcctttgctttcagtgaatgtaactctagcattttttcccaggaataaggaaattgtgaaatatctgctaaaccaaggggccgatgtcactcttcgtgcaaaaaatggatacacggcctttgacctggtgatgctgctgaatgatcccggtaggtaatttcaagaaaagggttgtaaatctacccagcgtttcttggactgggagtcaagacaggcacctcctctgtgacttgtgttttaagcacttgcttattcgtgggggaaagtcactctcaagtgtcaggagcttactgcatgatcttaggcaagttccttccctccccagtgaagcgctggacttggaccaggtggccccggggacttcctccagcaccaacctccta

SEQ ID NO: 16665 - DNA, 1217 bp, Homo sapiens
aggattcatggcttcaagatgagcagtatcttgttgctcctgtattatacgagaaaagttagtttatccattgattggcttttattttggtcattttccaaaaaaggattttggaagcttgaaataatagcaaattcagtaagaccaaatctactgaccacaaaagataagaatcagtaagtcaaaaagggaaagaaaaagagaacaattatccgtaagtttagctgaggaaagctttagaagttgaacacaatacttagctctgagttttctggtaaccaaggcaagtaaggaagactgataatttgcatagatctcattgcctatcgagaattcatgaggagactgccaccttccttaataaagtggagccccaaatgccaagattgtcatacagggagaatctccaagtggtaaggggttattgctggatctggcaataatctgattcttgttctgaggcttcccctttaacacgtattgagggttcaatttagtgctgctgcctccatctttcttctccagtttaagtctctgatccaagtatgaacacattagtctttccctaatgccaatggaacagctgatgtaaggctaggacatttaaatcaagctttgctaaaagctggaggataatgaatagagagcaacatgaaactatttagtctggcttacaaagacatttttctcatgcccttatcttttggtgtgtctccatttgatacacttcatcagagtactgctaccaaaggcagagccagacatttaccttcaaacaggtgcaagtcagtaagatccagagtgtctttgcttgggtttcttgtttgaagaactgcttcatttctgagtaatggacgttcggaatgattactttaggagagaccacacttatctgagagtgtggccctactgtactggtctcacagtaatcccagtattcatggaaaagataggcacgtacattagcatgagggcattctgtggttagaagcattctgatttcattgggaaaaacaagcttctctctgttcttgagcagaagcttttatagaagtctttgtacatgggccattgaaaaataaagtgaacaattcgggtttatcactcatgatttgtaaggattcacttttccttttttctgcagttgctgtactacttcaggtctgttccagtgtttccttgttctcaccaccaagactgaacctccttatttttgt

SEQ ID NO: 16666 - DNA, 2104 bp, Homo sapiens
tgtttaataataatctctaattctgtgatcaggtactttttttgtgggggttttttttttgtttttttttttttgttgttgtttttgggccatttctaagcctaccagatctgctttatgaaatccaggggaccaatgcattttatcactaaaactatttttatataattttaagaatataccaaaagttgtctgatttaaagttgtaatacatgatttctcactttcatgtaaggttatccacttttgctgaagatattttttattgaatcaaagattgagttacaattatacttttcttacctaagtggataaaatgtacttttgatgaatcagggaatttttttaaagttggagtttagttctaaattgactttacgtattactgcagttaattccttttttggctagggatggtttgataaaccacaattggctgatattgaaaatgaaagaaacttaaaaggtgggatggatcatgattactgtcgataactgcagataaatttgattagagtaataattttgtcatttaaaaacacagttgtttatactgcccatcctaggatgctcaccttccaagattcaacgtggctaaaacatcttctggtaaattgtgcgtccatattcattttgtcagtagccaggagaaatggggatgggggaaatacgacttagtgaggcatagacatccctggtccatcctttctgtctccagctgtttcttggaacctgctctcctgcttgctggtccctgacgcagagaccgttgcctcccccacagccgtttgactgaaggctgctctggagacctagagtaaaacggctgatggaagttgtgggacccacttccatttccttcagtcattagaggtggaagggaggggtctccaagtttggagattgagcagatgaggcttgggatgcccctgctttgacttcagccatggatgaggagtgggatggcagcaaggtggctcctgtggcagtggagttgtgccagaaacagtggccagttgtatcgcctataagacagggtaaggtctgaagagctgagcctgtaattctgctgtaataatgatagtgctcaagaagtgccttgagttggtgtacagtgccatggccatcaagaatcccagatttcaggttttattacaaaatgtaagtggtcacttggcgattttgtagtacatgcatgagttaccttttttctctatgtctgagaactgtcagattaaaacaagatggcaaagagatcgttagagtgcacaacaaaatcactatcccattagacacatcatcaaaagcttatttttattcttgcactggaagaatcgtaagtcaactgtttcttgaccatggcagtgttctggctccaaatggtagtgattccaaataatggttctgttaacactttggcagaaaatgccagctcagatattttgagatactaaggattatctttggacatgtactgcagcttcttgtctctgttttggattactggaatacccatgggccctctcaagagtgctggacttctaggacattaagatgattgtcagtacattaaacttttcaatcccattatgcaatcttgtttgtaaatgtaaacttctaaaaatatggttaataacattcaacctgtttattacaacttaaaaggaacttcagtgaatttgtttttattttttaacaagatttgtgaactgaatatcatgaaccatgttttgatacccctttttcacgttgtgccaacggaatagggtgtttgatatttcttcatatgttaaggagatgcttcaaaatgtcaattgctttaaacttaaattacctctcaagagaccaaggtacatttacctcattgtgtatataatgtttaatatttgtcagagcattctccaggtttgcagttttatttctataaagtatgggtattatgttgctcagttactcaaatggtactgtattgtttatatttgtaccccaaataacatcgtctgtactttctgttttctgtattgtatttgtgcaggattctttaggctttatcagtgtaatctctgccttttaagatatgtacagaaaatgtccatataaattt

SEQ ID NO: 16667 - DNA, 2190 bp, Homo sapiens
aaaattaatttcacccttaaaaacatttttaatattactagatttctattagacagcactatacaagaggaaatcactggacttgaagctttaaatgtttagcacacatctagcaaacgtctgtagccttctgtacaccaggcatatggtactgggtgagagtcttggggaataaaacagaatcagacattgcccatgaggagcccacagactagccagacggggtgggtgtctgtgtttttggtttggttgaagttgagttgaccactttatccgctgttgatttttgctttggctaggtgtctgcctgtatcccagtgttcaggctggctagacggcggaagaagatcctattttactgtcacttcccagatctgcttctcaccaagagagattcttttcttaaacgactatacagggccccaattgactggatagaggaatacaccacaggcatggcagactgcatcttagtcaacagccagttcacagctgctgtttttaaggaaacattcaagtccctgtctcacatagaccctgatgtcctctatccatctctaaatgtcaccagctttgactcagttgttcctgaaaagctggatgacctagtccccaaggggaaaaaattcctgctgctctccatcaacagatacgaaaggaagaaaaatctgactttggcactggaagccctagtacagctgcgtggaagattgacatcccaagattgggagagggttcatctgatcgtggcaggtggttatgacgagagagtcctggagaatgtggaacattatcaggaattgaagaaaatggtccaacagtccgaccttggccagtatgtgaccttcttgaggtctttctcagacaaacagaaaatctccctcctccacagctgcacgtgtgtgctttacacaccaagcaatgagcactttggcattgtccctctggaagccatgtacatgcagtgcccagtcattgctgttaattcgggtggacccttggagtccattgaccacagtgtcacagggtttctgtgtgagcctgacccggtgcacttctcagaagcaatagaaaagttcatccgtgaaccttccttaaaagccaccatgggcctggctggaagagccagagtgaaggaaaaattttcccctgaagcatttacagaacagctctaccgatatgttaccaaactgctggtataatcagattgtttttaagatctccattaatgtcatttttatggattgtagacccagttttgaaaccaaaaaagaaacctagaatctaatgcagaagagatcttttaaaaaataaacttgagtcttgaatgtgagccactttcctatataccacacctccctgtccacttttcagaaaaaccatgtcttttatgctataatcattccaaattttgccagtgttaagttacaaatgtggtgtcattccatgttcagcagagtattttaattatattttctcgggattattgctcttctgtctataaattttgaatgatactgtgccttaattggttttcatagtttaagtgtgtatcattatcaaagttgattaatttggcttcatagtataatgagagcagggctattgtagttcccagattcaatccaccgaagtgttcactgtcatctgttagggaatttttgtttgtcctgtctttgcctggatccatagcgagagtgctctgtattttttttaagataatttgtatttttgcacactgagatataataaaaggtgtttatcataaaaaagaaacagtattagattttggtctccataatctattttggtattgttacgaacatggatatgacaaccaaactggaaatcagaacactagggtaaagtggatattgaaatgaagcaagaatattgtcacacatgtgttgtgcatcttgtttagggtatatttcttaatgtcatctaggtcattagttttgttaatatttgtgttgtcttgaccaagctcctactaagtataggacacaaatgttttttatcttccaaggcctggctcaaatgccactgctgcaaagctttctttgaccctctggccacctcccaagccagaagttatcttccccctccatgtactctagccttttcatgacactgatattttcgtgacactgacttatagttcactgtttacctgttggtctaacagca

SEQ ID NO: 16668 - DNA, 1096 bp, Homo sapiens
caatatacaattaaattattttttgctatagtcacgttggtgtgctagcaaatactaggtcttattcagaaggttgtctttaaataaatcttaatttgaaaaaaaaagtttggtaatgggttcatttgcactgaaagagttttcttctttttatttgagaagacaacaaatacatgaaattagattaatgtctccaagacatcagatcatttcatttgtatatgttttggtatgttttactaaaagataaggactcatcctttttaaacacaattgcagtgccatcatcacaccttcaaaagtatccacaataataattttagaaatattttaaaatgatacaaataatgtttctggatgaaccttgagtgctgcccaccttacctctacttttcccctaggcaatctttagtattgcagatctaatagtatattattactaaaagtaagcatgctttctcttcttatttctagtggccctgttccagtattggttatgagtcttctgttcatcgcttctgtatttatgttgcacatttggggcaagtacactcgttcgtagattcagttacatccatctgtcatctgaagaaggaggaaaaaacccaacatttcttggaccaaaagtatagtgactatctgttcatgagagaaattttctgtaagcttgctgttttacaggggatttatcaataattgattttgaggaatcagtttttttctatggctaataaactttttaattcacttatactgagtctgatcgttgatgcctcactgctagggcccttagtctttctgcctttagatttgtaagtaaatatgtagcaaatatgtctggtgaatattgagttttttgttggattgacagttcctcacatgaccatgtggttattcaagtccaagattctgtaattgcccttggcttgttttcttctaggtatttctgtcctggcgattgtccttttgggtattctgtggttatcaaggagtgtgtctctgactccgtcagacagatctgtgtccaaaggaagctagtacttaggagaacaatcaaacaagaaaccagaaatctcggatgaaatgttggcgcagt

SEQ ID NO: 16669 - DNA, 1226 bp, Homo sapiens
cacaagtaaaatactacagaaattaatttctttcagcattgaagtgtttgctttcctctttatttcaactaagttgtaataatttctggtatcctggtaattgataactaagataatatctacagagtggatgccattaattctcttagcagtcacgtgcagaagggaagggtttgggccaacctagggttgtgctgtctctgtcgactagtctaggaaagcacccaggtgtcaggtattttggtcccttccaccacacctcagcaaatgtaaaacaagcccacagttaatggccctgtggcaaccctgccctggagaatctcaataagagcatttgaaatgaggaaagcaagatttcacatttaaatatcttgctttggcacacagttgcttttattgattaataagcaaataattataggggaactactattcatcgaatacacttattaaaatattatagcaccataaactatattggtataaaaatgttttattctttcttttgtagcaagcccaagatgtagcaagcagtccacctgagagctccttccagaaactagcacccagtgaatataggtatactctattgagggatcgagatgagctttaaaaacttgaaaaacagtttgtaagcctttcaacagcagcatcaacctacgtggtggaaatagtaaacctatattttcataattctatgtgtatttttattttgaataaacagaaagaaattttgggtttttaatttttttctccccgactcaaaatgcattgtcatttaatatagtagcctcttaaaaaaaaaaaacctgctaggatttaaaaataaaaatcagaggcctatctccactttaaatctgtcctgtaaaagttttataaatcaaatgaaaggtgacattgccagaaacttaccattaacttgcactactagggtagggaggacttagggatgtttcctgtgtcgtatgtgcttttctttctttcatatgatcaattctgttggtattttcagtatctcatttctcaaagctaaagagatatacattctggatacttgggaggggaataaattaaagttttcacactgtgtactgtgttttactgattggttggatattgcttatgaaaattccatagtggtatttttttggattcttaatgtgtaacttaaacatactttgaagtggaggagagtcataagacagaacatttggcaggaattgtcc

SEQ ID NO: 16670 - DNA, 1206 bp, Homo sapiens
cagcaggggccaaggcggtgcggaccgaatgatctgagcctccccagccaggccccctcctactcaccctcgcctcctccaggactgacgtcccgggggcggctccaggaggcgcaacccggaccgggccgcccctcctgccgggccggtacactatatccagccaggtcagaccccacggcgctgaagctagccgagcccctcaaaaggccgcccgaggctttcggccgcacatccttctgggaattgtagttcccatcctctgaagcaccgcgtacacccgccctccgcccttctatcccacaggaccccgcgcgcagaggactcagtggaccggggccgagagcccaatgggaaaggaagttctagatgacggacgacgtgcggggtgaggctagtgcaggactacatttcccgaagtgcaccgaggtgggcaggacccggaagtgagggtgtgagaggcctctctggaagttgtcccgggtgttcgccgctggagcccgggtcgagaggacgaggtgccgctgcctggagaatcctccgctgccgtcggctcccggagcccagccctttcctaacccaacccaacctagcccagtcccagccgccagcgcctgtccctgtcacggaccccagcgttaccatgcatcctgccgtcttcctatccttacccgacctcagatgctcccttctgctcctggtgagtgagggaatgacagacccatcgacaaacgcacgaacggcctccggccctcgcccagggggaacactgctactcctgcccctgcttttccgtcttttcctgcagtgttttggagtgcaccctcccccgctgccctcactctcgcctgtcggcttccaggcgcggagtccccgaggcctgagaaaccagtgtcgggggagaatgggagaattagccctgagggactgatacgtagtcacggcgtaggagcttccccttctccccgaagtccgggggtttcggtttcgagggctagtggacctggtggtagcttgaatcggaaaagaccaagcatagacctagcgttccttcccaccctctccatttgggaagagtgtgaggtcgacaggtgctggggttgtgtgactctcactgggtctagatccctgaagcggtgcccgggttggcagatccctctgttgtggcttgatgcgattggttgggaacccggaactggagactgg

SEQ ID NO: 16671 - DNA, 1309 bp, Homo sapiens
ggaagtgttcaggaacagtggctcacagacttacattactgcttcaacgtgtatatcactgggcatccccaagggcccagtgcactggctacagtgtattgaagaggccatagtacctcctgtttgaagttgtttattcacatctatcttatttgaagaaaaagactgatgtaatagatctttgtcattaaagctgaacttttaaagaagtttacgaaccttctttctttgcactgatatatgaaaataatgtttgggcgttcctattgatgtgtaggctggcttcccggactagcacacgatacatggtcataggcggttgtgcattgtgcatttcataggagctaaatatttacaaaatagagagtgatactgtggtaccttctgttatataccaagaaactggctaaatctttgtaattccatccaggcagacctccttctttgtgtttttgtgatcacaaaaacgatgaatgtaataattagtaaactaaaaaccaaggtaattaagtgaacacttcattgcctatctgtctatctcttaccgttagcacagaagtggcactgatctgaagaaaatgaaagcaacccccaaaatacctgtgagtaaaatatatcactgtttatgcctactgtcaatattctcacagcagctttccccttaaacaatgtgaaagagcccatcatcactggattttatttaaaccaggtgttcttagaatgctaggatgtgtgccgtttcattcttccctgccaacagaaatggcattttaagaagattgctcacttctgcaagttggtcagaaaatacaagtagaacgttgacgcctgagttagcaccttgctgcatgaacagtctggtctgtaaaccctacctgacagaatccttgatactgtaatacggctgttggtattcagcactgagaaagccattcagtgaagacgtggcggcaacttgtggccttgagaggctaacgtaggaactgtaaaatgtaaggaatcaccagaatgtatctatggtcttttggacaatttctaaatgaaaacagtgggcaatgattctgatctaaaatttaaacctgattaattttgaagtaatagtgggacgtgatatgtgtgtgtgtgtgtgtgtgtgtgtgtgtgtgtgtgtgtgataagtttgttgcattagatgccaggaaagtagtgagaggaaggctgctatgggacaggcttcctatctcatttaggttcatctcttgaaacaagaagccagtaccagctagctggcagaaatcccaacccagcagccgtagttttccttagattt

SEQ ID NO: 16672 - DNA, 1121 bp, Homo sapiens
attatgcaatgtttttattaagctgaaagtatttttctgtttctgatcctaacaaaagctaaataacatttaaaaagtacttattgaagcagtttccccaaggagtgtcagtttactagtgtagtgttagttagcatgtttacgtgaaattgatacatgtatataagtatacatctaaaatttgtatttttatttataggatttgctgtcacagatgcatcactacaatgctggggttaaacaaagtgctcttcttggacttaaagaccttttgtctcaatacccatttataattgatgcacacctttcaaacatattaagtgaagtgactgctgtgtttacagataaagatgctaatgtacgattagcagcagttcaacttcttcaattcctggcccccaaaatacgagctgaacaaatttctccattttttcctttggtaagtgcccatctctctagtgccatgactcacattactgaaggaattcaggaggactctttaaaagttttggacattctgctggaacagtacccagctctaattactggccgtagcagcatattgcttaagaattttgtagaacttatttctcatcagcagctgtccaaaggactgataaatagagacagatcccagtcctggatactttctgtaaatcctaatcggagactcacttctcagcaatggaggctgaaagtcttagtgagactcagtaaattccttcaggccttggcagatggatccagtaggttgagagaaagtgaaggacttcaggaacagaaagaaaatccccatgccactagcaactccatttttatcaactggaaggaacatgccaacgaccagcaacacatccaggtttatgaaaatgggggttcacagccaaatgtcagttcacagttcaggctacggtaagaaggatttcagttatgtccacacagttttgctgtattgaattataactgctaaccattgatgactgttggtgggaagacatgcagttgtctttcatagttttcatatagttactcatgatttgattttatttactgatgggaagagttatttgtatgttaatttatttatagcaaagcctttgagaaataaaacttgataatat

SEQ ID NO: 16673 - DNA, 1162 bp, Homo sapiens
gtcccttaatttgctctctgtcattcagtgttctttggcctcaatttcatagccctcaaataaatgattaagttcattccccaaaagccaattctatgtacaccatctgtctgtcacagaggtgaactttcttttagagcatttatttctttagcaaaggtgtttagttttctttgccagattgtttttaaacaacagtaactcctagcagtcacattctgcaaatatttttaaatgctttgaatctaaacagtttacctgctgtgtttatggcataataggaattagaagagaccctggatcttatctaaccccctatctgataaattttcttttcaaattgccagtaggtggttgacagtgggtgaattcatttgctgtttcagaacatttgaaaagtccttatttttcagcttgcgtttcattgttgaacgatctggtttatgttcttttaagatgctagtgatcaaagagaagatgtttatattggaaaccacatgccttgccctgaaaacctcaatggttactgcatccatggaaaatgtgaattcatctattctactcagaaggcttcttgtaggtaagtcagcgcttccagatcagtggtgagcattttttttcatcaatggttgttgctctatagaagggaatgaaatgtagactaaatattaccagaaagtagtgtttatttgcagtagacaagtaaaaaacaaatcagcagcatcatttggaaaaaaaaactggcaagtaatatgcagaaaacaaaaatcttttttttttttagggcttaacattttaaatataatactatacatttttaatacaaaaaataaatgtgccacattccaacactattttggtttttaggcaatctgtcacaaggtggctgagggactaaagactgtattaagaacagagaacatgtaactcaaataaaatatgtgctaaaatagatttctaaaaataaggggatggggacgaagaaccaggtgtgaattgagagatgaaaatggaaagggcgtaaatcctcaaatccctgattccagagaggttatgtaacttgttcaaggtcaacagcaagttagaaatagagctgggaaaaaactaagtctcagactttccgataccctacctgatgatcttagtgttttttgctgctctt

SEQ ID NO: 16674 - DNA, 1162 bp, Homo sapiens; identical to SEQ ID NO: 16673

SEQ ID NO: 16675 - DNA, 1831 bp, Homo sapiens
gtttcatgttatcagtcactgtgactagggagtttctaggctggaggaagggtgggatatctgtcagggatgcatacatagtagcatagacactggtaatgagttttgcttgtgccagtacctatattacatatctaatcctctcaacttccaggtttgtagaggaggtagcagtctgaattgtgttcatcttcatcttgtcttgcaacagataccatctcatttccctttcatgtaattgcttgcaatgtggctttatgtgcaaaatgtgtattactttggaaacatttgaaatatcctgaacaaaatcatcaaaacaatatttttctctctttctttttttaatgcaacagaaaatgccccaaaaacaatagaggacgtcgacagaagcaaaacctaggtcattttacttcagatacgtcatccagaatggtttaaactgatgacttttatatgtacactgaccatgtgatgtacatttattatgtctttttttaaagaatggaaatatttatttcagaggccttatttttggacatttttagtgtagtactgttggctcgtatttagaatattcagctacgacagttttggactgtttagtagtctttgttttatgtttttaaatacagaaattgctttcacaaatttgtaccacatggtaattctaagacttgttctttacccatggaatgtaatatttttgcaaagatggactacttcacaaatggttataaagtcatatccacttcttccacaatgaccacagcaaatgaccaagcatgaactaaaggtaaagatgtttacagattacttttcttacaaaaaaaatctagaagacactgtgtttaaatagatatttaaatgtttttgagatttagtaactgattttttagacactgcctatcgcatgaactgtaaagctgtgtgtattaggtgtaaaatatttataagatatatggactggggaatttgattattcctccctttgaaaaaatagtcctaataatttgaacaaatatgttagtaatgatggaacagatcaatgaaaagtagatatagatattgtgaaaataggctgtttaacaaacagattggaataaagcctattctaccagttaaactactttaatacacattcatttttaaagaaaatgtttgttttaacataaataaacaaatcgtatcagtgtttgtgaataaaatacaaaaatgattgttaatgattggtgctcttaaagtgagcttaaaatttatccaagacgtatatccaaatttgtcctgtagtaatagattaatattcatagattgttggtgtttaaagatctgaagtgtgagtagaatgtattcagctgtttaacatgtagtttagatattcaaaagtatgcatgtagaatttaaagaatatgttaaaaattattaattttaatattttgtttggaaaagcatgttataatataatgttttcactatatggcctctgttttggtgtgtttatttaccaaattttttgatattggtgtttcagtatatttaatatgtgaaattagtagaaaaagcagatttcggttcagaattcccctttactgttacaaatactgattgaaattatctaaaggcaaaagctttacccaacatttggagtttgcttttttgatcatttggcttctaggtttaatattagttacatggtggctttagtgaacttttttaaaaagctttactcttctacccacacagtcttatttgagtcccttagtcagtcagcaagcatgtttggaacagtccccggtgctttgcaagggttcagattgcagaacagtcacatatg

SEQ ID NO: 16676 - DNA, 1831 bp, Homo sapiens; identical to SEQ ID NO: 16675

SEQ ID NO: 16677 - DNA, 1177 bp, Homo sapiens
tgtccacatgtatggtgaagtcaccagatatattggcaggaactgggatagacagggacccaggtgctgaagtctttaatgaaggaaggatggtgcttacgagatagaagacagtgttgattggagtcgagggtgatctagctggatggtggccttaaagcagcattactttgtagatgtttatgtgactagaacagcgagatgggttgaggttctggtgtatttgtgtgtattattctttcctcacaccatcatatacctgttgtttatctcttctgcttctacttcttaattacttgtaagattttttaaaagtcaatagctttattcatagaaaataactaatgaataattgtgaccttgttgagtttaacggctcatttttcttatttctttgtggagactaatacgattggtttactgggcaggaggaactagacattagaacactgcaaaccaaaaatcgcaagctggcagaaatgttggatcagcggcaggccattgaagatgaacttcgtgagcacattgaaaaactggaacgacgacaggccactgatgatgcctcactattgattgtcaaccgatactggagtcaggtagctaacttgtttatttgttcagatttttatttgaccaatttagttctccttactgttctcttcatttccaaagttgtgtcctttgtttcttcataattgtacctacccttctccagtttgatgaaaacatccgtatcatccttaaacgttatgatctggagcagggcttgggagacctactcacagaacgaaaagcccttgttgtgcctgaaccagaaccagactctgatagcaatcaggagcgtaaagatgaccgagagagaggcaagtgttcgtgatggattctatcactgcatgctatctgggtttttaaagtagagctctgctttgaggctttccatttgagggaaaaaaaatggattttgttatttccagtttataattttggggggcttctttttttccccctgtgtcctcaggggaagggcaagagccagctttctctttccttgctactttggccagcagttccagtgaagagatggagtctcagctgcaggaacgtgtggagtcttcccgccgagccgtgtcccagattgtgactgtttatgataaattgcaagaaaaagtggagctct

SEQ ID NO: 16678 - DNA, 1190 bp, Homo sapiens
caacctaagttaaatcagttaaaagtgtttgagtaattaaatcagatagttgcttaggagaggcataactatttttgataccctgtcaatttttttctctgtcactgttattaaagagaacaagttagtgactggggtcctcaactatgtttttaaaataagcatcctgacaaatttcactcttctggtggctcatttgacacagaatataaaacacatatcaaaacaattctaggaggaaagaatacagtatatccaggtaccatctcctagttagtctaatttaattttggggtagattttacataactacagcaatgggtagataacttaataatctttataaaattgtctctcttgtgtaggacatcagtgagttcaaaattttacttcctgtctagcgtctggggcaatgctagattctgcttctgactttgctttgggccctcctaaggtggaattgcggagtgcagtggagcaagtcgttaaggaaactccagaatatcgctgcatgcagtcacagttctccgtcttgtataatgagagcctacagttgaaagcacacttggatgaggctcggaccctgcttcatggcaccagaggaacccaccagcaccaggttgagcttattgaggtaatagccttgccttgtcttttgtatgtaagctttcttgcctcctaaattttacaattttactccctcatgtgcaattaatctctcattcattcagctgtcattcatagagtggcagtaggtctttactctggtaggtactgggcatataaagatgagatgacaaaattcctgccctcacagatcttgtagtctgcagtaatgggagaatagtatccattagaatgcaatgtggtacaatggcagcatagccaaaagatgtgatacatgagaaaagagtgtctgatttgactgtggaagtttcctgattccacttaaaaaagtaaggtataaatattaaggataaattattggtagttgaaagtaggagaagaagaattcccggcatgagaacagcacatataaaggtatgagagagcatgagaaatagtttaatatggctagagcttacgtgtatgtgagaaaatagtgggtagaagctgcaaaattacttacatttcttaaacaaaaagcatataatggcaccagtagatgatttttttaaaagatagaaact

SEQ ID NO: 16679 - DNA, 1187 bp, Homo sapiens
attaaagaggttgccaatgtgtgacagaagtagagttagtaaactaacacattttgtacactttgttaaaattcatagaaaggctgtcttctgaaaaggacttttgaaagtgaaatgataacatcagctctaagtgacacatatacctatatccaccaggttggtggtggagaggagttggaaggaatgaaggattctagaccagaatgctcctatttagaagacactttcagatgtaaccactgttacatgtgtgtagtttattcaacactactgtgtccatagtggacaaacttaagtccttatttgaaacataagtctttctagatgtttagagatgcccaaaatatgttaaaagcagaggcagtaaatatagtagaggtagaaacatagtctttctagatgtttagaagtgcacaaagtctgttaaaagtagaggtagtaaataacacattttgtagctatccttttgatatgaaatattgtcttatggaaattgatcagttctctaagcagtacacattattatatttgtgctggttcataggaaaggaggagcacaaagtgcaaagggctttctaccagtgtgtttatgatgatgcccattgaccattgtcccttatgtctgcattttcatttactgtgctgtgtatatagtgtatataagtggacaaaagagtcctaatttacatctagtcgatgttaaagggttgccagtgtatgacaaaagtagagttagtaaactaatacattgagtacactttgtgttaaaattcatagggaagacgtcttaaaaacacagaagtgaaattgttaaaatcccccttaagcattacagatggcttaaagctgtctctggggttggtagaggtcggaaagggaagggttctgggccagaatgttcctatttagaagacactcaaattagagtctgtgttatgtatatgcaccatttattcagtgctattgtgtatataaaggaaaactttagtccaatttgaaacatctagtctttttaggtgtttgaaagtgcacaacatagattaaaagtaaagggctaaagtaacacccctctcagtatttgttttcattacttcctaggagtggttgcatttgggaatggaatttttaaacttgatgcttaggagcatatgctgactattcattgggtggcgatgggttaggga

SEQ ID NO: 16680 - DNA, 1121 bp, Homo sapiens
aagctgcttttctttcattggtatttttcctttaaacatttgttgaaatgttttaaatgttggcagggaaattcttgtgaaatttaatggctaatgatgccactaatcttaaaatgagggaaatttaatctcagttcaaaatgtcttcagagttactgtatcattaatgttaaatatccacatttacatcttataatttgttttgctatgtgggttttttatggaatatttacagtaatcatatgtattatagggattagaacatcagagttgttcttactacattgaaacatactgaaagatctattgtgatttaaaaacaacagctggctagtcatttgggacattttaaaatttttggtttgttaaaaccattttgctgattctactttcatttcactttaatgtgttgtccaaaagagctcctgatgagtaaagtataactttttctactttattatctaagattaatttttgtcaacttttgtatttcagggatccagagaagaactggaatagaaattgtgtgaaaggacttgtggcttctctgattagtgtgaaagacacttctgcaaccacagctttagaattagtggctggagaacgactctacaatgttgtagtagacacagaagtaagttgattttaattttaaaaaatttaaaatttggttagcttgaaaagtcatgtgctgctaaaagaattaaatactttgatgttttaaggctctcccctaaggtgacttatttatagggtaaaactatttggttcataactttttgataactattccaaaggaggtctcatgcttactcagaaactcagaatgcatattaccaatcttaaacttttgggatctctttgctgtataagttgaatttaatttgtaaaataatctgggaataaatgacctgtttttgatgtcagtcttcccatcaaggtaacattgaatttatttacatttcttcagttctcacttattatccttctgtagaatgctcatattctttcctgtaaatgctacgtagtcattgtcaaatttacttccttgttttttttttaatttattttatatatatatttaaaatgtacaagaagcctgggtatggtggctcacacct

SEQ ID NO: 16681 - DNA, 1918 bp, Homo sapiens
gagcacatgtggaagtttaaactacaaagttatttcttcatcttgacctgtttttttaaatgtaaacttttaaggacttgagataactaatttgtttatatacaaaaattaatgttactgtgttacttaacccatgttttctctttatataatcacttatcgcttacaaatgagcatatattcctcatctcttaactagtctaattatggtccaattattgtggttgtgattttatgcatatcatcaaatgtttttttcttatgcgggtcttttatatattagggatcctgagatacccgattctatatgtaaaagctaatatacaaaaaagcagattaaattacatgataaatgtagctgatcatcagtgtttaattgatttaattcctaaggcaatattaatgtgttttctaaagtcattcaggtaaggaagaattataaatcaggtaactggaccaacaaagggaacacatataaagctattatgcatgcatggagccgtttgaggctagttttttaaggccacaactccagacccctgatttagactgagataggaaacagatcttgaaagaatccttattttaatgatacatgaatatcatgttcctatacgcttaataattggtctctacgttttaatgatacatgaatatcatgttcctatacgcttaataattggtctctacgactttaatgtttttgtttttttaagctgtgtaagtatttttaaatcaaagcttaggaggtgtgttgcgtggtactatctgctgcaaatttatctgaagtttgttaatattttccaagatttttgtcagccttttcataatccagtcattaacaacctattggtaaacaagaatgtaggtgccagtagactaaaccaaatttatttttccctgagtctgatatatatatgtataaatataaataactcaatccatctgttccaccaaaataactcaaaagttggatgattatttgtcttccgctttccagttcaaagggatgaaattcctttagaacttgaaagatgacactagcgaacaccatgagaatactgtctacagtttttggtacgtcatcactagaacagtgaccccaaactgaatcatgaaaggtctgacatgatgtaatctgatcttccatgtgttattttggccccacatctcttcttgattttttagtcttatttccttagtgttattatcatacttcccctgatatatggccgtacttcctggccctgggcttgacatttcccacccttcattctccatacatatgagatgtcagaaaacatgcagtaattgatattatgggacacattggaaaggattgaatctggaattagttctgtccactgtggaggggagaggaaataatgctgtaaatgttgagttacagaaagtccaatgtcaaatatagtttttttgtttcctttcaaatgtattacagactgtgccaaaacagttaccaattcacactgtcaatattaaagtataccatagtatacaaattagtcagtacttgctgttaattttaatatttctgatttaacagttagttattaagtggtacttcattgctgttttagccaacgttttaaaaataatttgggagtttgactattttggcttacgtactcatttccttttctctgctaaaaatgttttgcttgtgtgcgttcctgatttttgtcttgtataatcttgatctttgaaaaccctcaaacatgtattaaattgttgtaactttttttcattagagggaagacattaaggggattggggacatttgtttcacacatctgcagtaatatgagttaactaatatttaacaagctctttctttacattagctgctgttctcatttgtatgtattgtcatatttaatcctcagagtaacctagtgag

SEQ ID NO: 16682 - DNA, 1166 bp, Homo sapiens
tgaaaaagaaaaaaatgattgttttagaagttaaagtcaatattgattttaaatataagtaatgaaggcatatttccaataactagtgatatggcatcgttgcattttacagtatcttcaaaaatacagaatttatagaataatttctcctcatttaatatttttcaaaatcaaagttatggtttcctcattttactaaaatcgtattctaattcttcattatagtaaatctatgagcaactccttacttcggttcctctgatttcaaggccatattttaaaaaatcaaaaggcactgtgaactattttgaagaaaacacaacattttaatacagattgaaaggacctcttctgaagctagaaacaatctatagttatacatcttcattaatactgtgttaccttttaaaatagtaattttttacattttcctgtgtaaacctaattgtggtagaaatttttaccaactctatactcaatcaagcaaaatttctgtatattccctgtggaatgtacctatgtgagtttcagaaattctcaaaatacgtgttcaaaaatttctgcttttgcatctttgggacacctcagaaaacttattaacaactgtgaatatgagaaatacagaagaaaataataagccctctatacataaatgcccagcacaattcattgttaaaaaacaaccaaacctcacactactgtatttcattatctgtactgaaagcaaatgctttgtgactattaaatgttgcacatcattcattcactgtatagtaatcattgactaaagccatttgtctgtgttttcttcttgtggttgtatatatcaggtaaaatattttccaaagagccatgtgtcatgtaatactgaaccactttgatattgagacattaatttgtacccttgttattatctactagtaataatgtaatactgtagaaatattgctctaattcttttcaaaattgttgcatcccccttagaatgtttctatttccataaggatttaggtatgctattatcccttcttataccctaagatgaagctgtttttgtgctctttgttcatcattggccctcattccaagcactttacgctgtctgtaatgggatctatttttgcactggaatatctgagaattgcaaaactagacaaaagtttcac

SEQ ID NO: 16683 - DNA, 2143 bp, Homo sapiens
ttttttcaagtattcttccctccttcacacacagttttctagttaatccatttatgtaattctgtatgctcctacttgacctaatttcaacatctggaaaaatagaactagaataaagaatgagcaagttgagtggtatttataaaggtccatcttaatcttttaacaggtatttgtgaactttgccaaggaccaaagtgatgatgaccacttaaaagacctctcattacacaaaaaccagacagtagtggacgttgcagttctcacatcttttctacaggatgagaaagtgaaagaaagctatgtatgaagaatcctgttcatacggggtggctgaaagtaaagaggaactagactttcctttgcaccatgtgaagtgttgtggagaaaagagccagaagttgatgtgggaagaagtaaactggatactgtactgatactattcaatgcaatgcaattcaatgcaatgaaaacaaaattccattacaggggcagtgcctttgtagcctatgtcttgtatggctctcaagtgaaagacttgaatttagttttttacctatacctatgtgaaactctattatggaacccaatggacatatgggtttgaactcacacttttttttttttttttgttcctgtgtattctcattggggttgcaacaataattcatcaagtaatcatggccagcgattattgatcaaaatcaaaaggtaatgcacatcctcattcactaagccatgccatgcccaggagactggtttcccggtgacacatccattgctggcaatgagtgtgccagagttattagtgccaagtttttcagaaagtttgaagcaccatggtgtgtcatgctcacttttgtgaaagctgctctgctcagagtctatcaacattgaatatcagttgacagaatggtgccatgcgtggctaacatcctgctttgattccctctgataagctgttctggtggcagtaacatgcaacaaaaatgtgggtgtctccaggcacgggaaacttggttccattgttatattgtcctatgcttcgagccatgggtctacagggtcatccttatgagactcttaaatatacttagatcctggtaagaggcaaagaatcaacagccaaactgctggggctgcaagctgctgaagccagggcatgggattaaagagattgtgcgttcaaacctagggaagcctgtgcccatttgtcctgactgtctgctaacatggtacactgcatctcaagatgtttatctgacacaagtgtattatttctggctttttgaattaatctagaaaatgaaaagatggagttgtattttgacaaaaatgtttgtactttttaatgttatttggaattttaagttctatcagtgacttctgaatccttagaatggcctctttgtagaaccctgtggtatagaggagtatggccactgccccactatttttattttcttatgtaagtttgcatatcagtcatgactagtgcctagaaagcaatgtgatggtcaggatctcatgacattatatttgagtttctttcagatcatttaggatactcttaatctcacttcatcaatcaaatattttttgagtgtatgctgtagctgaaagagtatgtacgtacgtataagactagagagatattaagtctcagtacacttcctgtgccatgttattcagctcactggtttacaaatataggttgtcttgtggttgtaggagcccactgtaacaatactgggcagcctttttttttttttttttaattgcaacaatgcaaaagccaagaaagtataagggtcacaagtctaaacaatgaattcttcaacagggaaaacagctagcttgaaaacttgctgaaaaacacaacttgtgtttatggcatttagtaccttcaaataattggctttgcagatattggataccccattaaatctgacagtctcaaatttttcatctcttcaatcactagtcaagaaaaatataaaaacaacaaatacttccatatggagcatttttcagagttttctaacccagtcttatttttctagtcagtaaacatttgtaaaaatactgtttcactaatacttactgttaactgtcttgagagaaaagaaaaatatgagagaac

SEQ ID NO: 16684 - DNA, 3005 bp, Homo sapiens
aatcctagacactgtaggaacatgggccagagaagtatgctctgtgtatctcagagatgatcctggataaagtgtgactttcaacattcataagaatttcagctccaggaattcaggggagaaggattctcagtccattttgctgtcttgctgtttgtgaccatgtgtatatttgtaacatcattcatgatctccttttaatggtaattgtctaagattatactctgtatgactttgttttctaggcttcgggagcaagttctgcttgaacctagccgacggttatggaaacccattgacattccaaaacaatatatacacataactatgtatttgtgtgtgtgggtgtgtgtatatatgtatatgtatgtgtgtatatatgtatatgtatatacacacacacacataaatcagccaaaatcagagaaaaggaacagggatttaataccttttttatgcttatttttgtcaaacatgtactcctttcatacgggtggcttttacaaggcaacttccgtcatttaatgttttcaactgtaattgtcttaatggaaatgttaaaattcatatctgattaacatttttaataacttagaggagattttaactttatttaaaaataggtaaaattattgtacctaattatgtctaaagtttattcaggggtaatttccctgatgtctgtataaaatcaagatcttattttactgatgcataagtcctagtgggtcaagactaggcatatgctttcagataaataaggaattactccaatcagttttccccaatcaaagaagccatgtcattttacttttagaaacatacaattgggcccaatatgggaattttcataatagttcatacatttgtcagccaacattaaaaggtaaccaactcctcaggtatttgtagtttaccctaacgcttctttaaaagaaagtaggtaaaaaaagaaaagggtagataatctttcgtatgcaaacttttcccttatattttgtctttctttcctttttgactttagtagcatcctccacacatttgtgtgcctgatttgaaaggaagctggggcacccagcgagtttagcctttaagtttctgtgtattgatttgcagattaagtaatgctgggaggaataaagaagggacagaaacatggaacataaagcattgaaaattccggtgcttgggcttcggcttcagagtaacgtcagtggcttagggttaaacggccattttattcaaatgcttgctatacaatctgaaaacacactggcaggtgctcctctccttggcaattcattgagtatccagagttctacgatgtttaactgaagaattggctaatgttttgatcctccagtgtgactgttgtttttgtttgggggtgggtttggggttttttgcttttttattcctgaagcttaccagatatgaatggctaatactccattgttctgcttgttgtaatggtgaatgctttaagaaaaaaaagtgtaatttgctaagaataattcatgatctgtttatgcgataactcctttttgttacaatttttttaaaaaaagctatttttgttaatgtaaagtaaatatttcagagcaaattttttaaacttattgcactaaatacaggctctgtacaaaaaaaaaaaaaaaaaaaaagcctcagcattttatcattccatggaaggagaatcttttgaaagaaagcattgcctcctaccagaactagacagtgaattagatcggtattatggaaatgcatacaagtaatgtcactagggcttaataagcagccgtttgctaatgtgcttcctttcaaagggttggacctttaaattgctgcaaaaggtaaattgtatttttttttaagtattggtgttctttactctagctaggctaaaatttgctaaatgccttggtttcttttaaaagttcatgtaatatttctgatttttcagaatatttgcaataagagtctggattttaaaaaacacatgcatacacacaattaagagctcatgtcttagcaagatctgggaaaccaacattgcgagagtagctattttgaaagaataattctccagaagttaacatctaatatctagtatcaccaaacagtatcgctgttctcttttattcatttgaaatgaatataattatataactaacaattgtccaaatagatgagagagcaaatcatgtgagaaaattcagaataccatctgtttcatagccgcacagattttggactttcacaaacattgggaactaaatttagaattggcaaaagtctagaagatgggtatcaaaacagaagacattccaggagctagcaattttaagaggtgtccctccaaagtgacctgatggaagtcctgaacttggaaattaggttctactcacttggacatccctgcatcatggactgttgctgctccctgttccatatgctcgcaatctcagctatttggaagctaccaggaatgctttctaattatcatttgcaactagaactgtaatcagaaagaaattttgtatttttgtataacttgattgtgtgccattttatataacaggtcctgttttacaaataaattttgttttactaacattgtgtttagaaattataatctatgtgtaaccatgtcatttgagttgcaaattaattgccaggctgttttccttaagtaaattcatgtgccgtgtagaaatatgcagatatgcattacacaggcacacacagagagatatttaatatgtggaatatcactctttcatgagctttattccttgattaatttgataaagcctcacagaggattttaagcaatatttaaatgtgttgaggttatgtttggatattcctgctgcctcttttcattcatttcaagtcattcttcagctagctatgggctgccttattgctattcgctcactgcttccatcttctgcccaagtgagaagaatagatgaagaacagaaatttctctgtgaaatgtg

SEQ ID NO: 16685 - DNA, 1211 bp, Homo sapiens
gaggagtatacatgattcttgtgttcatgttgtcatttgaaactcttcacataaaattttctaatattcatttggaaaacctctccactggagaggtttcatctctgagaggttttgtaataatagtgtaagttcagtaaatccagtccaaattctcatcacatgtattatttgatactaaattttcaattattacttcaaaataagagtctgaggatttcttcttactggcgttcttaaaggtctctaaaattaaagaacaagatgtggttttttgtttaagacgtttttagtttatttgttgttaagttaaactggagaaagtttgtcatcctcattttcaaactgaaaactaatcaaatatagtgcctatttagtctcaaaataaggtaactattaacttgattatactatataatattctcaattacatttgaatttaaaaatattgagctcttgattacaatttaatacattgtaaaaagtattaaatcctttgaaacatcttttgttgcttatttagtttttgtttctacaggtcaaacatgattgctttctataaaagaaatgcttgagaggttgactataatggatatgtcacaggtataaaacagttgttttctaaaaacatgcatttagtatggcattctcttttagcaactgaattcccaacgagttttattaagctggatatcgaaatgaaggagctgccttaagcactttagaaaaagaatttttttacaattcattttgactctcatggctgaccatgtcattatgtctttaaattttggtaaatatgtagataccaagcattaataactaatgcacacagaaatttaatatacagcaattctttgaatgttccaggtgtacgtaaactaactgaaagtattaaggacatgcctgtctatacatgggtttcattgatggtatctgtatcatcttgacaaatcgtgaactgctgctgtatggctagactttgcctatttactctgttatgcaaacagtaatttttccctatgttatgaagagagacatattggcttgctttaatttacttatttatgaaattaaagcatgaataatatgtataatttgaattttttgtgactgatccttggcagtataaatgataaaagtaaatgtaatggaatcttttaattaggctaagatatgctatttcataacttatgtagaatgatttttat

SEQ ID NO: 16686 - DNA, 1161 bp, Homo sapiens
aatcttggctcactgcagccttgatctctcaggttcaagtgatcctcctggctcagacccccaagtagctgggactacaggtacatgccaccacaccttggcaaatttttgtttgtattttttgtagagacaggttgcccaggctggtctcaaactcctgagctcaagtgatccacctgcctcagcctcccaaagcgctgggattacaggggtgagctatggtgcccaacctataaagagagtctttggctatatctttcctgctacatactttgtatttttgctgctttcctttattctcccaccactaccttctgcccatcaccctcattaaaaaatgttcttacagagcagattagcacaaaaatatggctcaagttcaatataagaatcactttagttttgctactagtatttggctttaaatattcaatgtttaagtgttgtttcttgatgtttgatgcttctttggttctaggaaggctggtttcggatagctgagaatatgggatttcagtgcctaaagattgagagtaaagatccccggctagacgggatagactcactctctggaactgaaatccccctgcactatatctgcaaactggccactcatgcgatccacttggtagtctttcatgagaggagtggcaactacctctggcacggccacttgagacttaaagaacacattgacaggaaatttgttcccttccgaaagttacagtttggtcgttatccaggagcttttgacaggtaagttcagagtcaaaacgtgaaatgtgaaatgagtgttgttcagtcataattcttgcagtgtttttacatttgagtattgaaatctaatatataatttatataagtatttacagtaacattattcttaatgactccaaattagaagccacccaaatgtccttcaacaataaaaggattggctgggcactgtggctcatgcatgtaatcccagcactttgggaggccgaggtgggcagatcacctgaggtcaggagttcgagaccagcctggccaacatggtgaaacctcgtctctacaaaaaaatacaaaaattatccatgcattgtggtgggtgcctgtaatcccagctactggggaggctgaggaaggagaattgcttgagccctggaggtggaggttgta

SEQ ID NO: 16687 - DNA, 1216 bp, Homo sapiens
ttgggtgcagtggctcacacctgtaataccagcagtttgagaagctaaggcaggtggatcacttgaggccaggagttcgagaccagcctggccaacatagtgaaaccccgtctcttctaaaaatacaaaaaaattagctgggcatggtggtgcacgcctatagtcccagctacacaggaggctgaggcaggagaatcacttgaacccgggaagcagagtctgcagtgagccaagatcgcggcattgcacttcagcctgggcgatagagcaagactctgtctcagaaaaaaaaaaaaaggaaagaaagaaatctctgcttccgtactatcaaaacttctaccctagaataccccctggcaccttctaacccaacctaatacagagattttgtagggacccattaacaagctcctatataattataagcagctctcacagtagggttgaaagagaatataaggaaaattagaagtactgtatttttgctattggaaatgaaatattgtttcatgcacctttgaaaaaaataacaggattttacagccttctgatgattcattcaaagcatggggaatagttcatatgtttgttaaatgaaaatcttatgtagctatttgtgtgtccctcccacttcataactacaaaaacatatatatgaatttctaaacaaagtgatattttaaagatgaattgattcaatgtgtacttaccagtttactgtgtggttttatcttcaggtacagatagtttgtggtactacttgaaaatacctttaatattattttcatcagaatttgtaatatataatccagtttgggatgatgaataaaatttttctaatctcttgagatatcttgtatttatttttgagacttgcagtagaaataacagacactaacattcacagacaatctgataaaatagtaatcttgccaccagtacagtatttctaaaattcaactatggggaccctagtagtctgcacacatatacctgggtatccaaaagttctcagagataaaacctgccagccaaagaccaccaggaacacacctgtaatcaaacaaagttaggtttattagcttgttgtagtaagaggaaacagccaccatggggaatcataacatatttcagggagaaggaactagaaaggtcttttataggctttgagctgatgtcaaaattgttaaaagtaactgtggtggagtggaaataa

SEQ ID NO: 16688 - DNA, 1113 bp, Homo sapiens
aaaatgagtccaaggcagaaccaaagccaacattaagttaccaagaaatttggattcagtggagaagctcagaaacttctaaaacttttgaagtattaagcgtttccttgacaaatggcattggaagacatatcatgctagaaaatgtttatctggtatttttccttctttgaagttatgaggtcaaggacatcatctccattatgtctgattgcctctctttagccaatgttccaactggcaaagtccaataagagaaatctactgatactggaattttttcccattaatggatatatagccccatcagctcgaggtatgtgattagtgcattccttaagatgttttgttctgacttctgccacaggttcctaatgtgagaggctagacccagatcatggaggtgcttcagtgtgatggctgtgatttccgagccccgtcttatgaagatctcaaggcacacattcaggatgtccacacggcatttctgcagccaactgatgttgctgaggacaatgtgaatgagctacgatgtgggtccgtgaatgccagtaatcagacagaggtggagttttcttctataaaggatgaatttgccattgcagaagatttatcaggtaaatctatactaaacttggcacggccgatgtattttaattgctcttgtttccttttagcctgtagccatggttcttaatatacgtggcttttgcagagtttcttgtgctttgctagccatttttgtggtttgggcatcatgtatctctccttgagtaccttaggttttatcctttcgaaagcttcctcatatatcctacctttcaatttggagaacaagatagttgcttggaaagttctagaaaaagtagtacaatttatgcaacttgtatttttatagctgtgtggctcatttatggagatgaggagaatacctaaagctatacactgcatctttatccatgagaaggtgcagtacgtatatcttcattgatgctttgtgaatactcttcaaggcctcatcttgagacttcaggccttttgcatgtgatgtttagtaatgaagaataattggaatggtactgatttgcatgattggatattttaattatcttt

SEQ ID NO: 16689 - DNA, 1793 bp, Homo sapiens
tctccaacttcaggggctccatgggcaactccatcatgagacccaattcttcagcttccaagttttcgcccatgtcttaccctcagatgaagccgaagtcacctcacaattctggtctagttaacttgacagagagatcccgttatggaatgactgacatgaccaattcttctgctgacctggaaactaacagcatgctaaatgactctagttctgatgaagagttaaatgaaatagacagtgagaatggtttaagtgctatggatcaccagacatcaggcctgtctgcagagcagctgatgggctcagatggcaacaaattattggagaccaaggggattccatttagaagattcatgaataggttccagtgccccttttgtcctttcctcaccatgcatcgacgtagcatctctcgtcacatagaaaacatccacttatctggaaagacagctgtctacaaatgtgacgaatgtccgtttacttgcaagagctcgttgaaacttggggctcacaaacagtgtcacacgggtacaacgtcagattgggatgctgtgaattcccagagtgaaagcatttcttcctcactgaatgaaggtgtggtgtcttatgagagctcaagcatcaatggtagaaagtcaggagtcatgttggatcccttgcagcagcaacagccaccgcagccaccaccaccgccgccgccaccaccaccatcacagccacagccactgcagcagccacagccaccacagctgcagccaccacatcaggtgccaccccagccacaaacacagccaccaccaacgcagcagccacagccacccacacaagccgcacctctgcacccatacaaatgcaccatgtgtaattactccaccacaactctgaaagggctaagagtccatcagcagcataaacattcattctgtgacaacttgccaaaattcgaggggcagccctcaagcctaccattggaaaatgagacagacagccacccctcttccagcaacactgtgaagaaaagtcagacctcaattcttgggttgtcctccaagaacaattttgtagctaaagcctctaggaagctcgccaatgactttcctctagatttgtcacccgtgaagaagagaaccaggattgacgagatagcaagcaaccttcagagcaaaattaaccaaaccaaacagcaggaagatgcagtgatcaatgttgaggatgatgaagaggaagaggaagacaacgaagtcgagatagaggttgagttggacagggaggaagaaccgacagaacccatcatagaggttcccacttccttttctgcccaacagatatgggtaagagataccagtgagccccagaaagagcccaacttcagaaacatcacccacgattacaatgccaccaatggggctgagattgagctcaccctttctgaagatgaagaggattattatggctcctcaacaaacttgaaagatcaccaagtttccaatactgctctgctgaatacccaaactcccatctatgggactgagcacaatagtgaaaacacagactttggtgactctggaaggctttactattgtaaacactgtgactttaacaacaaatctgcccggagtgttagcacccactaccaacgaatgcacccatacattaaattcagctttaggtacatcttggaccccaatgatcacagtgcagtgtacaggtgcctggaatgctacatcgattacaccaacttcgaagatctccagcagcattatggcgagcaccacccagaagccatgaat

SEQ ID NO: 16690 - DNA, 1124 bp, Homo sapiens
atacccctccatttataatatagaacttgatatagtcctcccaaaagagaagtctgtgatattgtgaattaatagaaaaatgttgcaaggagcttggcaatttccttttgtaccgatttttaaataaatttcaattggtttttctgctctaaactctagaataatatttgacaaacactatttttatcaagacatttctcatcaaggaaccacatgtacttattgtctgtcatatcaaagtcttcagcattgcatccaaagttcaccatttagtcatgctttctccattgcacagtggcttcactagcaaatactgacattcctaccatctctctacttactaccctaagcatttaatgtcttcctttgtacttctactcactttcagtaagctctgctgggaggttaggtggatttctttcctgtctgcttctctctactagtccatgactttcacttcctttaaggattgattttcactggccccaaactactcttattactcttcctggtgctgtattagtacttgcagatatgctatttttttctgtcccctaattttccaatatggacagttaggtaagtacttattaaatacttattcttttcatggaccagtggtatcttggaggcatcagttttcagttctgttaattgtactgggtcctcaaatacattttaactccactaaccaaattacacaggctgagtttatttcatttccatttaagaggcagatcaaaagacaatctgaagatgaaaccttagggaatgctctaacattaattctctgacacaattactctgccaagataaaaaaatcttccttgacaaagagcgttttaaatattgtcattgttccctgcatgatgagacctcctgtataggtgggaagctgaaggttgagacagggtataaacccttctgtccctcagaatgatatagaaagtatgatggagctggagaaatgaacatttctagtatggtcagctgttagcagagttgcttcttggagcaagtgcgcacaattattgatcttagagtgggctaatttgttctctgtgtctctgtcaatatacagtgtttggttgcagttaaattcagattcaaagatgatatagcga

SEQ ID NO: 16691 - DNA, 2959 bp, Homo sapiens
tgggagggctggcttgggctgagaagggagggacagaaaagagaagacagaacaaagctgctttttaggactgaacaatctattttcaaagcactggtacctgtgtgagtgagtatgtaaattaaagttatttaaatggttggaatatgtggctccttttccatcactacatcttttcttccggatcttcatcatggaagtttcatttgttgcggaatatggaagcacctcccaatggtacggtgcaccctgtggtggtcttggacagtatgtggaaacagaagctccatgacggtagaagacttctcattggggagcaactttttgacgcacaacttttggtgcgtttttctagttttaataccttaagctttttcaagacctaactgcagccgctttgggaaaaaaaaacaaaaaacaaaaaacagaaaacaaaaaaaaaaaaactgctttgcataaaacagtcacctgtttcctagtacctcaaacttaaccaagggaactctctgcatttgtcagtactacctgtcgtcgttgtggttaaatgtagagagaactgctgggcaagatggtgaatggagaaaaaaaaagagttttaaagaaaggaacacaaattgtgcttaaaatccccatgtgggttttatttcttaaaatactgtgatttttttaattattttagtaaaaaacaaaacaaaaaaaagaaacagactttaattattagataactgtttgtgaattgtcatcctttattccaggtaagctgtttattagtgttcaactataatttagaatttggtagattcatgtgagctaattttaaggtgattgtggagttttgtttgccacatgtttattttctatcaatttgagtgttacaaacacagcacaattcagtttttcatatgaattgtttttcgtgtgtgtgttgttattgttgttttaatttcggggcaagggagatttagttttttgtgaataggaatgtttttattttaaacatggaaataacaaagaagttaactttcttttttttttttttttttttttttaatttaactaaagaaccaaactttcggcacagctatgcagcttgtgggccagacgaggaggtcctcctcacccttttgttgcctgtcaaattcacgcattatccgtctcataaataatttctgttaggattggctggcttttgtgtgtgattttaaaatctgtgttttgtttctgctggcattgtgttttgttgggggttttcatttatttaggggacgaggggatgtactagaatcccatccctttcgtgagagtggacaagaaataacatatcctacaaggagcctggagaactactttctttctttctttttttttttttttttttttttttaaatctagctgccagctgctctgtcccccatatcagctttttcaggagggagcagcttagactaaatctaagcctacatttataatatgttctgattgtgaacaaagggtttcgttccaaaaaatagaaaagaacttttcttgaagcctaggttttagaagcccgtgtgtgtgtgtgcttggatgtgtgtgtgcgtgtatgagtgtgtgtgtgcatgtgtgcacgtgtgaatcctttggttttcatgtttttttttttttttttttacttggaagggttgtgggagggtgggagggaagaaagggaaggggaattgctgagatgacagtgtcccacacagcttcaaataaaatccatggaaagatgttgcatttgtggaataagtgcttacttgaaaagcatgttcttcttttattttcttactgttaagaatttttatttgtaggatgtttgttttaatttaatttttttaagggatgggggccatcatgtggaaaccagaaaatggggaaagtgtgaactatccagacaaagattcattttgtgtctatatttgtttttaattggcctcatttcaaatgtattaaacagttccatacctggattgggtgtttgtaatggttaccaaaaaacaaacaaaaaaagaaagaaaaaggaaaaaaaaaaagaaaataattgtgacatgcttttatcactactttatttttcaaataacatgtaaatattgtaatccattggattttgttttgctaacctgttaataaaaatatgggaccattatccttttaacaaggctagaatgtcatttttttctttttcaaacatatacctgatattttgtggccgcacattttggatgcattattataattctgttgactgtaatgacatagaatttacaacattttttgttgttgtttaatttatacagaggacatttttttcagagcttgagagaagaaaataaatagcaaaatgataacctattgactccagtaatcagtgtttcccaatacttcataagagatagggagaccctgagtccttgaagccaagggtttaaaaacaaaacaaaaacaaaaaaaaccacaagtaggttattcaagttgtttgcaacatacattttgtaatgaaatgtgagaaattaataaagaatttttttcacatgtgtctatgtgcatctgttgtaaatcatttacagatatgactacagatatgaaatctagaaatattatagcactacctttcaatgcttgtacacgagatattttaagtcattgaatctacacaggtatggaaagcaaaggtaaagctgaggtgaggttgaggttgagctgggattttcaaatgttaatatttctgcatcaggtattcatcaccaactgagggagttttagggaaggaatattttccatcaaaaatgtgaatcaaagtgatgtgtgaacttcagaaggaggaagcacccgtgattaaacatcatctgggaccctgaatccacaagcacagtcattttaagctaactgccaagtcacacccactgcacaggatctatttcaatgttgccgtccttgctta

SEQ ID NO: 16692 - DNA, 1168 bp, Homo sapiens
tacaacttaggtacataaagtttttttgggaaaatgatacggtttatatctatatatatatatatatatatctatatatctatatatatttcaaattttttattttatattaacttgatatgaagatggaaattgttgggtaaaattaattgtggttgatagttaagattaacatacgctgtcatgagctttgaaagagtaaccatgagtcagattgttaatattgatcatttattgtgtcattttacaaaattattttcaagttataggttgttattagtgctatgtttgtggcatcctgtaacggtacagtctaattagagatcaggcagtatgtagtattttattgtaattattttgtcttttaatgtgtttagcccaaagcagtgtccacaccagcaccagctacaactcagcagtcagctcctgccagcactacagcagttacttcctccaccaccacaactgtggctcaggctccaacccctgtccctgccttggcccccacttccacacctgcatccatcactccagcatcagcgacagcatcttctgaacctgcacctgctagtgcagctaaacaagagaagcctgcagaaaagccagcagagacaccagtggctactagcccaacagcaactgacaggtaggaactggattctaggacattctatctcaaaatccgtgtttaacaggaacttcatgcatttattttgattattgttttgatcaaaccgactatatctattacgttaagctttttttaaatgtttgactaaaacatatgctgcgtctgttttgatagcttactaaggagaatataagtacaaattttcataatcagatttctgtactctgttgatttgggcagggtggggggcagtggaaaggagaaagcaggtgaaagtcatttttttttttttgagtagaaacgttaggaaatacaaataaccaaaatgaataaggattacatcatgacattgccaccctgatcatcatttgtacttgatctgtattctttgtggtcattgtcatatatatcataagcatccttccatgttagtaaatctttcccgtagttatatagcattgtgtttggttctgacatttgttagctcttgtaacctgaacctatggactatttcagtttttcactgttgtatctgta

SEQ ID NO: 16693 - DNA, 2167 bp, Homo sapiens
tatatttttttcctttttcttccagttaaaggcattaggatttcctgaaggacttgtgatacaagcgtattttgcttgtgagaagaatgagaatttggctgccaattttcttctacagcagaactttgatgaagattgaaagggacttttttatatctcacacttcacaccagtgcattacactaacttgttcactggattgtctgggatgacttgggctcatatccacaatacttggtataaggtagtagattgttgggggtggggagggagggatctaggatacagggcagggataaatacagtgcatgtctgcttcaattagcagatgccgcaactccacacagtgtgtaaaatatatacaaccaaaaatcagcttttgcaggtctttatttcttctgtaaaacagtaggtaacttttcctaggtttcactctttttagtgtactagatccagaaacttagtgtaatgccctgctttatatttctttgacttaacattggtttcagaaagaatcttagctacctagaatttacagtctctgtttcatggcaacactggataatggctttgtgaaatttaaaaaatttttgtagcgactgtaaacagaaatgccaaattgatggttaattgttgctgcttcaaaaataagtataaaattaatatgtaaggaagcccattctttcatgttaaatacttggggtgggaggggagaaagggaaccttttcttaaaatgaaaataattactgctattttaaaatttcttgatcattgaatgtgagacccttctaacatgatttgagaagctgtacaagtataggcagagttattttcctgtttacattttttttttgttttggggaaaaaattggtaggtgtctaattactgtttacttcattgttatattgcagtaaaagttttaaaacaaccattgcatgtttgcttttgatgtatccctttgtgaaattagcacttttggggccaatggagaaatgcagcattcactctccctgtcttttccccttccctcagcagaaacgtgtttatcagcaagtcgtgagtcaaactgctgccttttaaaaaacccacaaaatgctgattcagttcaaaattaatgcaaatgtttcaaaactgggtttctgatatttgtaaatgtgtttctttattagataagagtgtattaccattaaagtcattagtataatattgctttcaaaaagaaatggtagacaaaactataatccagcatcttttattgcattggaaagactggcaaagtcttttggatgggttgggagatgtggctggaaagtactttggaaaatatacaatcaagatatctcatggcatattaaaagaaaaatcttaatagcagtgttggcttttatttggattttttcatctcagttttttctgtggaatctccttcattggcattgttatttaatcataaacggggcagatgtctacttgttcagtttttcaaatctgttttcctgagtataaataagagtatttaaagaaataatttggattgcttttgttttttgtttccttttttttaaccatctgatactaagaagatgaatttgcacagatttctctgcataatttctcaatatctttagcacagtatggtgatgatgacttttaagcatttacatcacgtactcataacctattatgaaaataaatgaaactggctgggtatggtggctcatgcctataatcccagcactttgggaggccgaggtgggcagatcacttgaggccaggagattgagaccagcctgaccgtcatggcgaaaccccgtctatactaaaaatacaaaaaatagccaggcatggtggcgcacgcctgtggtcccagctacttgggaggctgaggcatgagaattgcttgaacccgggaagtgaaggttgccgtgagctgagatcacaccactgccataaacatgacaggcttttggactttgtattacctgtatgttttataatggatcatgcataatttctcaggagaataaaatgagaattcatatatacgttcatctttcaagtcagagcaatgagttgggaaaagaggtggcatttctgatcggataatggaatactctcatttattttatgacattctctgtctactcagatcatagtgaaaactg

SEQ ID NO: 16694 - DNA, 1197 bp, Homo sapiens
tttcatatttgaaaaaaatctttatggtttgtcttttaaagtaaataaaaataaaaaagttttctgtggaggcctgtcccagcacccctcacatctgagtaacaaaagaaccttcctacagcagacaaccctaagaacgtagttccacagtgccctcctgaggattaaagggttcatttatgcttggtgtgtgttaaagatacatcacttctactagttacagccttaaagaggtcagaaccaaagtttctggcagattgttttaaagctaaatcagttcccctgactgaaggtgggaaaacaaactgaaataaaataatttaaaaattattcaaattcataaaactaagtgtaaagtaagatggtgttatggtaagtttgtagcgtttatattagaagttttaatattaaaactcaaaactgccctgttagaatctgaagttcttgagatgggtgcctgaaagattgaaattcatttggggctatcgcaaaatggaaaaagcatttgtgacacttgttgacaccttatatacttgtaatagtgatgtgggtgactaaacatcatcaaggggacagagctcactgctcactggcattttttttagagtgcttattaactattgattgtatctagtgtccagaggtgcgtttgtaccatgggtacatgtaataaatgaaataaaaaatggatgtttataagaggcttatggtagatcagcacaaggtattttctttggcttttgagagtccaccatgactggaaagcatagcatgtgtctctgcttaaaagaaaacaggtgcatcaataggatggaattttatgtggccaagaacatattcaaagcatatttaatgacatggaaaaatgctcatagtaatgttaagtggaaaaagcaggatataagactatcaacagtaccaattcaactgtgtacatttaagtgtatgtgtgctttgaaggagagagagagaaacaaaaggaaattaagagaaaaccctagaaggaactgccaaaatattcatactggttttctcagttttaattttcttttctttttttttgagatggattcttgcttgtcaccaaggctggagtgcagtggtgtgatctcggctcactgcaatctccacttcacaggttcaaacgattctcctgcctcagcctcctgagtagctgggattacaggcgcccaccac

SEQ ID NO: 16695 - DNA, 1905 bp, Homo sapiens
attgctgggaagattctgatttagggttgtcactgcagagcatttccatgtcaatgtaagtaggtacccaaagtcgtttaggtgcagcattcagtaacgtaaaggtaaagaaaaaaaaagtagccacctgtggctttttatccccagtcgtagtaggaataagattgcatggtttgggcacactaccaatcacaatttccaaatttcatttccaccactgagatgccttgactcaaatgaaacattagtataggtttaggtggtgtttgtgtgtttttggtgaaacattagtataggtgtaggtggtggttgtgtgcttaactgaccccctaaaaacaagaccaaatacttaagcacggaatgtatttctgtttatgatatggaattcaatacaccccttcagtggtataaagacattcctggatttctttaggatagggtcagagttggtttactatctggccttcagtttttaaaaggggcgattctttgatatagcaatagcgtcaattttttttttcttttacctttacaggtgagaaaccttaccactgtgactgggacggctgtggatggaaattcgcccgctcagatgaactgaccaggcactaccgtaaacacacggggcaccgcccgttccagtgccaaaaatgcgaccgagcattttccaggtcggaccacctcgccttacacatgaagaggcatttttaaatcccagacagtggatatgacccacactgccagaagagaattcagtattttttacttttcacactgtcttcccgatgagggaaggagcccagccagaaagcactacaatcatggtcaagttcccaactgagtcatcttgtgagtggataatcaggaaaaatgaggaatccaaaagacaaaaatcaaagaacagatggggtctgtgactggatcttctatcattccaattctaaatccgacttgaatattcctggacttacaaaatgccaagggggtgactggaagttgtggatatcagggtataaattatatccgtgagttgggggagggaagaccagaattcccttgaattgtgtattgatgcaatataagcataaaagatcaccttgtattctctttaccttctaaaagccattattatgatgttagaagaagaggaagaaattcaggtacagaaaacatgtttaaatagcctaaatgatggtgcttggtgagtcttggttctaaaggtaccaaacaaggaagccaaagttttcaaactgctgcatactttgacaaggaaaatctatatttgtcttccgatcaacatttatgacctaagtcaggtaatatacctggtttacttctttagcatttttatgcagacagtctgttatgcactgtggtttcagatgtgcaataatttgtacaatggtttattcccaagtatgccttaagcagaacaaatgtgtttttctatatagttccttgccttaataaatatgtaatataaatttaagcaaacgtctattttgtatatttgtaaactacaaagtaaaatgaacattttgtggagtttgtattttgcatactcaaggtgagaattaagttttaaataaacctataatattttatctgaataatgttttttattgttttgttttcctcctggaaaaatatgaacagtgtttggtttaaacacaccgggttaataaggcatgtaagaagcacgcacaaaaaagccaactttatgtcaacaaattaaaatacctttttttattaaaaaaaaactatttagttttaccataaatactatcaatatagggctgagaactcttgattattgtacgtttaaaaattacaagattaaaaacccagttcaggtttgctctttccaaatgtacgtaaagctacgtgaaagcagtttccttacct

SEQ ID NO: 16696 - DNA, 1157 bp, Homo sapiens
ttacttccaaatgctagttccagctaaaaacaagtactttttattagtttcttgtctttcaacattctgccatcaaaatatattcattttattaacttaccgattattgggaacctgcaaaaaaaaaaaaaaaaaaaaacacacatgctgtctgcagccactgtttggttatttttgatagtttaagagaattataaatcaagttgttctgtctactagagtcagaaattctgtgctagaatgggacttctaaaattaggtggtcctgtcactttctagagaaagacccaaattcataggtttaagtggcttgtctgacatacacatacagccagttagtaacagaattcagaatagaatagagttcttttttttctgtcagtccgttgttctacttctctttccttttcttcatggttgagcagcttttggcaaaatgtgttccatatagcagtagttccaagagatgttaatagatgtaagaaaaaaagtgtgtgtgtgttgggggtgggggattgcatggtcaattaaaatgaaggaatgctgagtttgtttccttactgtaggacttctaagagttttgaacatgctattacacattgtgaatttataaaaggggacaaacactgtttgaccttagactgcactccccttctttattcctcagagcatctcaaaggactacagggtcctttgagaaacatggcccttgatcaagtttacaactctttgagaagacatccctaatggaaatactgaatggcagatctattactgtggtaccatgtagtgtgtaataaatcttgaagtccagaaagcaagtatatttgctgtttagagctatacttaaggtatagagattcttttccacctgtggtgtgtaaaatcagtattgtgtttaattttgcaggtttttcaaggatcaactaatgtgcaaatacagtggtgatatattgatattacattttaataatgcttttgtatggcactttatagttttcagacaccttttgtaacagccctgtgagacagacaatattatccttattgtacagatgggggggctctggaggctctgaaaagtttttggtgatattcccctaagtttataccacaaaatgatggagccagaatttagttgcagaacttctgactcc

SEQ ID NO: 16697 - DNA, 1133 bp, Homo sapiens
gccaggctgtaggtggtggctcacatctgtaatcccagcactttggaaggctgaggtgggtggattgcttgagcccagggatttgagatcagcctaggcaacatggcaaaaccccatctctacaaaaaaaaaaaaaaaaaaaaaaaaattagctgggcacggtggtgtggctatagtctgagctactcaggaggctgatgtatgaggatcacctgagtccaggaggtcgaggctgcagtgagccaagatggcgccactgcactccagcctgggtgagagagtgagacactgtcccaaggaaaaaaaaaagtgttggggggtagttcttaagcgttgaagatttcctttttggaaagtatttaaaggtagaaatattaataatttttcctaaaacatctccctaagaagtcactgataattataattagtttaaatttattcttacactacttaagaaaaatttcatttagaaaaggctaccatgagatcttttgactatatggagtagactgcatacagatctctttatttctattatgaatattttagcgattataatcagctattccactgagtattagatttggtcactaagtaactcatgtttttctttagtcaatcattcattcattcactaaaacatttgttgagagttggctaaactctagattctgtgccaggcactgtacagggtgatggagatcactcataagaaggcctcttgctcttagccagatcatatgtaatactaaatttaaattttttgcattaaaaggctaaaaaatcatttgtttttgttaattatatactggttgatttatagatgtaattagcacatattcataagagacaaatatatacaatgagttactatacatatacaaagtgattttagctgtataaagtgatattgcaaaaaactacagctaatgtttcttgctgggtaattattagcataaatatcaggttcttagaggtctttaagagaatactttagagctaccaaaattagcagcagtgatgtaatatcaccctgaaataccaggagcagaggtgccccagagtgcttcacagctatgatcaggaaacttgacctgccccattgctacagcaacggcataaggactaggaag

SEQ ID NO: 16698 - DNA, 1197 bp, Homo sapiens
acttggagagaagccagatggaggaagagtgcttgaacatactgctctggaagggaatgaccttgaagcagggtccttcaactcaggattttttctgtttatttttattatgctgaggtttagaaactaatttctgattgggctttggactcagtacaagttttgacacatgttctgtaggtgtatttataggaccgtatattaactattgattgatagtagcaactacagaacccttgaattttattgcttaagaagagatccataaataagacacacacttagaaagatttttagtatcacattttaagatattgagcctttacttagctagaaaattcagttagatagggcatatcatttccctaatatttgagtttgtgagtatttaacttgttttgttggaagttgttgaggaggagctactgcttagattcttttgctttgttagtgttttgctgatgatgttaagttgtttttcttttactcttttttcagcattagcagcaatccttggagcagtgccattcctggggacatactgggcagcagtacctgcagttcttgacctgtggctgacacaagggttaggatgcaaggccattttactgttgatttttcatctcttgccaacatactttgtagatactgcaatctactctgacatatcagggtaagtaagccacagaatttcttattagtgaatcatccaggcatttccgtttttttttttttaaaggaggatttttttctcctgggggtatacaaaagaactggtagtaggaattttcagtgaaatagccttttgtgttcccacaaatgaaattttcattgaaaatagtattgtttacaaggcatgatattttggggtttttttttttttttttggttgttgttgccccagagttccagagcaacttttttttttttttttttttgagacaatatctctttcactcagactgctagagtgcagggtgcagtcatggctcatggcagccttgaaccttgaactcctaggctcaagcagtcctcctgccttgaacttcccaaggcactaggattacgggaatgaaccaccatgcccagccaatattttcttattacatatgtaatatttataatatatatgatgtcctgggttaaaaccaaattgtgaataattttctcttgatttagtgacatttaacctagaaa

SEQ ID NO: 16699 - DNA, 1152 bp, Homo sapiens
gattacaggtgtgagccactgcgcccagccaacttgtaaacatttttgcattatacactgaggaggagacattgatggttttgctgtgctcttttgggccattctctttcttgggagagaaagttcacgcccggtggtattttcaagaaaccaaggcagactttatggctttgagatctatgcctaattctggtcattctggggtgaagtagatggtttgagttcgggatggttttagacctttggtatacgttacaatagactctctttaatagaaccccattaaaggtaggcaggcatgtaccctatccatttgaccaggggcctctgagagcagggatgaacttaattttgagaaatcttgaagtttatctaatggacttaaatttttttttttttgcctgataagtaattctgtaactaatatatataccagattgttctgtcaaactacaaaactgagttttgtaaaaacaagtactaggtttttatttcactaaaaatgttaattcttaataatttgcagcatccctggctggctcatggagaattccagtattcctggttattgttttcctgatgtctgtgggtaccctctatgaaaaacagaatggaaaagagtcttctggtaagaaatagggcattctattaatactactctttgaagtattttggagagtagctttttaaaaaatgctatgatgaaacagctttgaatctatttaaaaacctatgatggtttctgagtggaaaataaattgtttaaaatattttaggttgttagaccatgatttgttttggtattattttattgaggcatgtataacttaaagttaaccataagccattgtattttaattttattaaaatattttatttttataaaataaaatatttttattttattttttagtgacaaggtcttgctctgtttccaggctggagtgcagtggcacaatcatagctcactgtaaccttgaactcctgggctcaggggttttccaaccttatcctcccaagtagcgagggctacaggtgcagtaatcacgtaaaaatggcctacaggccgtgcgcagtggctcacgtctgtaatcccagcactttgggaggctgaggcaagcggatcacgaggtcaggagttcgagaccagcc

SEQ ID NO: 16700 - DNA, 1143 bp, Homo sapiens
gcgccaagcctgcggagctctcccgggccggcgccgcgggtcccgcgcgcggtcgggccgagtggcggtggcggggagaccccgcggaccgcggcgctggcgctgcgcttcgacaagcccattaagcaggccttctacaacaccggggccgtgctgttcgtgtgcctgtgctgcggcgccgcggtgctggtctacttcatcctggaggccttcctgcggccgctgctctgggccgtgctatgcggcacttttctgcaccccttcaagagctcgctgacgcgcctgggccgccactggctgcagcgcctgcaccgcgcgcacacgcccatcgtcctggccgcgctgctcctgccgctctgcttcgtcgactacggcgtcgaggccctgggcgagcaggcgctgcgccgccgccgcctgctcctgctgctcggcgccggcggcccgctcctgtacggcctctactgcctcggcagctacttgggcgtgcaggtgctgctggtgcacgctgccacgctcatctgccgcgggctggactacttcagcagcctgtgggtgagtgagcggcagtccgcccccgtcccccgcccgtggtcccggcgctctggggtgcaatcctgcagctgttcctcccggtgcaggggcgacgaggggccacacctgtgctgcagtgaccgtccgtctccgctttccttctcacacctcaggaatttggcggacattcttccaaaaagggggcgggcgtgatttgaaacagcctccctgcttttcgccttgtttcaatcctaataggccctcttagggggacagtgccctggattgagaatcgttatttcgctttgcagagagaggcctcagagcatggcagtggggcttggttttacttctggttggagagggcgggggtgcttcggccaccctcagttctgcgcatctgaatgtcagagctggaagggaccttagagattctaggccaacttgccatcctgcagataggaaaggtgacctcttaccaggctagggctacttagggacaaagaggggtttgggtgtcttagatttcttacaagtcctaaaacaaagcttgcttcactggctggtgctgcctctcagttcaggtgattcctgtataatttgtgcaaggca

SEQ ID NO: 16701 - DNA, 1193 bp, Homo sapiens
gtcaaagtctatgtttatcattttactatgttcctgatgttctttgttatttaattaatgggagcaaataaaaccagaagagcttgggaagattgctcagcatatattcctgtcgtagaagttgagattgctagggtccagtttccctagtgtggcctggacgagtcatttccccttcattgacctcattttccccatctgaaaagagagggttggactaagtgatctccaaggtcctttccaactctaaaattctgcaatttgttaacatttcattttgtttaggttgaggacatacattcaaactaattttatcacaaggaaaactgcaatacccacttccttgacagagttactcctttcagaagctaaataaagtatataacttattagatgttatatagatacagggggactttgaatttcacatcttaaagcagttgagctactttgaatttaagcagtcgtactaatcttaaattgcatagcatttgttttgatcgaatttgctgctcaagtatgggaataatttttaatgtcttaatgattggtgctgctaacttgcgtgatttcagaagacataattgtgaatacacactgtcagaattgggggattggtttttaccctagacttcactcttaaaaagcaacgtgcaatcaagatcatttatggctcaaatgaaagcatataaggttttcttgaagttgtgccaaagcattctgtagagtaggatgagatggttgttgccctagtctgttggtagaaccagaaatcaatatgttgtcttttaggttaaagcttgtaccaaaatatttatttcccccatttcaagccctgagtcaaacatttttttctcttaataatagacctgaaatgttttattagtatttctgtgaaatcagttgattcttgtgccatttttgtatatgtaattgtaattttgcccatgttaggccctctaaaaaatgtttgacatcctttgagatattttattactaaaatctgatcttttttggctactgcaaaaatctattcagcaagaaggtatcagctgcataccttgcacagtggagctgactacctataaactctccctaaggcatttgtttacaggtgtattccattttagcagacgttctgatgctcagtgtatgtgctgcatacaaataaatgtgttctgaatcttttcatc

SEQ ID NO: 16702 - DNA, 1210 bp, Homo sapiens
cgaattctgtatttttagcagagatggggtttcaccatgttagtcaggctggtctcgaactcctgacctcaagtgatccaccaaccttggcctcccaaagtgctgggataacaggcgtgagtcactgcgcccagcctgttctgtggtctttctagtcaattaacagtaaggtcttgggaatctttttgtattactataatttggcatccctcattgctttaattgctgcataacgttccatagtaaggccgtgcccttcagaatcctgtgggcttacgagtcgcagtttacatgtatttccattggtttttctaaggggaaagagccctgcccaggcggaactctcctatctgaataaagcgaagtggctggaaatgtatggggtagacatgcacgttgtcagggtaagaactgtgtgcgtttaagtaatttggttttgctgttactgaaaaatgtatgaacattatgcaaacaaaataacttgtggtgaggaaactgtttttgcattttgcattctgctgtgtgacgacctgttagaaccctctaccgattgtcacttcgtttgtttgtagggaagagatggctgtgaatattctcttggactgaccccgacaggcatattaatctttgaaggagctaacaaaataggcttattcttttggtaatttagttttgtctaatattaaaaatgtcttttcctattttgtggtggaattctatgtgatggatgattattgaggggtatctgcaacacccagattcatcctcagagcacacggtgctgctgttgtgggtctgtggcagttgcgctgaaacttctggataatcacacttggatgaatgtttttattttttttttagtctaagctttaaaagtagaaaggaaactgctatttgatgtgtagatagttttactgcagattgtgcttttaaaatgctttctgtctgactaggcctaaaattaccaaaatggattttaaaaagagcaaattgacactcgtggtggtcgaggatgatgatcaggtaggcctggctcccatttcttcccccttgctgtgaaaatcctgtgttggggttgcaaacgcccactcgaggcccttgtgcttcctctttaagggacgtgagcaagagcacacgtttgtgttccggttagacagtgccaggacctgcaaacacctttggaagtgtgcagttgagcaccacgcattct

SEQ ID NO: 16703 - DNA, 1738 bp, Homo sapiens
gtgttgagtccaggagcaggctccctgaccccgtttctcaaaatgggctcttactgaggcttccacacttccacttacaagaagggctgtcccgcagggacttttgctccttcccacctcccccagaccgccagtttctccctctgtcatgtctccatgacactttgcccacccctctctgggagtgccccctccccgcatcatataggaactagggcttcacaggtgtacctggcctgtggcccagagttggcgctcagggaatatttacaaatgctgcaaaagacccaccggtacagggtgtggtaggcagcatttcctggagctacaggacttgacagcatttttttcttttccagagccagtacaagtttgtgtgtgaagcgattcttcgtgtgtatgaagaaggtttagtccaaatgctggatcctagttaagacaactgtgaaaaagttcattcctctttcccaagggcatcctccttgaaagaggaggacagacctctctggaagcagcaagaggaaccagtagctgtgggaaaggaatgggcacctctgaacccaggcactttaaacttctatagaaaagatatcgtgtacataggaactggtgtagataagcatgcaattatggcatcatttaggcctgtatttctatggaaagatacaaaaaggatctcagtttggggcctgtcctaatgccttcttccctaacatcaccacacacacccctgtcggcatcctggagcaattgagaccggacacccacagagctgttgtcctcccagcaacaagatggtgtggttatcttgggtcatttggatgttttgtttgtttctgtgtgtcagactgtaagggctgagctttctgtgcttctaggtggagctggaacaattcagattcacccgccctgatgctaaggaaaccctgacgtatgtactagatggcagggcactgggggtcaggctgaaggctgagcaacacctctctgccctccctccctttgtcccatctcccagcgacttccaatattcatgtttctgagaattgtgtccctcttcaggttccctcttggtgcctaacctggattagtaatgtgcattcaggtgaattttcagctgaggctctgagaactggtactctcagtgtgttctggtcatcttgtggcttagttgtagaagcaggtgtgtctcttgcctctgcttgcctcctactgcacactcagcacccaggactggaatcaccgactactgaatctcctacatgtattgctgctacttcaagctcctccacttgaaaccttatgattttcccaaggggagatgggacagtgtcatctaaatattccgaatgtttggccttctgagaaaagagcttctagtaattgaaccatgggaaacccagcttctggagggttggccgtggggctgtgtacatgtgtgtgcccaggggtgagtgtttctcaggattcctaacgattcaaattaccgttgagtatatataaagaatgagtctctgtatggaagaacaaatgtgtgcattcacccccagtcacaatggtctccattgcatttcaaaggagaggatcagactatctgaatataaacacaatctgatgttaatttattctaagaacaccatcattttgattgtcctaaagaattctgcctttgtgaataccgtgttaaatttttttaaatttgtgacaggattgtagcaaattattatttaaggaaaat

SEQ ID NO: 16704 - DNA, 1113 bp, Homo sapiens
ctagaggccaactgctgtgattctgctgtggatggaacgtacaatggaacatcctccccagagcctggtgcagtggttctggtgggcggcctaagcccccctgtccacgaggcgacccagccagaacccactgaaagaacagctagccggcaggcacctcctcacatcgagctcagtaatagcagccctgaccccatggcagaggcagaaagaacaaatggccattcccccagccagcctagagatgcgctgggggacagcctgcaggtgcctgtcagccccagctccacaaccagctcacggtgttcttcccgagatggagagttcactctcaccacactgaaaaaggaggccaagtttgagctgcgtgccttccatgaggacaagaagccctccaagctctttgaggatgacgagcatgagaaagaacaatactgcattagaaaagtgaggccttcagaggagatgctggagctggaaaaggagaggagagagctcatccgcagccaggccgtcaagaagaatcctggcattgcagcaaaatggtggaatcccccgcaggaaaaaaccatcgaggagcagctggacgaggaacatctggagtcgcacaaaaagtacaaggagcgcaaagagagaagggcacagcaggaacagttgctgctgcagaagcagttacagcagcagcagcagcagcccccatcgcagctctgcacagcccctgcctcttctcatgaacgcgcaagcatgattgacaaagcaaaggaggacattgtcacagagcagatagatttctctgctgctcgcaaacaatttcagctgatggagaattccaggcaagcggtggccaagggccagagtacacccaggctgttctccatcaagcctttctacaggcctctggggtcagtcaactcagacaagccactgactaatccgagaccaccttctgtcgggggacctccagaagacagtggtgcctcagccgccaagggacagaaatcccccggtgccctggagaccccatcggcagcaggaagccagggcaacacagcctctcaggggaaggaagggccctacagcgagccttctaaacgtgggcccttatctaaactg

SEQ ID NO: 16705 - DNA, 1113 bp, Homo sapiens; identical to SEQ ID NO: 16704

SEQ ID NO: 16706 - DNA, 1514 bp, Homo sapiens
ggtctttgaccacagttgattgaaccagagcacttattgcttaaagaataacagagttctagagctgggggttcttgggccatgctccgtgtgtggataaggaaagaaatactgtttctgggactctcccacagtcacaaagctgttttcactgtggcccctacatctcttaacttttgctattactcctatgctgccttccggattactgctgtctatcttcttgctccactcactgaagatcctattataatcccatgaaaatgtaaattacagtttacttgggagagccagattttctctgtgctcttgagttttttattcattcaagaaaccttgggccaccgctttgtacatagcaccgtgctaggctctgggatcccaaatggacccttttaactttctgaagatgggaccgtcccctggaggaaagtcattcctgcctaatccatcgagagaaagaggcttacgaaaaactttgcctctgatgctcagccccacccccaaatagcacacaagcttgttaaccccacctcttacaaaatgtttagattctgtaggtgttaaaagcctttctggaagtattgcattctgccgtgtttataggtgttcactttcctccagagctgattaactactgacatgacttggctttctcatccagaaattatggaaacagggtctgtcagtggcaggaggccgtgctgtgttttacttggatgacacaatgcagtttacttgcctcttcatacccatgcatgctgctcaccctagacaatgacatataagccgtatatagatcaatgtccacatatatatacacacacacatatatatatataaagtgtaacaaggaacactaaaacagtgttgattcttgtctctgaagacaaataattaaaccttttttttcccaactaaagaatggatttaattaaactatgtattgaaaaaaaagtagcctaagtgttagagatggtgaatatattccattttagttaaagaacaaatttcctgaattttaagcattcagtgagctgccaattttgattttgtgttgctctttacccaaattattttttctttgtttttctttttttgggggaggaggggaaaaaagcagcaatactgtgtttggaaattatactctgtatctggttttcctgtgtatgttaaccacttaaatgttattatcctgctttggttttagagtgattgtgaggcattcaatgcaagtatacagttattttctcattaaaatccaatgtgtgttgagtttttataaataatggctgcttgtttgaccgtgagggaggttggaagactgggccaaacagtggcacgccagcgtcctacttggccgctactgtgtgacagcttctggttcctcatgtttgcaacaaaggaatcaatccgagctgagggggcactgctgcaccaggctgttcccacagcccccttttcaatgctgtccccagccaccctggctagatgccagaagctgcaagtgcctc

SEQ ID NO: 16707 - DNA, 1514 bp, Homo sapiens; identical to SEQ ID NO: 16706

SEQ ID NO: 16708 - DNA, 1200 bp, Homo sapiens
tgggcaataggaaacccagtataagtgaataaatcactggagtgatgttccctttaaagattgaggcatatcaccaagttctgcttttaagaatttttaaatatgccaaaattcattggcttaagtacataatgtgacagctaactgaaaatcaatctttcctagaactagtcctatttatatcataaagcacatagaatttcttagacttgggcagttcatttgttgttaagtattgtgtaaaagaaaatttgtacttgagccttttgacttttctcttgatattttttctttgtttataacttaaatgaactgtatgttattcagggaagtttactttaaataagattatacttctttttccctccacccctattcttccttcattctatgctgaatacatatttatacatatgtatatatatacatatgtatatgtatatatataaatacatatttatacatattttatgtataaaacagtgctacagtgctacgtctaatgtcaattcaatattctcttaacaggtgggtgaattttctggagccaataaggaaaagcttgaagccaccattaatgaattagtctaatcatgttttctgaaaatataaccagccattggctatttaaaacttgtaatttttttaatttacaaaaatataaaatatgaagacataaacccagttgccatctgcgtgacaataaaacattaatgctaacactttttaaaaccgtctcatgtctgaatagctttcaaaataaatgtgaaatggtcatttaatgtattttcctatattctcaatcactttttagtaaccttgtaggccactgattattttaagattttaaaaattattattgctaccttaatgtattgctacaaaaatctcttgttgggggcaatgcaggtaataaagtagtatgttgttatttgttatcttttgacagagaaaatagcattctctgttttagcaggtgaatcctctatgctctccaaaagatcagcatgaccaaaattgatgtccactcatgaaggacttgttcgttttgtttgtttgttttgccacgaggatcggatcttgattctcctcgaagtatctgagaaagtctagttgtataggccagacataggttctgtcttgagtggtaaaagttgtgggaaattattacttatatcattcaaagaacattgtttcttg

SEQ ID NO: 16709 - DNA, 1622 bp, Homo sapiens
ctgtaaacagttttataagtagatctttttcattgcaaaattgccacattttcttatggcattaaaaattttacaaaaacataattttaatggctatattatattccatttaatggatgcaactcagtttatttaaccattcccatgttgttaactatttaggttgtttctaattttcattattataaagttgcagaaatttggtgtacataaaactgtctccatataattgattattaggatatattcccatgaaggattctttttttaaaaaaatgtgaaatgtcatcttgtacttacacctttcatgaaaagggatttcctgcttttgtactgcatgggtggcagttgtgaggaaaagccagtcaaatgacctttttacaaaagaaatgcagtggtcacttcagttgagagtgactttttaatacaacaagatcaactagaagaattcaactgtctcaagaatcaaggtaccccaatatatctcgcaattccaaactttgtttgagggactcgttatccagctcttggtagccacacctgcaatgtaaaatggaagaaaatgcaaagaaaccaaatgtgccgagtgaataaaggattgtcatatcaattagtgtgggtccatctgtagcaaatgggttgagtgtgtcagtatgtggttggttactgtgtattcgccaggaatcaccccgataggctgccaccctattaggtgatacctgtttaatatgttgtccaggtagactagtagttgcatcagtttgctgtaacaagtaaccagtgaggtaacacagtggtgaagcaggtcaggggaggtcaggaggatgtctgagagaaagaagtccgggagatgaatggctgtctaggaaggaggatgtcagtgcacggttagtgtttgagcagagggcagacttgtaaagtacctgtagtgaaaagaatgtggggacccgattagcagaaaggtgtttgcacgtactttatacaaaatacagaatactttatattggaagtgaaagaaatgaacgtggacttttacacatgtgcatatttttctggaggctatatggattatttgaaatgaaaagcatactaattggactttaataaatcattttcaatcagcgtttggtaatgtgtggttctggtcagtgctatttctcttgttcgagagtcttccagcttgcattgcgtgggtgtttttcccactatgacctcctttatttctctgtaacaagggctgcttaaccctgaggcggagcaaccgtgtgctcccccagcccacaactgctttttttcaatctgagtaataaatcttgccaatgtctgggaggtggtagtttatgttccttgagaggagacaatttattaagatggtactttagctcaacaggataaccgttagagtgggtttctttttgaaagactgattttacaaaaaattttgacaactttatgaaacactctcactagtttataaagtcacggtggtatttctacttataggtttaataaccaacaagataaaagttatatatatatcttccaatgatataaccattataacattttcagtatatcactaaggtgttggaaaaagataaaatatttattcaagtgaatgt

SEQ ID NO: 16710 - DNA, 1126 bp, Homo sapiens
cgtgtgctgtccacagtgcgacgtgctggcctatgagaaattcttccttctccttgctgaattcaactctgccatgaaccccatcatttactcctaccgcgacaaagaaatgagcgccacctttaggcagatcctctgctgccagcgcagtgagaaccccaccggccccacagaaggctcagaccgctcggcttcctccctcaaccacaccatcttggctggagttcacagcaatgaccactctgtggtttagaacggaaactgagatgaggaaccagccgtcctctcttggaggataaacagcctccccctacccaattgccagggcaaggtggggtgtgagagaggagaaaagtcaactcatgtacttaaacactaaccaatgacagtatttgttcctggaccccacaagacttgatatatattgaaaattagcttatgtgacaaccctcatcttgatccccatcccttctgaaagtaggaagttggagctcttgcaatggaattcaagaacagactctggagtgtccatttagactacactaactagacttttaaaagattttgtgtggtttggtgcaagtcagaataaattctggctagttgaatccacaacttcatttatatacaggcttcccttttttatttttaaaggatacgtttcacttaataaacacgtttatgcctatcagcatgtttgtgatggatgagactatggactgcttttaaactaccataattccattttttcccttacataggaaaactgtaagttggaattatcttttgtttagaaagcatgcatgtaatgtatgtatgcagtatgccttacttaaaaagattaaaaggatactaatgttaaatcttctaggaaatagaacctagacttcaaagccagtatttgtttaggtcatgaagcaaacaatgctctaatcacaatattaactgtttaattaaaatgttgtaacaagtataaaacagggaatgtaagtttattaccaaagtgatatgtattccaaaaaagtcatagaagatgaagcactataatattgttcccatatatttaaaatacccaagtacattctaattaccagtatatcagaggaaaattttcgtagtctttgta

SEQ ID NO: 16711 - DNA, 1138 bp, Homo sapiens
gccttcttttataaccgaagtggaaagcatcttgccacagaatggaacacagtcagcaagctggtgatgggacttggaatcactgtttgtatcttcatcatgttggccaacctattggtcatggtggcaatctatgtcaaccgccgcttccattttcctatttattacctaatggctaatctggctgctgcagacttctttgctgggttggcctacttctatctcatgttcaacacaggacccaatactcggagactgactgttagcacatggctccttcgtcagggcctcattgacaccagcctgacggcatctgtggccaacttactggctattgcaatcgagaggcacattacggttttccgcatgcagctccacacacggatgagcaaccggcgggtagtggtggtcattgtggtcatctggactatggccatcgttatgggtgctatacccagtgtgggctggaactgtatctgtgatattgaaaattgttccaacatggcacccctctacagtgactcttacttagtcttctgggccattttcaacttggtgacctttgtggtaatggtggttctctatgctcacatctttggctatgttcgccagaggactatgagaatgtctcggcatagttctggaccccggcggaatcgggataccatgatgagtcttctgaagactgtggtcattgtgcttggtaagttctgtcttgactgtaacttactttatagattctcagtgactaacataaaccacattattttatgtcagaggtaaccaacagtatgaatattcaccaggtaattcaccaggaattacaaggggatgaggcacctttatattaaatgtcagcttatgagtcttcctaaaattatagaattagcgttagggaaacatgggtcccagtggtgcagtataaatgatgatgatgtaaaagatgtcattgaagagtttggctatctaatattgaaaataccagaattaccagtcaaactcattcatttttcttacagcctaaattgtgaaacttttgcattgtggtttctgtattacatattttcagacagaaagtgcttttgtagaatatgaatatgcttccatatatagttatttttgttagtctattctgtaa

SEQ ID NO: 16712 - DNA, 1243 bp, Homo sapiens
gtgctaccacatttaattcagtggaaattatgtgaaatgtctttttcatctgttaatttgttcattctgaattcattttataaaatttgcagcctgttggaaagggctgttttttgttgttgttgttgtagtcttgctctgttgcccaggctggagtgcagtggcacgatgtcagctcactgcaacctctgcctccctggttcaggtgactctcccgcctcagcctcccgagtagctgggactacaggcgcgtgccaccatgcccggctaattttttgtatttttagtagagatggcgtttcaccatgttagtcagaatagcctcgaactcctgacctagtgatccacccacctcggcctcccaaagtgctgggattataggtgtgagccaccgcgcccggccggaaaggacttttatatcttgtacacagtaaatgcttgataggaagttttatcactttgtaaatgaatcgtattggctagttgaatgttggtatgaaaagcttgaagcttattgaaattattgttttggtttagagttaaacatgaagtttctggagagacagtggtatttcaagggggagctcttggcaaaacaccagatgggtaagtatgctaaatccattgaatggtaaacatctttaaatatatatatgcatttattagtctggtaaatagagcagtcatgaagttgatttctaccctcttaggaaatgttatctattggtggaagaagaaaacttacatggaaaaaagtctgatgtctttttttttttttttgagatggagcctcacttttgttgcctaggctggagtgcagtggagtaatctcggctcactgcaacctccgcctcctgggttcaagcgatagattctcctacctcagcttcccaggtaactgagattacaggcacctgccaccacgcctggctaatttttgtattttagtagagacggggtttcactatgttggtcaggctggtgtcaaactcctgacctcaggagatccacccacctcggcctcccaaagtgctgggattacaggcgtgagccactgtgcctggcaggctgacgtcttaaattgagtgtcctgggaaacaaactctgagttagatttctgtgtgggaaatttactggggagtgccctaggggtcactctggggggatgaggaggcaggatagggcctatgactgagggaggggcggaactgctaccatcgtttcagtggataccagcctcttg

SEQ ID NO: 16713 - DNA, 1132 bp, Homo sapiens
atggtttgcaagctaagaatggtttttacatttttaaatgtggaaaaaaaaatcaagaaacgaataatgtttcatgacacaaacattgtcgtgtccatgttttactggaacccagccacgctcattcattgtgtattgtctgttgctgcctttgtactgcagtggcagagtggagtagttgcagcagagaccaaatggcccataaagcctttttgtttttttacagaagtttgctgacccttgttttagatcatctgtgaataaatttcacctgttttgtacttgtgtatctttgacgaaaatggacctaagattttgttatctaattcattcagctttcattttgttttcaaataatggcttgtttttttctcaatatccatcaacagattgaacgttcttttaattttaaaagatgttgtcatcaggcacgtggttctgtgtcatgtatatatttgttttttttttatactgctcagagtctgatgaataacagtaaagaagaaatgcgcgaactggcagcgttgttttattctgtagtggtatcaacagtgtcggggaatgagttgaaatcaatgatagaacagcttataaagactacaaaagacaatcacgtatgttattttgttttcattcttttttgtgggagatagggttttataaaaggatctaacttatttttgacttttatgttctcatttgtaaaatgaacttacaaattccttgcttttatgaccataaagagtaaatgagataggtgatacattggttcagtcagctcacttaacagatacgggtgctgtgtctgataagcactgttttaggtgctaggagtacagtgattcataaatacatgagaatccctggtacaacaggatgctcagagcctgcagccgtaccaccgtgaacacacctaatctcatctgatcttggaaactaagcagggtcgggcctgatgagtactgaaagcgagaaatgttagctccttttttcttcctcatctactgctgccagtgaaaaaacaagttttacttcacatagtttgttggttaccttgtgtttggaggttttggcaattagaaataggatctgtttattgtcttttgttggcaataggaagacattatgtgtg

SEQ ID NO: 16714 - DNA, 2243 bp, Homo sapiens
agaatcaagagaattggttctaggaacctgggttcgttcatcattgttgtttatttttttaaaataaataaataaatatatatatagatgctctgcaacaaactctgtgacagtatccttcagtagagaaagtttcttacttgtgagtacactcttttagaacatttacgggtggcagcagctttgctttagagtttagaagataatagaaggaatgactattcatgtccaaagtgaatggttttgtgcagtgaacaacacatggcgaggtactaactgagaaactttttcatgctttatgcctacctcttgtagttgttgcagagcaaatataaattgtaataagatagctaggccttgcagaaacaaacagaaaaacttaaaaaaaaatgatataagagctggagtctagtatttatatgaatctgtgagagataatttttttggtctcactgcaatgaaccaaaagcggctgagtttggtttttaattgtagccatgtattgaaggcatctttttgaccaactcttgttggttctgtcttgaaccattgttaatcactgtgctgtaattagtatagctaaatcttttccttccttgctcctcccccagcccaccccgtcttcccttaacattttttcagggggggttgggagtggtttcattttagtgtgagtggatgttttgatagttgtaaggaaaaaatgcatttcagacacatttcacacatgagctattttcttacacagtatgtcttattgttaataagaatgtaatttcatgatacaagtatttaataccttttttaagtcagtaaatattctagccatcaataaattgcagtagagtattaagaggggacaggatgagtttactcttaaaattaatcagtatcaaactaagtctactgtgtgtgttttttttttttgttttttgtttttgtttgtttactattatagtaagtctagtcttatttaaattggatttttgtattcaagtttatatgacaaaatagactagatcagcgctggttgtaaatgcatgctgtacctcactgttttctccccatcatgccgctaaacttgctcgccaggttgtgcttaacttgtggtgaactggacttgattctgttttgttttgtttttttaaaaaaaaaaaacaaaaatgtaagggacagtgcataagccttttctttgttaagtagtggtgttttgctttttcttcaggattggatggcatgttgtccacaggaatgcctactgcagggctaacactggcaatatggcagctttaaattctgagttactacagtctccatgtcaaagcataatgtgtagcatatcagcaataactacatatttatagaaaacactttttcactttactgagccaattcatttaattgtcaaatgtctatatccatggtttaaatggcaacatatctataagtatgtatacacattatatttaagcttttctctgggccaaactgcttcatccttttttctttctttttttttttttttagccttatgatgaatttgtttgaagggcattttctttatgaacaaaggcttggatgcatattcctttctttctgtgaatgggtattattccctgaggaaagttgcacagtgaaaaccagtctggttgtgacccactacatgttttgtttttaatcactattacctgagttgaactttgctcaccatgtttgtacttgttggtctgtttaatgaagtttggttgatgccatcctttgcactgccgaagcgtaatcttgtgtattacttagctctctgctgatctcagtatggacagtgtaacaacaaaaccaaaatggctggacagacttcttgtgttttgtaaatataaactaggacagttctgtaggtttgttcagtgtgctagtggagtatttccttaatgtaaaacttcacttaacagagagattctttgtttagcaagcttggagtgatgataaaatggtaagaaataatataaatgttgaagaaagcatcacaacagaactataggagtctaaatttaataaatctttaaaaaaaaccagtgtctagaatatataccatgttttattatttaaaatcattgtcttaaatttttgttcaaaaaataaaaatttgaatacaatcaaaacgttagcaatagtgtattttttgttcttctgtatttttataagtagcatgttccaccattcacatcagaattattagaagagttctg

SEQ ID NO: 16715 - DNA, 3270 bp, Homo sapiens
agatagatatactcatgtatgtagttgtgggagtttttagttttttgtttttttacttatgaaataagttttgacctagacacaaggggtatatgaaggaggaaaaaaatttctttgcaaaatctcccaaaacttgcttttttttcccttccacacaggcactattataattttcagtgccatgttaaattggattatttcatttactttaagttaggaattactgtgtaatttattaattcatgattctcataacattcagcataagtgtagcaaagttgctaataacggaaggggatcatagtggtgttgaatgtaactttgaagtagggaatggccttttaagtctgagagagaacatttgaatccttttcagggatttgtgtaggggtgtgtttgtgtgtgtgtgtgaatgtgtgtgtgtgtagataagtgtatatacataaatacactcttctaaagttgtatatacatatgcacattacatacattttaatttattgacaaaattaaccaaattaagatttggagatgtgggatgttcttgttttaaaatagcatgtttgaaaccatcagtttgtgtctaaaattagctgtagcacatggatgttgtccatattaagctatttgctgtttgaattatagaggtctacagtatttgtgttggcatagtttttgtaaaaaaaagattaaaaaatatcaggatggtggaaaaactagatctgtgtatctctgttttggcatgcatttattcagtatcttctagcaatggtttttctctgttgatctaccgtagtatcctatttttaagtttattttatttttaaggagtattgtcatcacttttcaaggtgtcttgacttctacacaaagtatatatattcaggactttaaaaaatagcagtacacatttaacagtagcgaattacaccaaaatgatttactttgagatttgaataatttgcatagcagtaaaatgtgttttgtgtaacatacaaatagaaaaatgacccagtatcttaattgatacttactggagagtatcagaattacccagcagctcttacagaatgccataaattctttaagactaaatattgaaatcaattatttgaagtaatgtttctgatttactgttaaaagttgctgagctcagtttttggagatatcatttatgcctgcctgttcccttatgacagtgaggccttctttggctccacctagtatgataatcatgggttctgttttagttgatgagaagtggctcctatgaatgcctctgctcaatttctttttattttactttattttatttttaggggtctcgccaactcctgggctcaagtgattctcctgcttccacctccccacagtgctgggattacaggcatgagccaccacgcctggctctctgttcttttcagtgtctccgtgccatcagtcagcagtgcttacatgtttagcatattgtcatgcagtttctcttctgttcccacgagatatttttggacaaaaaattgacaaaagtacatgtgtttttccccacctatcccttagaaaacctaatgtgtactgctatttttaaaaccaaaaagagacagcgtgacgatgcgtaaagcatttttcttagcctttcctttgtcttgatctgttaatgagaacaaaactgccagactcaaaatactctactattgtgctgaaagaaatacaatttagattgcacaaaatttgaaaatataactcagctgtcttttaaaagagttgtgttgttatctacaagactattagcagtcttttttcagagcaaattttaacagctagttgtgagtggtttaaaatatagaaaattattaaaatcttagtttgaggggttttatagtgggagaaaaaacaggaccaaagtttatgtgccttcttcagtagtcttaattgaccttttcttcctatttgagactaaagtagtatcagtattctggttttcaggaaatatgtactatatagttttaaaagaatgttgtcccaccaactattcatccaagcaaagaattgtaactataaataaagtctcagttacacttttgcctttatcacataatattcattgtagagcattgtgcaggtccaagaatagagctgctcaaaatctttgtggtagtttccttagtttttgtaacctgaggcatatgttccagagaacagggatatttgtctggtccagtgaccttggtgatcatagtcataattgaaagatgcctatggcatgcttaaatcagcattgtcaactgatttgttgttgtattattttcacttcttggatctatgtagtagttgtaataacaaatatttaaatagctatttttttgatgccattaaaaaaatcatactctggccttttttcccccttactgttgtttcccagatcttttaaaaattcatcccatatccagaaagtaccagttataaagattgctgaccaagcaaagttttgcatcaaagtgtcacctcattgctctgaccaaagactgactgttgtggttttaactcctctctgtaaagcattttgcattttccccaagctcctttctgaaagaagaaccagtgcagagcggcctttactttcaatttctactgctgaatagactacttagagaaaatgtgagtttcagtgtgaacagaatggattaggatgacgagtttgatgggcattttcagtactgtatctaagaaaaaaaaaatagcacagctaggagcctctgacattgtctggtgttttacgtggtctgttcatcaaaattccccttttcagtttttaagaatgttcgtctaacagaagaaaatgctgtaaatatttgtaacaacattttttttaacaaggccaaaaaagaaaaaaaggtttttgggaacaaatgaacttataaagtggttttatataaaacatcaattgtcttgtatattttggataagcagcagtaccagctttcatttgtaacagtctgtggcattggaaaaaaaggagtctgtgattgttgaagtgaattatgttataaatgcaaagagaagataaaatattaaaaaacatattttctaaatgcgtagtgcatggttaattcaagcttctgtacactacagtatattccattttcgttcagtttgtatatttgctgactattacttgatatctctaatctcttttcctaacaaatatagcattgtagcatgccttttaataaatgtcatgacatctgtactctcttaaaatttttctgtgtt

SEQ ID NO: 16716 - DNA, 1019 bp, Homo sapiens
tccctctgatgttttcacagcccttctgttacagtggatgatctgaagaaccttttcatagaagctggatgttcagtgaaggcttttaaattctttcagtaagtctttgctttcaagaaatacattaaaattatttaatatggtatgcaaattttaaaggtagttcagtgaagtcttctggtggaggaaggagtttggaagcaaaattcattctaaatactttctgtatttcttataccattttcaggaaagatcgcaaaatggcgctcattcaattgggatctgtggaagaagcaattcaggccctcattgagcttcataaccatgaccttggagaaaatcaccacctcagagtttccttctcaaaatctacaatctgacttttctgtgaatttttctcctaaaactggaccataatttcagtaaaaccttcagacatagactgaagcagctcaagaccaattttgcctctttcacaaaaataactctgagtttgatattcaagtatattttaaaaatcaagggattttttttttttgtattccccctgcccccgccagtcaaaggtttcttttccctttttaccatggtttctacaaaaataaccttcaggaaaaagaaaatcaggaaaaaaattttttttcaataatcttattccctatattaaattagatttgaagaggattaacgttgttttagtttgggtccagatcagccttatacaacatttctaaactcatttgtacttttaaaaaatttaaacacagacttctaaaattacttgatgtaagtaatttaaatcacttatgaccaagttattaaccttatgaatcagaagtctgacccttgtaggaaattatattcacatataaagtacatcagatctttgccatatattgatggttattatgcataaacacattgagttgtgttggaagcagatttataaacctgcatgttttctttgaatgatttctttttttcactgtaagacactcctttaaataatgcctatcttt

SEQ ID NO: 16717 - DNA, 1726 bp, Homo sapiens
caatttatatttagttttcagttatggaggggaaactacagtcttcaagaatatcaattctagttatagattatgaacaaaaatacatttttgtttaatttgatattcacttggatatcgagctacatagcatctatactactggttctgaatgcaacccacagtattttttagtctggcaagttttacaaatcgtatttaaagttttgggacatatcctcagtcaaaaggatcaaatttctatcaacataattaggaagtttctgaagtaaatttatttagagatagtaaaggggaaaaatggtaactaaggaaagaggcctacagtaagtagatgtagaaattcaaacttacttaaatgcaaattatttgtatttctcatcttgcttactcttctgaaaaggaactcaagcataaatatttaaacgtttcacaaatttttattttacaaatcatatttaccagatcatagttgaaaaagttcaaattttagatgttttttaaaaaggtacagtgtgatttgtcttttttttgtaatgttgaattatgttagacttctaatgtttgtcttgatattacactggaattagacagcatttttaccatttatacattcatttcaataagagctttgaaaatgctttggcattgtttgtttgtgataagtagaattaggaagatatcagcaatatagattcctaacagtaattgtgtatactgtgttttagtgatttttatgtccatttattttctgtaattcttttataaatcccttagtgtacttccactagaaattaatttataattgtttatttatattggatgaagtaggaggtccatgtttagtattaacccactcagattaactttatctaactgaacttttatatctataacccattagattgttacaactttttaaacagcatttataatgaaataacttttgttttataaagcatttgttacaaaaaaaaaaaaacaccttgccaaaaatcattacgatttctatgcattgtgtaatattcagtgatgttgagattttgcatgttgttacaggtgctctttcatatgtgtgtttgtggtgttgatgtggaattgttaaccactgctgctatcacttattgtagttaaactgaaaaactgtgttaaaaggctgtgccagtcaacatttctatgtgtgacttaagtaactgtgtacttcattgtttaatattttgagccagcacttagtggcctctacagaaggaaatattgtagttgtcaaagtggtgccaaacttgaaaatcttgtgtcatgtttataattccaggccaggtcagcttttcttcaacactttccgagctctttgaaagcaaaaaacatttgcaaaaagagaaagaaagcaagaattctgaacttttctaatactctctcctctagaattttaaatatttttttcttttgatgtttgagtatcttacagaaaaatccaatcaaatgactagcggtagaatttcccttgatctggatatttttaggctgaacagtgtaatagcagaggactatgaggtgcatacattatttttgttggctatcatggcttattgtttgaatttcatttaataacaatattcaggctggaggtggtgactcacacctgcattcccagcactttgggagactgaggcgggcggatcacctgagatcaggagttcgaggccagcctggccaacatgacgaagcc

SEQ ID NO: 16718 - DNA, 1204 bp, Homo sapiens
agccctactttctgtctatcccccccaccgccggcccccggaatctaagcagactccctgttggaagcttactctggcacagaagctaggatgtcaccttaaagggtgtgattcaattgaatatagtttagtgcggtaccaggcacatcataagcatgcaataaatgttagccagcttagttataacttttggtaataattaatattatttaactaatttgcattataccacttatttcttccattatggagattctgtctcccttaaactgttaaacttgaagaagaaaccaaacatgataatctggtcaagttaacacattttcgcccatgaattctacctccaacacagccaagctctgatacctcagatataagcaaaaacaagtgaaggaagaacagaaaagccttatggggctttatgagaaggtttttccattgtttagtgtgtttgcaaaaaggaattttatggaagtacctaaccaaagctgtgacagaagggtctccttggtcatgtggcattttccagctttccttggattttatgctacattaatttgccctggctgataaatggtgtttgaagaaatgtgaaattttgttactttgatttttattttaattcaagcttattaaaagcatcaagcattatatgccacactcagcattttcatagacatagtcattaggagaatctggacaaagtaatactcttgtagaaacggaagcatcttgctgtacttgaaagataactggactcagagctacttcactcctcacttgggcaaatgccgatatcactttgcttagctataaagtgccatcagtgggatggatcgtcttcacggtgaaccgtgttacacttctgcaattcctcaagttcatattaattaggaagtggcagagctaggacacaaaattcctaattcctgaagatagttagtctcctaattaagtgcttctcactatattgggatgccttctttaggaataagactttcctttaattttcaagttccacaacttctaaaattattttgctatctcgaagcagcagaatattgatcatttttctcagtttaggctaacacagtccacaccattaccacttaaataaagtaaccgaatgctaaatattatccttatcaaacatccatcactttgttgcttttatgagatgtagattgctaaaaacttttgagct

SEQ ID NO: 16719 - DNA, 1863 bp, Homo sapiens
agcacaaaagagatattccctagaagtgtcacacggaggcttctgtgccaaagactgccttgtagaggtctcatcacctcacacttcttgacttcacaaaattgtggccctgagatcagtactcctctcttaagtatttattattattattatttactttacctcaagcagacagacataggttttgaggcttgaatacatggcagtggaatacaaggccctccctagcagccgccccaggcctggaaagtgggagatttcattcgcccgggttaaaaatccagaggaagacagaagagaggagtcctaggaactgagcagattttagagacgcaaatgatgtttaagagagccttgtgatttgtagcaagcatgggcactgctttttcttactaatgtggtagatctacacgaacattctaggctgttctgctcagagcgaggaaccactgctcctcaatggggagggaacataccacccagccaggcttagcattgggttttatcctttaataaaagttttataatgaatcctgttcaccttaaagtgtgattatggagatgattggctccatattccaccacgtcattccttcaactcaccagacacctttctttagttgaaataaaccagcatgacctggagatcatggtgactgtaagctaagtctgttttcatgccagatttcagccccacccagagtgtgctctagatgttgttgatttgaatggttttcccagttcccactccacatggggaagttgaatgaatgcacacctgctgctcacttcttgtgaggctgccttttgtgatcaaataacaggaagttctgctttagaggagggcacgatgaccatgtggcagtctgcaagtggaattttgggatggcagcccgaggaacatccagagttactgtgtgacttggtcctgccatcgttagctttgaaatcacaggcattgggctctgttttgacaccattcattggactgcgggacagtcattctttacgttctctcttgagctggtgagagaggaggaagagggaagtcaagagcaacctccaaggcctatgtcagcctcttctccttgggtcttggggtgggttagaactgggttccagtctggccagatgggttgctggctgcactgagggtgattcttctcagaagatgggctgcctgtggtcaggacagggcataccagtctggactccaccttcccagacacctactttaaggacctgtggaaactgggtgatccaattatagggctggggcaaccctgctttggccaccctcatttacaaacttaggttgggagcttgggtttcctgtctcacttccaaaagccttcaagatggcagcagatggacacaccctctcatttcttgtgtcttgtctgtcagatggcaggaggcctgtatcagtaaatttgaggaaaatgttctctcctgggccagcctcacagcttgcgttgggtgtgttggaattgttctcttcggccttgttctgccttgtgatcttttcaattcagtgaataaaccaggaatccattttttcaccaacccaccctgtagattgtcagctttttgtttgagagatgcctggtctcacagttacatgtatcagagtgtgtgtaagttgtctgtgttagaaaggttggggtgggggctttgttgcaggggattagactgttctttcttcatcataatttgagatacatcctgagtatgactgtctaaccctttctgtgtggcagaaaaatatgttttccaggtagtttttactactacagagagtctgtaaataagtgctttaaaaaaataacaaaccaataagatatttgtctcctatataaacat

SEQ ID NO: 16720 - DNA, 1440 bp, Homo sapiens
taatgtcctacaacacctggattttccttggtgtggtcttgggctctgctgtgggctactacctagcttacccacttctcagcacagcttagctggtgaggaacgtgcaggcactgaggctggagggacatggagccccctcttccagacactatacttccaactgccctttcttctgatggctattcctccaccttattcccagcccctggaaactttgagctgaagccagcacttgctccctggagttcggaagccattgcagcaaccttccttctcagccagcctacgtagggcccaggcatggtcttgtgtcttaagacagctgctgtgaccaaagggagaatggagataacaggggtggcagggttactgagcccatgacaatgcttctctgtgactcaaaccaggaatttccaaagatttcaagccagggagaagggttcttggtgatgcagggcatggaacctggacaccctcagctctcctgctttgtgccttatctacaggagcatcgcccattggacttcctgacctcttctgtctttgagggacagagaccaagctagatcctttttctcacctttctgcctttggaacacatgaagatcatctcgtctatggatcatgttgacaaactaagttttttttatttttcccattgaactcctagttggcaattttgcacattcatacaaaaaaatttttaatgaaatgatttcattgattcatgatggatggcagaaactgctgagacctatttccctttcttggggagagaataagtgacagctgattaaaggcagagacacaggactgctttcaggctcctggtttattctctgatagactgagctccttccaccagaaggcactgcctgcaggaagaagatgatctgatggccgtgggtgtctgggaagctcttcgtggcctcaatgccctcctttatcctcatctttcttctatgcagaacaaaaagctgcatctaataatgttcaatacttaatattctctatttattacttactgcttactcgtaatgatctagtggggaaacatgattcattcacttaaaatactgattaagccatgggcaggtactgactgaagatgcaatccaaccaaagccattacattttttgagttagatgggactctctggatagttgaacctcttcactttataaaaaaggaaagagagaaaatcactgctgtatactaaatacctcacagattagatgaaaagatggttgtaagctttgggaattaaaaacaaacaaatacattttagtaaatatatatttttaaatagtctatgactgttctgttctcctaattccaacagaaagcacatgaacccttgtaacaactgcaggggctgagtggggctaatagaactggtagtactctttataagcctgtctgaggacagagtccat

SEQ ID NO: 16721 - DNA, 1096 bp, Homo sapiens
agtagtttgattgttgagagagacctttgatctgcagtgtaaatctaccagtcatgggccagaagggcaaaagcccagctttctctttggaaagactcaggctgtggtttgttgatggccaggttttcctcaggctccaacaactgtgcttataccaagcagatcctcatcctccatataatcatctttgttattcgtgggggtttaattacattacaagtggccaaaacccctgttctcagtgaagaaccacattggatttgtattctgttcagttgtagtctacactgcagtcttattcctggttcaaactacctctttaaattgatttgtcttgtgctggtctgttaaatcctgccctccttggtgctagatccagttgtgcctcagggcagaggaaacaaaacacagctatcctgttggcctgtgttgtggttttgaagtttgtactttctctgtgggtgccagttaaatattggagagcaaggaatgtggacttgtatggctttgaaccaagagagggttatgagcctactggattgaggttaaaatccaagaaccaacatttagagctttgtgcttttctctcattccatcactttgtaatgatgatacttaacatgagcagggtgaatgacaggtactgacgaagtccaacacaaaggtataatacagcctgttgtctaaagccaaggagtcataaaaccatgagaaataaataggaatcaatagttagtagtgacattggtgctctctagaaatctcagcatgagctgctatagaataccctcccagcaacaaaacctaatcagtaaggccagctagacccaatggctcatgcctgtaatcccaacactttgggaggccaaggtgggaggatggcttgtgtccagaagttcgagaccagcctggacaacatagtgagatcctatctctataaaaaatcaaaaattagccaggcatggtggtgcatacctatagtcctggctatttgggaggctgaggcaggaggattgctttagccctggaggtcgaggctgcagtaagccatgattgcgccactgcactcagcccgggtgacaaagcaagaccctgt

SEQ ID NO: 16722 - DNA, 1122 bp, Homo sapiens
ttaaggtttcttcactacttctatggtagggttgtctgaaattccctttcaggctgtgggtactggtcttgggttctagtcataaggggttccttataaggagcaggcggaggggagtacactttcatgtgatttaattttgatcctgccctctccagctgctccttcaaaagatacatcaaaagatagaaactctgggctgggcacagtggctcacacactttgggaggccaagcgggggtgcagatcacctgaggtcaggagtttgagaccagcctggccaatgtggtgaaaccccatctctactaaaaatacaaaaattagctgggcgtggtggtgcatgcctgtaatcccagctactcgggaggctgaggcaggagaatcgcttgaacccaggaggcggaggttgcagtgagccaagatggcgccattgcactccagcctgggcgacaagagcaaaactccgtctcaaaaaaaaaaaaaagatacaaagtctgcatttgatataatgccttaattactgggtctacaattaatgttgactgttttagattgtaagctcctggagagcagtattgctgtagtaggaatgttttaacagtgtcatatgaaaaagaacaaaataaatattttgattttgtgattctatgcaagtctttctgcccagagtgataatgcaataagctagtcttttcatagtctgcatagagtctggccattaccatcagtttttaagatgtccatattgtggccgggcgcggtggctcacgcctggtaatcccagcactttgggaggctgaggcaggtggatcatgaggtcaggagatcgagaccatcctggctaacacggtgaaacccgtctctactaaaaaaaatattaaaaaattagccaggcctggtggtgggcgcctgtagtcccagctacttgggaggctgaggcaggagaatggtgtgaacccggaagtcagaggttgcagtgagccaagattgcacctgggcaacacagcgagactccgtctcaaaaaaaaaaaaaaaaaaagatgtccgtattttaggtggtatgatccttttaggttttcatctcactctccccctactcgacttaaaatgacatgcctagta

SEQ ID NO: 16723 - DNA, 1143 bp, Homo sapiens
agtgggagaggtgcaaataagctacagtccacgaaagcgcttagggatcaggaaaacggtggtccgctgtgtaggacaccgctgagtcccgcagccttcctcctcagccctccaccgccttctcccgctccttaacggccccttcccgcagagatccccttcccccttagcgctccctgccagagtgagctgggatcccgggctctgtaccgtggaagaggctcgcgaggaagccatgctgggctctggagccgcgaggccccagcgaaacccgaacactccctttcagaccgtccaccgcgcgcccagcagaggggaagtgcgtcactgacaggaagtgcgtcactgacaagacgtgggccaagaggggtcaccgcccccggagcggcgcggagcatgatggaagtcgtagtaggaaatggcgtcgtggcattgaggggcatccctcctagaacctccaggaaaagctcgcggaagacgaggttctgcggagagagaggctccaagcagtctgggaagtgtagtccagttggcttagcagtagtttcgttgggggggagccgaggttccgggaaggggctaggccggcttgaaaagaggtaggtgagtcgactcgcgcggctcggggctgaactctggagcgagtcaagggcttccggggtccgctgtgccccccgggcgtacgggggcgtttacgtcttcttggagccgaggaccatgttaccatagaaacccttgcctgggctccgaggtacaggcctggagctaggggacgaggactgttctcctccatggtccggaagtcttcccaggctccccctctgagcttgatggctcggcggtggatttgggctgcggcgggagattaagctagaagagcccgctagtgccaaagtcaaataaagacccggcggaggagcttcggcctgattttgttgatttgtcttcagcctggtctttgtatcagattgagagtaagatgatggataggaaggtgtcaggtaactctgtacgtctctctgccctgctggatgctggggcattagagacgaacaggataaggtttttatccccacatgggcggtgggagatcctcaaaatattgacgtttccctagctggccagatcctcatgcaaccccct

SEQ ID NO: 16724 - DNA, 1193 bp, Homo sapiens
tagacattgtttttattaatcttttgtttggccgggcgtggtggctcacgcctgtaatcctagcactttgggaggccgaggtgggtagatcgcttgagctcaggagttcaagacgagcctgggcaacatggcaaatgccgtctctgcaaaaaaatactaaaattagctggtcgcggtggcttctgcctgtgattccggctacttgggaggctgaggtgggagggattgcttaagcctgggaggcagaggttgcagtgagccgagattgcgccattgcactctagcctgtgtgacagagcaagaccctgtctcaaaaaaaaaaaaaatttgttcgaatgccttatagccttcctcacagcacccaggattgtgactgactctgcatttttaattcttgaaacttggctttccataacatggtacatgcttcaggactacatatgacccagagagcaaggtggctgaactatagtctggaagccctcaggtaaagaggcacatctcaccactcattggttaaacaatgcatcatagcgagcacttttcctttccctggagaatgggatgtgaagcagtagaccgcagccacgccgatggttatacagtgaagaagacttcacctcttcctattgagtttgcttggaatgctgacagcatcaggcaactctgaactgaacatttgctttgtcagaaaatatctttttttttactttgaagtttggcaaccttcatgttaccccaaagcaaaaccattgtgtcaggagtcaaacaaatgtttagaaagcaaacatgacgtctctattgtacaacctcctttctcttggctgtttaaaggatgtacttcgtgtattaaagggtactttatgttgaagtaacgaaaaaaccctaatgggtgttcctaaacctaaaccttttctttattccacatttgctacggtaaaatcctgttacaaaactaccctataaagaattattttctatagttaagcattttctgaatcctagccattggtccatagaggtctcttttttttggtttgggatataatggatgatctcaaatatggattactctgatttatgtctccttagcaccttgttaacaattttttttaaaatagaaggctgtttgcattttgggccagactgccagtaagccaggcctggactcaattacaattcttaacttgtct

SEQ ID NO: 16725 - DNA, 1189 bp, Homo sapiens
cacttatattggaatttaaaatggtgtcttcattatttctttcattattctgtttcttctgtgggccagacactgtgctaggaacagggttagtgaccaagaacatagttcctgtcttccaggacctcacagcttatgcttattgtatgttcatatgtgtaacatcatgtggagaaataagcattaccttttgctttatgtagaatttgcattgcttttgaaggaccagttgttttctagtagcagactggtataaattggagagcctttggagtcagttatactcaggttaaaatcatggatctattacttaccagttatgttatctcaaggaagttacttaagctcttagagtgtctgtgtcttcatttataaaatggggagaattctatcacctgctaaggttcttcagaggatgaattcagatactagatgtgaaatacctgacattgtgtctgacccatactagatgttcttttagtggttgtcaaatttcagtcccagtcatcttttctaattttgaagatgactgccaatggtcagatatgcttgccccatgccctctatattggtggaggttactggaagaaaagaaaatcctgttatttcgggttattttggaaactattttatgcctatccagcagggacctgcagggataaagagaaacatgaatgctcttcctgatccccatgaggtgttggggctagagtttcagtgaacccaccttacaacaggagctgttctatctgccacacagctggggtttcaggcactcttagggtgcctgcatgtattttggtgctcacaactggcccagctgttatcttgctgctgataacctaggagatgcaggtagagcatgactgataggtatctgcaaaacctaagatgcctgtaaatgaatttgctagttcagaatccttgagaagaggcacagtgatgctagttagcacatttgacaggaattacagcagaggaatgacttggtgtggagaagttctgaacattttgctttttctaggtcactcacctgtgctgggtccccagagaaccatacatactacagacctctgaagataaaaccctcaggtgggcttactgagcagctgtgaaagtgtttcttgtgaggtttgtggctcccatgcatacatggctccattcccactctgattctccacattgctct

SEQ ID NO: 16726 - DNA, 1111 bp, Homo sapiens
ataggcgggagcagaaaggcaagaaggaggcctcagagcaaaagaagaaggacaaagacaaaaaaacagactcggaagagcaagacaagagcagggatgaggacaatgatgaagacgaagaaaggctggaagaagaagaacagaatgaagaggaagaagtagacaactgaaaagggcgggagactgtggcaccttggaaggtaccacttgaaatgagacgtgctacgtgtttctgtgaagcttttccatgctgggcagagtagtctcaggcaaaagtgcctgaaaagatcagaataaaaactgactagaaataccgtcaaaaccagcacttaccaaactcagagcatctgagtagcagaatcctgttttgcttcatcaatctgaaggttatggccttttgacaagagggattctgaacgactaaattagtcagtttgctcgcttttgtttacttaaatgtatggttagatggtttttgatctgcagtcttccctagtcccccaaataagtaataataacttccatgctgcctgctgtgttccagatcacagaggcagccaaggctcaggaaaaactggggctttgcttatggtcagcctatgtttgattgcacagtctttgacaatagtagcttactaagactgctcagaatgagtaagctttaggaaactactaaaatgctgtgggagaataacaaaatccgttctctctcttcacttgacagaagcattaactgaattttgtttttcatagacccacttggcccaaaacctttctatattgcctgtagatgatcggcctgctggtgtggtagtaatctgatcacagatattcttaaatcagcagtgtggaatggtattagtcaaacatggtgccagtgtcttttacaaaaacagatggcatagtgtcagatgtaccttactctctgctactgtacagctttaggatttgtcatcacctcccggaaggtgtaaaaccccaggcttcctcttcttgtagtccatctcccagacttgtgactatggcttttcattcttcaattcatgacgagtgccaaacttgattttctctaggcacagctttctccctctgtgcctcctgcttcctttct

SEQ ID NO: 16727 - DNA, 1344 bp, Homo sapiens
acaagctccgttttctcatctgtcaagtagtggtggtaatactatgtatcttacaggttgctacaaagattaagtgagttactgttagtaaagtgcttagaacagtgctgaacttgtagtcaatcctgtgtaagtttttgttagataaaatagaaaactggctgggcacggtgactcatgcctgtaaacccagcactttgggaggccgaggcgggcagatcacgcggtcaggagttcaagaccggcctggccaacatactgaaaccccgtctctaccaaaaatacaaaaaaattagccgggtgtggtggcagatgcctataatcccagctacttgggaggctggggtaggagaattgctagaacccaggaggtggaggttgcagtgagccaagatcatgccattgcactccagcccaggcgacagtacgagactccgtctcaaaaaaaaaaaaaaaaaaaagaaaaccatacattccaaaaatagcgattgagcattagctctgtgctaggggctgggaacaccaaggagaagcacccacccctgtctagatggtgttgatgggatgccagggaagacttggcggagggggtgatgcccacacggtatcctgaaggaggaatgggcctgagccaggcaaagaggagcagggagggtgtggctagcacttcatgcacagggctagcaagtgcaaaggcctgggggtcagagagagcaggatgcatttgaagagctgtctagcatggctggagcacagcacaggaagagttcatactccacctgtttgtctgtccatgtgtccatccttccatccggcacatgaatagttacatgagttgctgtcatggcccccactgccaggactcttctgtttagcccagaaggccctgtctatctctccagcctccctggctcttgccgctgacggtaccctccacctccagctctatccagttacatgcactcccttgaatacatcttgcttgctcctgcctctgtgcctttgcacctgctgttcactgtgcctggaataacctttcttttgttttgaaccccttttgaaaaataactctccacctgctctgattttgcaagaaatatgcctgccttcatcatcattaagactcaggaaggaagggtcattttgccttattatttccccctccaggaatcatccccctgacccacctgtctgggctgggtttattgctttctcctttgtgtctttgtcacagccctgactatactgtgccacctgtgtctggcctctctgccagactgagaatgcaatgaggacagggactgggtgtggttcattgtcactgctggccagagagacccagga

SEQ ID NO: 16728 - DNA, 1158 bp, Homo sapiens
ctccctggggtgtggttcagggatgactgggacctgcccaaggccgcgcagtcctctgggaggaggcagggcttctaacacagtgcatttgggcttcaagttcatggctctttccagttctcagattacaggcagcaagcagccaagtaacagagaattcctatttccaagtagggaaattgaggccaaagcagattaaggttctcagctgaggtgatgctgtgagctgggggtgtggtctccagtgacccagatgtgaaccagagctgacccaggctgttggtgcccctggaatcctggagagaactctgccttcctattttctccttgtcccctgaggcgacttttcttgagtagatttcctagtggatttcaggagggcagggtaaaaacatgtttagaccacgagagaaaggggctgggaaagttcaggggtctttccatgtcagcacgcttggagcctgcacacctagaaaagaatatggctgcttcgagtgcagcaggaaggatgcaggttagacttaagcaggaacttccaggccttggagaatgtccacctggtaagaagttctccaagatccttttgcgggcttctcctagaggttattaaatattcccactcttgatataaaccctaactagtgtagtgatggcacattagagttgaccaggggctgcattagaaacatctcaccgtttcttcagcccagccctgccaggtgagtgggacagtgctgactgttttgcaggccagggacctgagccttaggagcatgagggggactttggattctagatgtttcttgcttctctgcccctgtatcctacccgctggagcacacggttggggtggacacttcctggaggcagaagagtggaggagatggccttctgagttctccttggcatcctgctttggatgtggtggcgaggaccgtccctgtcctcagctctattcctctgagttgttgtggccaagagagaatgcagagtctcactccttagccttgttctatctcctcttgggccttgttctgctccaagtatgaagtgttcagttctccagaggggcccgacctgggaaagtagagaaaccacgtggctggggccctggcagggagccaagctcattccttgggcctggggccagcctgctgc

SEQ ID NO: 16729 - DNA, 1351 bp, Homo sapiens
caatatcaacgccctcccagatgtgtccgtggtaaggccctggctggccctttggttctgctctccctggtgtgctcaggtcctggtggctctctcctctccatgacagccacggagaaagggcacagggtggcaaaggagacagaggcctctgccatgagctctcacacccagctacaggtctgtgcacaagctcaccattctagtatctctagcaggcaccaggatcacttgcctctggtgacttcaggcggggccttcaggctggctggccacagtatgaccaagtttcttagcctctctgtgcctcagtttccccgtcggtaaagtggggatgatgatcatagcatacctaccccataagttcgtggcatggagtaaattaattaagtaaagcctttaggatggtgactggaaggttgttggagctgtgcaggtgtccggtgttgacctaggcagaggggagtggtagtcacagtgtccatagctgcccctcactgtgcacctgctgtggcgcaggcactgtgctaacagtattcacgtggcttttgacatcaccacaccacctctgctgggtagatgtgcttttccccattgcccagaggtgcactcagagaggtgttgtgccttgcctggggccacatagcaccccagcccatgtatccatctcctcctgtccattctctctccagtcctttcatacctcttgcctctagtactcaagatcaccccctaaaaagaaaagccaaataaatgcattttttgtatttccatcctcttcatcgtgtctctaatgaagtcttgttccctgtgacaagctctggctgatgccaagaacttcagttcccaaaggtaatgatgctgtccccagagacacccgccaagatcccaacgcttatcagctgccgagatgcaggggagaagttttccactcaggtgttgcattattcagagcagtgtggccaagagcagttagagtggggacagaattccagctgggcctggcaccactcagctgctcggcctcccctcttccaggcgtgatggggtctgactccttctccgcctgttgggtcttttggcaggatgatgtcagatccacctcccaggggctgtcaagcttcaagccactgcctcgcccaccacctctggcccaaggcaacgacctcccactaggccagccaaggaagctggggagagaggacctccagccaccttcctccatgccttcctgctcgggcactgtcttctcggctccacagaaccgcagcccgccagcgggcaccgcacccaccccagggacctcctctgcacaggacttgccctcttcccccatctatgcctccgtctc

SEQ ID NO: 16730 - DNA, 1435 bp, Homo sapiens
cgtatgtctgcacccagtcctggtggggaccaggggttcttattggtgctgactgtctttccaggtcatcaggtttcctgagctctgcagtgagaatcccgtccattcaaatcccagctctgccactttcttgctgtgagacctcaggaagtggtttcacctctctgagctcagttttaggatctgtaaaatgaggatggtaatttctgtcccgtgatgttgagagaccccttggcctttgcatatgccatgtgctttctgtctggaatgttcttctccccacttcatatgacctgactttctcctatgtgtgcttcagccctcagctcagaagctgcctcttccaagaagacttccctgatcctcccaaggggagtgactttcaggccacggctcctcttgcccccgggcttcctttggtcacagctcttgcctcattatgtcctattataaaagcctgtacaggtttcccagttacccaatgtgactgctgactgcttgagggcagcgatcgcacgtgcggttaccattgagtccctatccctagtgctcagcacagaccctagcccataatttgggcctttattaataacaatagtggctgagatttgttgaatgttctctatgacactgtggtagtgctttccattcgtatcttctttgaccatcccaggagctaggagttgtgagtactgctgtgatccccattttacaaagaagaaaaccaaagctcagagaggagaagcaacttgcccaaggttgcatggctagtgagtgatggagccaggattcaaacccaggcttgcttgactctgagctctgttgttacccctgccatctggctgtgattcttccctgaaggatctcaccagctccctgttaagcatcatttcgtcatctatctgcctctctcctcccttccttcttcttgtccttcctttctgttaacaaatattgagcatttactgtgtgctatgtacattttgaggttctggggatacagtggtgaacaccaaagaaatcctttccacgatggagttgaacagacagcaggaatgccaggcaataacacaggatatagataactgaaatacacagtaagctaaatgatgacaagtgctagggagaaaaataaagcaggcaagggagactggagaggggtggggtggttagggagtgacccttgagtcaagacctgcaggtggtgagggagagagccatgccaacatctgggagaagagcatttccaacagaagcagctgcatgtgcaaaggccctgaggtaagagaatgtcagagaattccaggcggccaataaggccagagcagagggagtacgggggcagacatgctgaggactttgactctgagtgagatgggagtccttggcaggtaagagcagggaactgatgtggtctgacttcgatttaacaggg

SEQ ID NO: 16731 - DNA, 1216 bp, Homo sapiens
ctgcctatgtccttattttattctaggataccacattgcatttagtagaagatgtgttttcagtcttaacaatattttttttcctgcgatggaaggtggggtgagggggaggagatcctctgagcttcccaaacggagagattcagtgtgtgtgtgtgtgtgtgtgtgtgtgtgtgtgtgtaataaaaattaaattaaattaaattttaggaatcaagttacctaataatttatgaataaaggaaagttgcagctttttaaagagtgggtcgagcaaagttttttccacttctctttctgataaatcaagcatccattgttacctgaagcagttcagtgaggatttgatcctatatccattggggcttccacccctctcttgaaacccatttgcaaaatcagcagtgacaggtccagataaggtaagccatggactatttgcaattatgttgaaatgtttgatttttgaaaaaatatcttgaacaggagccaaactaataataataaaaaagtagacctttcaaaggtttttagccaaatgtgcttgataaattggccagagagtccacagaccagggatgctgccttaggccctgctgcatacttcctgtgtgaccttgggcaagtcactgaccctctctgggttccagggtggatgggccaggagctgtccaagatcccttccagcttggacagtctgtgatttgcttggtatgtgctacacaggaggcatttagaatgtctaatctgatgtcttcttgttcttttgaaattgctttcatttaaggcagaataaggaaagttggctaaggattgggagatgaggatcttggcactcttgtgtagcatcctactatatcaggaaattgatgggttatacactgtactgacgagagcttgactgctgtctcttgacccacaaacaccaaccctggtgctgtttcggagcaaatgaggaaacaataggattctggcacaaacagcaccgccctgggagcattcaaaatcaaattcacttgctcacttgccttctgaatctcctggttatgcggtagcagaacacagggtagcggggcactgctgggatatgtgcatatatgtgtgtgtttcatctcaataaaaattaaacggcttccttatggcctcagcacccccatgggtggattcaaggagcatattagaattgaaatattccagaagttaaaaactgttgccg

SEQ ID NO: 16732 - DNA, 2168 bp, Homo sapiens
ggaaagactggacccccattgctttcattgttcagagaacccaggagacatgaagatgaccagactgggcaaattatgtgtccaaaacttggcctcagatgatgtttccatctccaaccccttcatgccagatggggaaactgaggctcagagaggatactgctctatgtggcattgccttgaacccctaaaattatcagacttcctttttccaatataaagaaaaaaagtaagttttcagaattctctcaatttttaagtttttctcccccatattttgtgaaaagcagtggtatgtgtacgtgttgtctaccagtacacaggctgcagaagacagagacagaagaaagagatcaagggcagataactgttgataggaatatttgagaaagattgatcctgtttgacttgaggacttattttgttcacaggcatgcacgcttgtggttgtggttttatattacagatgtagaacaatggttatgtttcccgacatgaacattgtcctggaatgaagtgtgatcagccacttgtggaattctttgaagagctcagaggcttccaagtgatctgctcctgaacaagtttgaagacctattgtttcatagacccaagaccaaacgcatctaaaggatccccagcccccaagacctagcctttgtctgcgattttggcttcatctcccacaaaacccctttatgagttcacgctctttcctggactgacatacctattcctttccatttgttggactcctattcatgcttcaaagtccagctttcttaagcccttctttaggaagccttcccacacagccaaccctgctgctctctgcctcctttaaattcttgatacagctgctgcttgttctgatgttttatggtattgattctgttttcctgtgtatatgccagtttttctagctagactgtaaactccttaaggacagagactacaccttgtactttttgtgcatgacctggacctgctaaggaaaaaaaaatcttgtggattgattgctttgccatccccacagcagcttttgcaaattgctttccaaactcacttgaatgatgacattgctgtggacctgggttctggacctgatctgccacttcaagctgtgtaatttttggcaagttgctttctttgcctggtcctcagtttgcccatcaatataatgggtggattggatgatttttttttttttaattgagatggagtcttgcactgtcacccaggctggagtgcagtggcgcgatcttggctcactgcaacccccgccacctaggttcaagtgattctcatgcctcagcctcccaagtagctgggactacaggtgtgcaccactactcctggatatttttttgtgtttttagtagagatggggtttcgccatgttggccaagctggtcttgaactcctgacctcaggtgatccacccgcctcgggctcccaaagtgctgggattacagacgtgaggcaccacaaccagcctggatgattcttaagggcccttctaggaccaaagttctgggaatttctagcttattctgccccctcatagcccttggcctatctatctttatccacatgcagaaacatctggcaaccccacatggctgagatgacctggtcctaggacacccttggacagaagactggcctacctagcagacctggatttttcttcctgatctgctgcttccaagttgtgtgaccttggctaagtcacttaacctttctgattgtcatttcgctttttaataaagtgggtctggtgaacaagaaatgtaataaacacgtggcttgccattcaagagatgagtctgaccattcactttctgtgtgccagagaagagagatcatgggtatagaccagcccctggaaaggctgctttggtcaaggctgagagcagctttgctcaaggaaattattcacgaaggtgaccactgtctttctgacctggcacagaggaaatgttggctgtgaatgtgaccaatagaaagaagcccgtatttctcagtcagtcctagaaccccggtaagtaattaacagagaataaaaatgtgtttgttaaatgacaaagcagcagtttttcaattgtaaggtctgcttgagagcctttgatgtgtgtttcttttcctgacttttcctttctttagaa

SEQ ID NO: 16733 - DNA, 1188 bp, Homo sapiens
cccctgcacctgtcacaaagtatcttctgcagatagcaaacctgcaagttgttccattgataagtaagagtggcatccattcctgaggaccagaggagctggcctttggagagccctgcctttgaaaattcacgggacagtcattctgcacacatctgctgaagaaagtgcttcccctttgccagatcttatgccagatgctaactatgaatgtatcctaaagatgctcttatactagggctgtgaaataaataagaaaacagctcatgatacaacctcagatgaatgtcctcagatcagaaaaaagaactgctatgatcatcagctctaagacccatctactaggcatagttccaagattgcccatttctatgagtttttaattgtttgcatcacattattgcacctggaaattccccaggcattctagtccatagagttaagctaagaattaagctccagctcagtcctcctgcactgagagcatcaccatttctccttattccacagttggactcctgtaccccttccccaaggactgctcccaagcaatgctgaatggagacacgacctctggcctctacaccatttatctgaatggtgataaggctgaggcgctggaagtcttctgtgacatgacctctgatgggggtggatggattgtgagtaccaccagggactgcagagccctcaggcctaggggaagagggagagggcaaagcaggggaggagaagagggtgatctcctcctgatgcactctgacacccccatgtgtgaggccttgcaagatagtgcctgtcacacagaggcactcaggaattctctcttaaacaaaagaatgggaaacacgctggctactttttgaaacggggagataagtttcttgtagtttatctcatccaatcctcatcaaacaactctgtgatgtataaatgacagttgatcattgaacccattgcttacattaattagcactgactaagcatttattatctaccaggcactgtgctaagagtttaagatgaattattccgaccccattaccataggagctgggtagtgtatttttgaattaataaactctatttttttagaacagttttaggttcatggcacaattaagtgaacagaagttttcatatacaccccacacccacccacacaacctccccattatcaatatcctg

SEQ ID NO: 16734 - DNA, 1127 bp, Homo sapiens
ttcattttatgttttaaatctgctttattcaaagtttactgatttaaatattaatctcatccaaaaaaaaacccccttcacagaaacatagaataatatttgaccaaatatctgggccccatggctcagccaatttaacacataaaattaaccattacaatcccattctcccaatatagtttggcagggccttgggcaggtggtagccttagccctggagtctacagcagtgctctcatccttaccagatgcggtctctccctccttatattattttaacttgctctgcaccttctggcccaaggacctttgcttgtgctgtactctccccatctctgatatctcagcagtgcacatggagcctggtagagagtgggtactcaatgaattcttgtccagtaagtaagtgaatggatgggtaaatgaacttataaatagaatgacttcttatctataccctgagaatttctgtgaccaaaagccattatactttttcttctgctcttaggaagtcattgtgggtccagataccacctcctacagcctggcagacctgagcccatccacccactacacagccaagatccaggcactcaatgggcccctgaggagcaatatgatccagaccatcttcaccacaagtaaggaggcccagggtgccatccagccttgagatctaactttgactgaatcaacccttgacttcccctttgacttctactttaaaattttcaaacaaacctctgaaaagaatcgattcactgctactacttggaagcctgaggaaagcaaatgtgggagattatgagcatcccggtgaaaggaaaggaggaagcccatctggattcagtccccatttctatcacctgctaggtgtgccttaagaatgctacttccatcctataatctttagcttcttcgtctatacagggagattaataataaatcctctgtcaccaggaccttgcaagtgttcatgaggtattgcatttgaactcctagcccagtatgtggcccatataattgtgtggtccttttattgtcagagttcaacatgagctgaaagtctctttctttctccttcatcatgccagtgtttacaaaacctgtccacattcaaaatcaca

SEQ ID NO: 16735 - DNA, 1204 bp, Homo sapiens
gagaattttttcctttactaaagttattggtatctaaacataaataaatggctttgtgttcaatgtggcgcaagcagggaagcctggttggaaagaacaccaggctggcagggaggagatacaagttctaaacttgatgaggtgagcaagcttggtcaaggcgttctgtcttactcacctctataatataagaaagttggaccagatatgcccaaaataccctcccagtgctagggacacgtaactcaaagttcagagcagggagtgaggctcagactgcactttcccatgccaacagcctgcatctgagctaagacccaggaagcacagaaagttggagaggccagaaacacccaagggcacactgctgacctgggactccagcctgaaggaaatggactaaggaacagccaccacaggtcttaagatggatcacagcagggggtccctgatgccatctgcattttagaggcaacagaagatcttcagacctctgtggctgacagtggaaaagacaggtcaaacaaacctagagagattttagaggacacactgttgacaccagatgtcctttcttattcctgccagtgtctcctcccaaagacctcgttgtgacagaagtgacggaagagacggtcaacctggcctgggacaatgagatgcgggtcacagagtaccttgtcgtgtacacgcccacccacgagggtggtctggaaatgcagttccgtgtgcctggggaccagacgtccaccatcatccaggagctggagcctggtgtggagtactttatccgtgtatttgccatcctggagaacaagaagagcattcctgtcagcgccagggtggccacgtgtgagtgagcagaactcttttgggcagcctcacctgatgtcagcccacccagtgtataaccctccctcgccacggcccctacaatcctatagttgttctttacagttataccaaataagagcctagaattaagtccatagaatcacttattaaagaaatccctcattttccatcaaatctttctccttgctctcctatatacttcctgccagagaaaatcattacaagtaacatttagcaagtgtttactgtgtatcagactttgttgtaagcagtctacatattagtataagagtcctcatttggccgggcatggtggctcatgcccgtaatcctagcactttgggaggcc

SEQ ID NO: 16736 - DNA, 1206 bp, Homo sapiens
caaattgcaaaaggccagaggaataagaatatgacatattgctgaaatattagaagttcagtgattaggactttgggtgcaaaggagttcttgatgagaagtaaaatcagaaaaggagaattagctggattatgagaaaccctgcatgctacatatgagatgtaaacttcatcctgtaggtgatgagaagccactaaaacaattgacacaaggaatgactgtgcccattgtataactgaaaatgatggcttggtcaagcagtgtggaggatgttgaagaagatagtgagactgaccaatgaggcaaagagactccaatccaggcaaatagatagtccagcctagtggatgttttaatactgaagaagagttgaattgaaaacaaaaaaacttagaaggtagaatggactggaagtggagaccaactgatgatggggaaagagaagcgtgaagattaaaatgagttctaggcacttggtttgagttactgggagacactgtgacatcgactgcatgagaggcaataggaaaaaaagtttctccaaagacgtcgtccaccactaacttatagatttgggagggaatagttcttataactggacatgtcccttagccactggaaggctgagaattcatatagaatgcctatgtaggaggcaggcatgtcctgatgactacagtgtttaaatagatgaaaatattcagattgtctggaaaatatttcaccattagaagtgatctaactgtgaaagtgtctatttggaaccagccccagttcctaaacttcttgaaggcttttccttgcaaggaggtgaaataagcaatactaacttcaccctcacagagtcaggaattgtgcaagaagcaatgctgggaatagctaattcatctaagaaagtgaagctcagcaggatggcagtggtccatggaatcattgcttttaaaactggaataaaattagaatagtatctggctggattgcaatcttctactggactgataatgtaaatttctctgatttgttggtcagttgcagtgatacagtttttctgaccccttcagatgtgcgggttaatttcaaaatagaaaattactaaatctcagagcaaaatcacagactatagatgagcttctttaatctcttcttgtaaacagaaggttgaagtctaagaaatattaagaaactgatcaaagatcaaacagtaac

SEQ ID NO: 16737 - DNA, 1103 bp, Homo sapiens
tggactgctctggaaagtgtgtatcatgtgcaccagttgtgtggaggggtacaaatgtacacacatacttgtttataataatttttttaaatggaggataaacaataacaaaccaggctacatatagtaatggaaggggagagattggagtaacagatagaaggtagatttctctgaatagaccttgttttgtagatttgacttagcaagtatataaatgcattacatgattataaaaaatcaaaatgagaaaacaattcctaaaaattcttggcaagatgaaacaaaccttactgtatatggcaatgtaggcataacaacacaaaaaggaagcatttcagtgactaaagcatagtaatttgaccacacatttctagtagaagtattctaagggcaagaaaaaaatttaaactcttgttaatggttatatttttagtagtaatattgatattcatattctgaattattatatttctattataagataaagcaaatacttttattgggaactgattttttactgtaaggaaaaagagataagaaatcaaagaaataaccctgtaatcctaaatttgaatagcacatatcagaatgaacttgtgatgtattatcatccattaaaagaattttatgaactttgtcaacatacaaggctttagaaacaatgtctgttctagcaccagtgagtgcccttgatgcccaaattatggtttctagatacctttgcccgctaaagggaactagggttcccttggagaaatgggttgttgctaggtctggggcaggagatgtacagtatgagcctagaacgtatttcatcctagtaagaaaggatccagcgtggggaaagagggagagaaccctatggatttacagtggttcccataagtgtgggccctggacctgcagcatctgcatcacctggaaacttgtcaaaaattcaccttctcaggcctcacaccaaacctgctgaatcaggaactctgagagtgcaccccagcagtctgtttttgtagccctctaggtaggtttgagaaccactggatttaaagaaactcaagagataatcaaatgcaaaacatggatcttatttgcatcctgaa

SEQ ID NO: 16738 - DNA, 1352 bp, Homo sapiens
cctggaactagatcatggaaggtctcatgtagatactgggaatgtcgatgaattttagggggtgtgtgtgtgggtttatcatggttaaaattactttttagaacagtcactctgaggaagaggacaactgaggggtaaagagggaaagactagggctttttgagggaggcttgttaggaaagactggaggctttttgagggaagtgtgttaggaaatactagggcctttttgagggaggcttgttaggtcactgcagtggtcttggcttggctagggctgtgaggaaggagagagggtttggattttagtaaaagagatactgacataagtgtatttgattttcagactctgagatttgcccacctgatgaccttgccagcttgccatcatgcaaagaaaatcctgaagatgttctgagcccaacttcagtagctacttacctgagttccaagagtcagccttctgctaaagtcagtgtgatggggactgatcagtcagagagcattaatacctcaaatgagacagaatacttaaaacagaaaatccatgacttggaaactgagctggaaggctaccagaatttcatatttcagcttcaaaagcactcccagtgcagtgaggccataattacagttttgtgtgggacagaaggggcccaggatggcttgagcaagcccaagaatggttctgatggggaagaaatgaccttttcaagtttgcaccaagtgcgatacgtgaaacacgtgaaaatcctcggtccgctggccccagagatgattgacagcagggtgctggagaacctcaaacagcagctggaggaacaggaatacaagctgcagaaggagcagaatttgaacatgcaacttttcagtgagatccataatctgcagaataagttcagagatctctcacctcccaggtacgttccacctctgccgtctccccgtttaagcctgtagtcccccagtattgccactaggtgggagcccatgagctaaaagagaacactactctgtgatgggtagagtgtgttctggggaaggcttgatggtggggttcaggcagccaggtcctgtggagaagggagaggtgaggccacaaagaagaggaacagcgaccacgcacttgaacgtcagttacgagtcttgggtcctctggaaatctgcagggcagatttcgccctcctcaagttgggggctcagggtaaaggtttcataccagtcacttggtgagtgatagtgcctttgctgaactgcagtgtgtactcctggactctgttactggcttttgctgtgctgtgaaactaaaactgatgtctaggcaaggtaggaggaatataaatattttccat

SEQ ID NO: 16739 - DNA, 1210 bp, Homo sapiens
gcctccgggttcatgcagttctctgcctcagccttcccgagtagctgggactacaggcacccacctccacgcctggctaatttttgtatttttagtagagacggggtttcaccgtgttggccaggctagtcttgaactcctgacctcatgatccatctgcctcagcctcccaaagtgctgggattacaggtgtgagccactgtgcccagctgagaatttgtgctttttttctggtcctttaagaaaatacttctttcatacaaccatccacatcataagaaacattatcttatgttattccaaaatcttcctattatttttgctttggtttctgaatgttgtctatgttaatctttttcttttctttttttcccccacggcgaaaaagagcccaggtttcttggtttgtttcatgaggtatgaaaattagctcatcttgcttctctgccttctcttctaggggtctgaagactatgagactgctctatcaggaaaggaagccctttcggctgcgctgcgctcacaaaacctcaccaagagtacagagaaccacagactgcgtagaagcattaagaagatcacccaggagctgagtgacttgcagcaggagagggagagactggagaaggacctggaggaagcccatcgagagaagagcaaaggagactgcaccatccgtgtgagtaccgccctgcccttctgacacagtggacagtgcttttggggctatgtggctgtgtctggttgtagggtgatattcagtacagaagacttaagaaaatatttcacttattatctcagtacctagaaatgaccagcttcatttgatctatttggtatttcagtccttttattctcctcgctctctctctctctctctctctctctctctctcacacacacacacacacacacacacacacacacacacacacacacagagttgttatcgagttgaaaatacagttttgtatcgtgcttttttaagtttaatgttctctctctggtttgttgccatgtcatgaatgttcttcaaaaacaattttttttgtgccagcataatatttcatcacttggatgtattacagtttatttaactagttcttttttgaacggcatttagattattttactttttttttgccttatgacttctgcagcaaacatccttgtacataaatatttatccactgattctttgttgtttttt

SEQ ID NO: 16740 - DNA, 1302 bp, Homo sapiens
atggccccttcaagccggatcactactgctgctgagagtcaggcctgcccttcactttccagctgctgtccttgctcaggccccgcctcttctccctaagagcaaatggcaccaactttgtgattggttggttagtgtcccccatcgatggggctggtcactcagtttttggcctctgctgcatccctaacactatatcaagtgtggcggggaaattgagaggcccctcctcaagccctggtcatgatggaggtacaagggaggcatccacaaggaaccatgagttgagtggtcttggaactgctcactaagtcagtccttccttttttttttttttttttttggtatttttggtagagacggggtttcaccatgtgggccaggatggtctcgatctcttgccctcatgcctcggcctcccaaagtgctgggattacaggcatgagccactggcgcccagtcagtccttccttagtttggaagttggtagtggagtcacaaagcccatgtaccttaccattcaggtaaggttcctggtctgtggacttataccgtgttcctggtctgtggacttatacccgtggtttacaggttcagtggttccccagcccatgacagatgagaaggagctatattgaaaggcaaagaggaactgttgtttgaattttcctgagagcctggcttagggctgggccttctcttaaacctcataacaatgaggttggtacttttagtccctgttttacaggggtcagaatagactgtaaagggataactgagaaaggacagagaagtgacagccagaggggctataaaaacataaaagcaagcatagatctgctactactttgtaacaagatggttcctatcacaaccctggttcaaaaagagaataatatggttttaatgttaaaagaaagcaggaaggtgggtaaataaaaatcttggtgcctgaaaaaaaaaaaaaaaaaaaaagatgatactcaagcacagtggctcatgcctataatcctgacactttgggaggcccaggcgggtggattgcttgagctcaggagttcgagaccagcctggcaaaatggtgaaaccccatctctaccaaaaatacagaaaaatttgcctggcatcgtcgttgcacctgtagtttgagctactctagaggctgaggtggaagaatcacttaaacccgggaggtggaggttgcagtgagtggagatggtgccactgcactccagcctgggtgacagagtgagaccctgtctcaaaaaaaaaaaaaaaaaaaaaaaaaaaagatacttatga

SEQ ID NO: 16741 - DNA, 1217 bp, Homo sapiens
tatctgtcttcctcctcctaatagatgtaaggcccaggcggtcaggggcttttgcgttttttgttcactaaccctatcccctagaacagcgttcgggataaagaggtgcccaacaggttgtatgaatttggacacgtctcttaacttctctaagccacagctccctctcctccgtaaaatgaggataataagaaaaactactgcagagctggtgcaagatcagattggaggagggacataagcgcgctgtgcaaacctggatgtacggtacgaaaggaacctccgttctaggttgcacccagcctaagcaccgtgagggccgcgcggcacgcgttcagcttcccgggacgctcttctccccacccctactcccggcctccagcctcccaccacccacctccgggcggggaccggaagtgcagccgcttccgccgggagccgcggagctgagggacgcgcggagatgacgcaggcagcaccggaagccgctcccctgtgaggctgcggaccgggagcagcggccgcaggtccgggtctgtatgcgaggcggggccggtcggggaggggactcttaggcgcccgcggctctgctgacccgccgcgccttggctgtttttctttccctgcaggcgccatggctgcggagcggacccggccgctgcaaggctctggcggtccgagcgtgcctagtagctgtgaacccggcgcgaggtcccgggccccggggcgctcgctcaggtcagtgccgcgcggaacacgattccgagagcaagggacctgggagcaacgaatgggttgatgggatctggattttagagacgggaaaacagggttttggagttactgcctcctactgcctccatttccttagctgcgaaatgagttaacagtgatgtcccagggctaccaaacgtttgaaagacgatgaagtgtgatgaggtggtttatgaagtacaaagcgctatactgcgccataattgtgggtatgccatgaaaacaggtgtgtatgtggggtgctgcttgaagtaaagcaaagataacaatattaatgctaagtaataatggtaactgacatttactgtaggcttacagcgtgccgagtactgtgctaaacgctttacttgcactgtcttgtttaaccctcataaaaacccttgtaggtaatgctcttggctgtattttacaagtgaggaaacagggcatgagacaggtgaagt

SEQ ID NO: 16742 - DNA, 1197 bp, Homo sapiens
caaaaacataaataaaaatactagtaatgacatttacagtatgtttcacagattaatcacatctctgagtgggagtctttatctgttgtaggatctactcttgccattctattctgggttttggttgattagtctttcttgaacacttccagaaattggagatgtatgcctgccttaggtagcctagcttattttattaatgaacatatccatttaaaaatttcttcctggtaatgagtctaaacttgccttcctgtaatttgtatccactggtcctttttctttgttctccctcttgcatatgccagtacttcaatagctggtcccagctccattgacgccctctctcaggatcacacatcacaggtccttcagaatctcctaatggtctctctgatctccaggcaacacactactctaacctttctatgcttttctggcctgcagttcatttctgttcctgtgaagtcatagagcccgcaattcatgctgtcttgttcccctattaaaatatatttttgtaaatctctttaggattcgtgaagttttttggaaacctggctgtcatggatagtcctcaacagatctgtgagcgttatcctatctttgtggaaaaagtctttgaaatgatagaaagtcaggaccccactatgattggtgtagctgtagacacagttggaatcttgggatccaatgttgaaggaaaacaggttttacagaaaacaggttggtatgacttggccctgttcagggatatcttaatctttgacaggggttcaatatgtaagttcatttgctggtgggttaactacattgtagaaactattttatgggtggcagtcttgttaaccatgaccttgtactcatgtctgaaaatctaataattattacggaaaacctttttttttttttttttgacttttcactggtttaggttttcattggtttaggtttctaccaatcgatttcaaccaaacattgtttcctgtttcccctctatgatgtcttctttgactagatttcatggtacaaagaccacgggctagagtcagaaaggtctggattcatgtccttgggttttctattctttttttttttttttttttttttaagagattgagagtgtctctctgttacccaggctggccccgaactcccgggctcaagcaatcctcctgcctcatcctcttgattggc

SEQ ID NO: 16743 - DNA, 1167 bp, Homo sapiens
actgggccggtttactctctgtcagcctctgctcagctcgaccgccacctcctccaggaagccctgcctgattctcctggttgaacatagtcttgcccattcctgtttttcccatagcacttggtggactcctgcactaaagcctgactgtgttatttaagcaggtatgaaacatttaggggaggattccttgtgtagaggcagcatagagaagatgccaccagctcaggagccatgggttagagcctggctttgcctcccacttgctgtgtgactttggtccaggcacacctcctcatggagcctcaaaatattacctattggtaaaatagggctatcaccgccacccaccacacaggatgtcacaggatcggggcgattacagatgaacactgtcaagctcagaagtgtaaggtttgggggtttattcccaggtatcacacttcaaggaacacagataaacagaagcgcatttaccccaaatgcacagagactggggaaagactgctcagtgtctttccatggaggcaggactgactccagggataggaggctaagttgccttttgtgacctcaagggagacagacagacttcagctcagtacaaagaaagaggagaatgttgcatcactcagagctccccagggtaggtgtggttgtttcatggagtaatgacctctctgccattggaaggacatggagccacgtagcatgaatccagtacagaacagaaattggactagacagcttaaacccttgtcactttctgagtctagacaaattaaggctttactgtgagctactggcatcagttgtcagcttgcttttgaccttcttgaatgggcctcagggggagggggtgggagaaacaatcccatttgctgatcctcagcagacaggactgaagattatctccagccccctggcatcccctccttcactgtcacttctacaggaagatcacgccaggcaagtatcaagtctctaactaggtcaacattaatcctctaatatctgcttcttacattaggtaatcagtccatggctctgggcacttctttgggagataatcatctaatgaagtcacaggctggggacaaactgataagcagatggcatgggaagtgtttgcaaggagggctggtcctcagccctccaccctgcctc

SEQ ID NO: 16744 - DNA, 1194 bp, Homo sapiens
tctgtactaaaaaaaacaacaaaaagtaaaaacaaacaacaacctgggtgtggtggcccgcacctgtagtcccaggtacttgggaggctgaggcaggagaattgcttgaacccaggaggcggaggttgcagtgagctgagatcgtgcctctgcactctagcctgggtgatggagtcagactccatctcaaaataaataaataaataaataaaaaagagagagagagacaatttaatgcaacgcaaataacactgacctacctagctgtgcccttggaaaaaccacttaacctctttgatcctcagttttctcacctgtaaagtggaaatgatttccgtatcaagttatcctgaaatttaaatgaaaactacccatgtgaaaacaatatagggcctgacacaaatagatgcaaattattatatttattttctattcttcctttaaaaatgttgttaagggttattacttttaaaggagtttaaggaacttggagttttgttgatttttttttttaattcagtcccatatgaaggctcaaaagagcggtaaagaacaacagcttgacattatgaacaagcagtaccaacaacttgaaagtcgtttggatgagatactttctagaattgctaaggaaacggaagagattaaggaccttgaagaacagcttactgaaggtaagactttcagtatgatttaaggtaaatcagtgttattgctggtaaaagaaacattataaagacaagcattaatccagatagtagctaaatacagttcacctattagtactagtatttgatagggaaatatttacaggatacccaaaagtagttaatgcaattttaagagttttgtttttgttttgttttgtggcattgatgcctagtgagtcaggtcattccagtcagtaggccagaagtcaatacgtgatcatgataagctctggcatgtgattgtctatgacataaaatccattcaggagcaaagcacccattggcatcagggaattcagtgtctggttataagaagaaagagttttaggatctagttttgcaatgctgatttaaactgcgacatatccataatagtggaaaaggaagacaataggccatagtggtttttacacatagggctcagtgtaaaaagatcctgctctctgttttgctactgtcagctgtgtcgccttggacaagttgt

SEQ ID NO: 16745 - DNA, 1275 bp, Homo sapiens
tctagtcagatgatctatggccaggattagatagtactacagaaagggctgccttggggcaatgggcatggacagtttacagataaagaggactccagatggaacaggcacttgaaaacatgttaattgcattctaaattcttcatttcagttaacattgttacactgagtttgaagtagattaatcatacggaaattttagaaatttctttttacttgaaagaggcattgtctgaatttagttctgtggtctagatatgtttgttagttcgttagtagtgaaaatatgctggcatgtaatagataatccctatttcatccccctccataggatgacaataatctgttaaaacagcaacttaaagatttccagaatcaccttaaccatgtggttgatggtttggttcgtccagaagaagtggcagctcgtgtggatgagctaagaagaaaactgaaattaggaactggggaaatgaagtaaggaaaaagcaagacctccaagtctagagtgggcctcacaacttgagagttgtgagtgtgaggttcaatgataaactcacctttctaagttctgttaatggcaaatttcttttgtaaggttctccttatgaagttttcatgactgagacaaaagattgtttaatttatttgtctgccactgattgtttttacattttggatcttttttttggtatttaagagtaatatttggtatttaagagttattgtttcttgaaagttaattatatatggtcaggaagtagagccacattatacattttaaatagagaagaaacatcaaaagaaaacataattatttcaaatatatgaaatggacatttattcttggagcaaatattgttagcctgatatgagcctatgttttcagagtggcagcagtcatttgataaagcaataatttgcgcttaggagatggtcagtaaattgctatagattgacaccagtccctgcacacagctttttactctggagctaaagttaatagcatgtttgcagccagcatcaaaaattaaatgtcacatttataccatttttccccctccttactagcatccatagtccttcagatgtcttagggaaaagtcttgctgatttacagaaacaattcagtgaaattcttgcacgctccaagtgggaaagagatgaagcacaagttagagagagaaaactccaagaagaaatggctctgcagcaagagaaactggcaactggacaagaagagttcaggcaggcctgtgagagagccctggaagc

SEQ ID NO: 16746 - DNA, 1195 bp, Homo sapiens
tgtcgagtactcactatgtaccaggcgtttgcacacattattccaattgaacatcaggaaatgttttcctcttctataaaatggggctcatgccagtgtaggagccagctccaaatcctgtgcactttccactgcactgcctcctgtggaaggaagtagtactggtgtgtctccctttatgaaaatcaatgtttataaaaaacatttcagctgttccacacacttcaggattggtgctgggtttcctctcactggtctcaaagacttgaaagagaagatagtagctatctgtcactctgggatcaggccctccaggaaccaattacttcaaaaggcacccttatctgggttttttctgggcctttggtgtgggtcagggtaggcttgtacgactttgtaatggaggaaagcacctgcatgggtagcatatcaccattatgcatctgccacaagggaaggggagctctgcccacagctggctcggggtctttggctaaacctactgaaaatgctcatttcagaacggcagctttcagaaagggagcagcaattggtggagaaatcaggtgagctgttggccctccagaaagaggcagattctatgagggcagacttcagccttctgcggaaccagttcttgacagaaagaaagaaagctgagaagcaggtggccagcctgaaggaagcacttaagatccagcggagccagctggagaaaaaccttcttgtgagtacctgctgccgtggcagtttgtgaggaaatgataaatttaaaattttaaactgcaacaccacttcaacacagagaaaataaattacccatcaacccagtcctgaacccagctgttgttattgatgtatttatgcatcatttgtccttgaagttgatggtaagttttacctgggacgggtgcagcctcaatggagctctggctggctggggagactgttggtgtgaacagccattatcagcacaaagtagacagcatgttctgccagcaagcctcagtttacacctccactggcagggaggagggggtgttgaagaagccttctctagacggttgttttttaagatggcatcttgctttgtctcccatgctagattgagtggcgcaatctcagctcactgcagcctctgcttcctgggttcaagcgattctcatgcctcagcctcctgagtagctgggactac

SEQ ID NO: 16747 - DNA, 2877 bp, Homo sapiens
catcatggcagttaactaaagattagcaaaaggtcagtgtcttgtcttttgtagaaaactgtggttctccaataaagttatcaattgcctcttaggggagagaatgtagaagatgccttccttgaggctgccaagaaaatctatcagaacattcaggatggaagcttggatctgaatgctgctgagtctggtgtacaacacaaaccttcagccccgcagggaggccggctaaccagtgaaccccaaccccagagagaaggctgtggctgctagtgacctctttgctgtggcccctcatttgacctttcacctctgtctgttggaagcagtactttttactgcctcattgtcttctgtacatcttactgggtttaattaaaaaaaaagaaaaaactctgttgtaaaaacagtttaacacaatactaaactgctaaacaactagatgtaatcaggttatcaaaggcaagtagagtaataaatctctcctgcatggtaaatctagactttttttcccccttgtcctcgtgataagtatgtcaccaatatatgatttaaaccgagcactgatgctggacttcatgatttttaccctccctttggcaaggctttgtctcactgtacggtttaatttggtgatatcttaagcctttcttcccatccttaactgttcaagtatgtctgttgtaaccaataagtttattgctgtgaaattacttctgatggtagagaaggggttctataactgcttttgttttgttttggataaatttcctgttgtgtgggtggcatttttcttaacgagatttgcttctgtcttagcctcacacagggaaaatatccatttatcttctctctcgtgcttaattaatagctttatctttttttataccattttatccttttctctttaacagaaagtaaatatgtataaaatttgaaggaatcgaactaacaatacattctgtgtatattattttaatgaagaaaataaattgattactggcattggaacagtataaaataccagtttgtacagtatgacctatatgtgaccatgttactcccttccatttcacacaaagaaatagacacaactgcagttcacaagtagtactggctccaccccttggtgctggcagtgtttggggacattatgctggaaagagctcctagcatcagaggattaacactagcagattctgttccatctttgcactgttgcttacctgctgattttcttaactgttcttgtgcaatcgacaatgtgctaacctgcttttctctttttgtaaacgtttttgcattacaggctgcattcttgccttactgtatagaaaaagaaaaaaggctgggtttactattgcacattttaagcttttatacctttatcttcttggaatggtcagattctgaactggacagtcagaaccacaggtctgctgttaagggattttaaattgtgcatttttaaccctacagtgaaataacttaagatatccctgtgttcacagtgtgaggggctgttttatgtcatgttggcataaattgttttgtaaaagggaaagtgtttctaaaggtgtttcagcgcttgtgctgatacaaagtaagttattactttgcaccaggtggtttggccactgaattaatactgtatagcaagagaaacaatcttatttttttggacaacatgttttattaagttcttcatttctgttgattttttttattgcatttatgattcagtggctgggaattgagaatttatttgaaatagaataggtaacacctcagcgtactatagaaaatgcactcagctcaactgctgtgtttaaaatacacattttaaatccctctttacagacactaacataaaagtacatctttctgggttgtaaacatgtggtagtaccagagtattgtatagtcaatgttaaataaaagccaaaactggaatgtgcagaaagtaggctttggttaatttgtggattcatttttatttttgtctttgtttaactttttaaaaaataagatttctggagtagattggtatattctgttaaagacttacagtgatccattttgcttacactgttgcatcacaagggactcacccagggaccatgacctgctggtgtgtgtgtatatttacaaaaacaaaacaaacaaaccacccattgggatataaggtagcaatcacaaactaaagactgcggcttgttgaggtgcaataccctgactcccaaagttagttacagtgggttttattgtttttgtgactgaaggatttattcagactgctgtactcttcatttgatgtaacaaaatgctattaatctaaatatttgtaaataaagtacctgtatctagattaaattaaaattggttgcattattttctgaactataatagggtttttcttcaggtgaacaatttgacgtgtcatcagtttttattgcagcactgtccatattcattgtataaagagaggtctacgtatgtagcatataaaaccacatcactaagtaatagacccacagctttattcttgtgtttacattacccttgaaatgttttcagtcaacccttttcagtgtaagatcagcacatttggtggctgatgctgttctcctttgactgtaccgggagccagattctatcatatgcatgtgtaatcccctgtaatacactcaggtgctcacaaatagagcagattgtcatattgtaacatgcgtgtgccagacaccgggcagtacactttggaaagaatgtgaaatccttttaatttttaatccatagcttactgcttgtgcagtcacctgcctcttgaggttgctcattgcccttggacctgtgaggaggccttcagattagtaattg

SEQ ID NO: 16748 - DNA, 1193 bp, Homo sapiens
caggggcgggtgcccgaggcgcgggtgagtgcccggggggccccggggctcccggagtaactctctattgtaagttcttgcagatacagcgctaggaaaaggggagtaattcaggtctagaatggaaaaactgttttgttgctttgtaagtatctcttgctgcttccggggctctggctcgcagacgagggtgggagcctcggggccctggctgttccttcccaggaagctaacctcaccttggccggatttcttttcccctgtcctcctctaacatcttacctcctgtctcctgaattctccttttccttctctgattttttctcccctctgcctcacttctctccttctctcttctgatgtcttcttccatttacgattccttgttctcatttgatctctctccttctccaatatttccttctttcttgtatgacctcgcctgtctgcttatggtcattattatcatttcttctctcctttctgctgtcttccctgccctgtctggtttcgtgtttttccacccttctgcctgagttctccccaccttgtttctctgacttctctcctctgatttttactcccaccagatctcttctccggccagaggtgacctgcacctgctgatttttgtcctcgactccagcctaaccctcctgcaccctccccggccccagccccagtgcatgtgtaatagcctccccatttttaaccacttcatctccaacagcctcctgcagaccctggtgcatcctcttctcctcttccaagaaatgaaatttgggggtggtgtgttgtggggcaggagggaggaggcagacagcgcaggaggccacttggactcagccatttggacccttcttgggggtatgatggggatgggtacagagaggagagggggctcctgtggatcacaggaggctcaggtgggctcacctcgatttgcgagtgcacccacttagcgtgcacagagctagcgcctgctgtctgccaggccccgtgctggaaatctttccacttccaaagagcaaaagcaaacaggctgtgtgaccttcggtcagtcccctcccctctttgagcctcagtttctctgtctgcagattggggttggataatgagctctcagagggccctttggtttcaagagccattgaagatgctggaaggaagcaagctgaggccctggggaccct

SEQ ID NO: 16749 - DNA, 1242 bp, Homo sapiens
ggggagaattgatatctttacagtagtggatctctgttgaaaacaaaatcccttccctctgggagcttatgttctagtcacacacagaccactcaggggctcttaaaattattgagaaagatgttaatgaccccagtgtaattggtgcttaacacagaaactgtgcttacagagaggaaagaacaagtatgtctagaattgatcagacttagcacatgaatgctaagaccagaccacatgagtgaccactgatgatagcttatataagatgattagagagaggctctctgaggatgtgaagtttgagcaggcacccagtattataaaaactgcccattgttccctaatttaacatataactaaatttaatacaatttgaatgcaaattattgggggaaggtgttcatctgaaagaatagccaaaaaagttttgaaaaggaagaatgaggaggatggttctcccagataacaaaatgttatcttcagtgacagtaattaaaacattgtggtattggtataagaaaaggtagtacagaaaagggaccacaggtctcttgcttaagcagctgtttgtaggccctggacagtttgcagttctctctgagctggctatatctacactgtgtatcttctcaagaaaatatcactaaaatactattgagcaaaactggtgggcatagttaaaggggtggcaaccttggatacgctctgatttttaaaaaatttgcagattttagtactttattattagttattactagatggactattactagatggactattactagatggactagatgctctttgtgatctcttccagcctcatcttctgtgactccgtagtcctctgggagttttatttatcctttaatttaatttaatttaatttaattttttttttttttgagacagagtcttgctctgtcaccccggctggagtgcagtagcatgatcttggctcactgcaacctctgcctcctgggttcaagcaattctcatgcctcaacctccctagtagctgggattacaggtgtgcaccaccacgcccagatacatctctagtatctttactaaagacaagctttcaccatgttggccaggctgttcttgagttcctggcctcaagtgatctgcctgctttggcctcccaaagtgctgggattacctgtatgagccactgtgcccagccttatatatctattaattttattccagcagcagaaactcagcaaagctctc

SEQ ID NO: 16750 - DNA, 2178 bp, Homo sapiens
aggcttatgttaaaaacttaatagatggctcagacttgatctgtttcttagaatgagagaattagttatttctggcttttatataaaatgtttaaatgtctgtaatttagtatcttgttgcgtctctaatattcccaagaggctcaaggagaggaactgtacagctattttctgaatatacctaggcccactctgatcctctgctattatttttccagtgtcactgcaaagataaaagccattgaagcaaaactgaaaatgatggcggaaaatcctgatgcagagtatccagcagcgcctgtttattcctactttaagccaccagataaaaaaaggactactccatattctagaacagcatggaaatctcgaagatgatggttgtgaattactgtagcagcaaaagcaaattggtctccacacctaaaatcgtctgcctgtgtactttgtagatgtgaatggtactattcaacggagcacaatcacatgttagcatttggtaacataatgtttttggatgttcttatggatgtttcttccctaaactatgtatggaattgagcatcatccagaataaatagcgttgtatcccaaattgtgatttgaaccctgggatgctctaattggctggttggtttggatttgtaactccagaaacattctatagtgtgccagagcaaaaggcaaatacacaaaatattatttaaatcaggaaactaaaaatattaacatctattaaaaaattgagcatttttctacgctcgtgtgtcttttacaacataaagaaaaagtaaaaggcagggagggaagtgagagacagattttaaatcatgttcagaactgttgttccagaatttactacggcaatccctccaactggactgaaaaagagaaagttcttggcaaaaaggagctgattctttgaacaaatgttgtagtaatctgtttaagaattatgcttattgtttcaaaatcccaactaggaaaacatggtgtatatcttaaaattgtttgtgttgacaaaactagaatcaaatttaacattttataccacaacacaagttctatttggaaattgaacttttattctatagcaaccatttttttcaaatctaaataaccatgccttctataataacaaatgttgctattatcatgggacttttaaaattacatttattgcatgggattgtttttatagcatgagaatgttctgtttggaattatatcatggtcagtctaaatagaaaaagcaaaatttctttgaaaacctaaacattgctatattggtcactatcaaacatacaattttctaataattgtgtagcggtctaagtggaagagattgcattatcttgtgcaggacgaggagaggacatgcagtgggcacagaaagtcaatggaacagatgccactgtggcaccaagactgtaatgactctgtgtggtaggtagttttaaaggactgcatgccttggaaatgattcttcacttggagaacatacttgcctctagatatgtttgtcactctaagcatcctgaatataacaatagagaaagataagtcaaccaacagatttagggatgtgtttcttcagcacattttggtcattttgatgccaagtttgacatactgtttaattgggcagcacctttgctcctttaccaggtatgtatcactttgttactccaggtgccattcttggtgatgacagaatgtttatcactatcgttgttagcaagaggaagctttcaatataggaacttaacatcttcccatgagtataaatgaatttaagacatttgaatcaaaacttcagtagagggaggttttagaattcataaaactggtttaaggaaattctttttacttttcccaaggttaatctttttaaatatctctagacatcaaatactttctgtatgtattagctgtgtctgtctatgatgcaagtaactctcctcctatttgggggatagttcagagaggtaggagcattatctcccatttttctggtgacttcttggagtatagaattcaccattttatccgtaagtcttcaaaggattatggtggactagaacttacatagtgcaaaatagtcttctatttttaataggaacttagaaaaaacttagaattatatatagagttgtttcctttagaaaccagagctat

SEQ ID NO: 16751 - DNA, 1146 bp, Homo sapiens
tctttatactagcgtcttccttgtatccctttgctggcaagggaatacaaggcgtcaagaccacagatcaaaacaccccacatttgagtggagtcttatttttactccaagagcagttattcccttctagtctaaaattggcagttttttcttttttttaataaaatttttaaaatattcccaaaccagtggaacacagacactggctgcacttagtactgccaaaagccaaggtcatttgcacatattccatcaacctgtcgagaattaggcctcactttataacccaaggcatggaagtgcatgcattctcttagctgggcaaacaattatactgtagttgtgatacaacacatgtggcttttatttgtactgcacatatccactgtacagccacttgggagtatcgtggttagcttgcagcaactgctgtctgcatttatactgtttattgcatattcttttccctggaagtgaaagagaaatgtttttcttgttgcattgattacattttataaatttgcttagctggaaagtttgggaaaagaggcctgtttgtcaattgtacaaccgattgtgaagctctagtgtgaatatttttacgtctgtattagacattttctttgcaaatctattgttcgattgaaatgtaaatgaaattaaagatggtgtacacccatcatgtaaaaagcaggcaccatctctaagatggatttaatgctcatttttaaggcatatactcagcttctatttaaaactataatttaaaataattctgtacaatgaaatggggaatatatatgggaataaattctattccatttatttcaatttgaatttccaaattgtaatgtttccctttgtgctataggaataggattaaatgggggaagactaggatttataaggcctgtatatggggggagggcagagatggaacaatgagggttgtgatgatagtgaatagcaaagagtgaattctgtgtgtttttgctgtagcactgaagtgaagagatattagctttggctgttcacaaaatagagcatcatgattttcagtgtttgagagaaaattgatggaaaaagtttgcagtacttgacatgtatttgcatgcacaaaataaaattatttgtccaccttaaaag

SEQ ID NO: 16752 - DNA, 3542 bp, Homo sapiens
tctactaaaaatacaaaatagctgggcgtggtggcacatgcctgtaatcccagctacttgggaggctgaggcaggagaattgcttgaatccaggaggcagaggttgcattgagccgagatcatgccactgcactccagcctgggcgacggagggagactctgtctcaaaaataggaaaacaggacttttctagttacttctgatacttctagtgataaagacatgtctttgctagagactcctaaagtttgctgtagctttcattaaatatgtatagtcacccttaacagtttgcacttaaagctaatttgtttttaatgtcatttcttttttctcagggaggagcaaaaaacaattctgccggtaacttcttgctttagccagccactcccagtgtctattagcaatgcaagttgcctccccatcaccacatctgtcagtgctggcaacctcattctgaaaactcatgttatgtctgaagataaaaacgactttttaaaacctgttgcaaatgggaagatggttaacagctgaaaggaggttcatctttcaaatttgtgaccacaccatggaagcatttacactagctttttatatatataatatatattatataatgtatattttttttaaaaaaaagatattactgggggcatccatttcctgtggactctttgatacttcaagccctcttgcattagcattatgaaaaaaaaaaagaaaatttactttactagggtaacatgttcactttccagaaatgattggaatttggacaacatttaacttaagcttcaagcagctttttatgagtttgtagcaatccggtgcagtaactgagccatttcctattttaaatggcttctatagaaaattaacaactcagttattaaactagcaggatcctacaatgatacatctagtgaaagtagacttagttaacttatttatttctattttatgtttcactgagagaagtttccatctcattccagctgctttatttatctttttcatggaactttgcatggatttctttttctttttttaattttgaagagtggagttagatgttcttaccatagaattttacagggttatatactagcattctttactgcattatatgtaggagtgtggtgcagtgcttttatctgtagcatataatttttttttaattttccatttttcaagagtagtttctgctttgttaatatttatacacaggctacttgttgaagtaattaattaaaaatataaccaagtgcctaagtctttcagctgatgtactagatattaaattctcctaagttatgcagaatcgtttttacaattttgataaattatgcactaatgtaatggcagttttttaaaatgcagatttaagcctgtacattattgaatctgatgacttggcaaaagaatcaggtgctttcagctttcttgagaaaaccctgtatgtagcgtttgcactgactaacaagatggtattgctgggtttttaatttaaactaattaatttggttgttcattgcattatcttggttaaatattgtttattgttacttcatgttggggtttagtttttcttgttttttgactgttaggttgataagactatgaactgtgtaatagtagaacagtggctaacatttattcatacttaagaacatgaataatttctgccttgctaaaatgtgactgaaatggttttgacttggcatctgaaagtatacaatgtgttcaacaagtcatgcatcagatttgtgggaggtattgtactgaaacctaaatttcagtcaacatttgaaaagaagagctgggcattccttcctggtgatctttacctatagtttatctatctgtttttcttctgtttctttaagattagtttgacttttattattatttttttaattaacttctgtgaagttgtttactctgaaaattgtactggaatattttaagccaagctgatctttcaccaggtgtactgtatgtaagggcttttcctgctagcaagatgcttaaacaggatcatgttattggtcgtctgagctatttagttgttttacaaaaccacagcattgtatcagataagattttgataaaaagttttgtgcacatttccaggggcgggagggttgacatttccctgaaatttcttgattagaatgagtaaatactggtgtttgatacctgtcttaatgaacatgctcataaggtgactgataagttgtaaatatacctgagaaacaaaggggtagttttgatattctggtgtcagtatggaagatcttacacatttatttaatactcaaatgtatgaagatgtttgtttgtagcataacaacagcacagtagccttgacttagtttcctttggttagtactgtaccttttttgccatggccagtgctccccatccctatgaagacattttatttatttcactctgtaacctgaaatgaataggaacaagggttttaaaccatgttacattaacttttctgacattataaattagcctagaatattacaggaacatgattgttatataatttatatcagaacctttctataaatatgtgcttattacatttgaaatgcttccaatgtactttatttgctgtttgtaattccaaaaaggatatgcaaaccagtctgtctatttcatggatatttaatagtgagatcttccatgttgaaggtaatgtatttttttttaagattttaaaattgctattttgttacaaaatagagacctattaacagtttgagagctccttatgtgccctcagggaaagaaccctctgtgcaacagaactacacaaaacatcttcagcacgttctgagggtgaatatatactacataaattgatcttgtgtatttaaccttatctttttaattttaaaattgaaattttgaaacttggttgtgctctgctggagggggttgggataaactgcttagatgtttgcctacttgtccagtgaaattacatttgcatcagtatatgtatatacctgccaaccttattggtatgtctcagaacatttatattaaaataatgcttgtcttgcagcaggtgatcccataaaacaataactccctgttcttaaaaacttactctctttttcactaacaacataggaattgtttctgtgttgagattattctgtgttgcatccattctctatgtagtggtcaccttctgtctgtcatggtgggcttaatgtgaagtaaagccattggttctctgccactttcgaagaaagggcagttcatctgatccttcttcagaatggtacctactgatatcatcgaggaaaatgttacaaatcagacctaggatatgactttttaaaattgaggcatttcccgtcatttggcctttttaccaacaagatgtgatgtacaaatttggaatcaaaggatacaaagcaacaagagaggaaatgtgtaatgtgggtaaccaaactgcatatgttacctattgtctaatcagaaaaaatagtctgaggtctggaaagcaggaaagt

SEQ ID NO: 16753 - DNA, 1392 bp, Homo sapiens
gagttttttaaattatttttttaaattatataatccttttacagtttggtaacaacagaaaatggcttcagctcttgcataccttttctctttactctgtgttctcaaccaaatttgttgccagttcctgtcatttttacataacatcccttatattctagttatacaaaattttcaaatggtctctttccactccctcaaaaggtttttttgaatacattcttggacaaagtggcatgaggggaaaaaaaaatacatataaactcggcttgctatattaattacatgtatattatatgtgaatggcatatatattttcatgtggcatctgttgcagtagaatttgatatagactgtatttgattatttagctgaagaaactttttgtcaaaactgtttcctcctttttcaatctattcccattgcccattgccattttttgtcttgagtaagatttagtgaaatattcaccaatctgttgattgtttttgaaacaggtatcgattaaggaacaaaaagatcaatgccactgtaagaacgtttcctcttctaaataaagttggtgtaaacaacactgtcacaaccacagccggaaatgtcatttctgtcataggaagtactgaaacaacagggaaaattgttccaagtacaaacggaatttcaaatgcagaaaacagtgtttcccagctaatctcacgtagtactgacagtaccttaagagctctggagaccgtgaagaaagtgggaaaggttggcgctaatggtcagaatgctgctgggccctctgcagattctgtaactgaaaagtaggtattaggtaaaaatgattactggaaattctttttcctttttagaaatgcctgagtgtttttatttctgctgatgaataccggttaatcagaatttttatgcagaatattttgtgatgtagaagaaacactaaatactaaaaaatttgagttctagtttggttctgcaactgaatagccctgtgaacttggaaagtgggaaagtgactttaactctgagttttgttttcctcaactctcccaaagagactggaccagaattgtttttttttcacaccttattttcttgaactgtagtgttgattccatagaggtgccagaaaagaactaaatagaaacctaagcaggtaaaatgctgagcctctagctctgtttcagtcagagcgctttcactttatactctgtaatgaggtgtagcacttggccgggtgcagtggttcacacctgtaatcccagcacttttggaggctgaggcatgcagatcatgaggtctggagatcgagaccatcctggctgacatggtgaaaccccatctctactaaaaatacaaaaaaaaaattagccgggcatggtggcgggcata

SEQ ID NO: 16754 - DNA, 1100 bp, Homo sapiens
cctggcctcctcacctttctttgctcaggaaactcctgtttattgtgcacaaatcaattcatgtagctttcagctgggagaagccttttctgaaatccctttcttctccctaatttaattccctttcctctttgttgccatcaagccttataacttttactataattttctacttacaagtttctctttcttactagtggctgaaatcattgaaggcaaggattatgtatttagttatgtaagttctgttttgttccagaaagaatttgtggtcaggacattatcttatctttgtaccttatttctgtggtgtctgatatgtaagtatcccccaccctccctgaaaaaggaataaacgaatcagttgaagggagaaagcacagaccaattctgatttttctcttttctattttttaggttaccaaaagagatgaagactcttccctaatgcagctgaaggaggaatttcggagttatgaagcattacgcagagaacatgatgcccaaattgttcatattgccatggaagcaggactccgtatttcacctgaacagtggtcctctcttttgtatggtgatttggctcataaatcacacatgcagtctatcattgataaggtttgtgaaattagagatgctgatgttctatcattgctgttacattgaagagtattagaatattctaaagagtctatacacaaacagttggagattcctatgtttttaaatgtcagactcttataaattatccttattttctttttatttttctacttgcaaaataaagggatgcaacagggaaacaaatacatgatactagcataaaagcagtgaggcttacaaagtctcaaatttatctatattctgacctcagagagttaatacagcttataagttttctaagtgtctaatgatgaatttcatagggcagattctgaggtgaaaatttaattcatcactgatactcctactgtggaatctgaagacacttgaaaacgtattaaatatgttgataaattgaaagtatttgagtataaatgtgtcataagaaccaaagtaaaaagcattctcatttctgtttgttagctacagtctccaga

SEQ ID NO: 16755 - DNA, 1100 bp, Homo sapiens; identical to SEQ ID NO: 16754

SEQ ID NO: 16756 - DNA, 1202 bp, Homo sapiens
tgattttcagtgcctcattttgcttcctagccaagtcttgtcagagatttcctctttcaggtggcaaagctgttttcttcacacttgagtctctacaatattgtttggatcagtagtttccaaagttcattaactcctggccatactttattatgttttggggtactggttatccaagggaaacacttttttaaacaacaaaacaaaaaaaccgcccagcagtccaaagtaatttgtgttcctaaaaatggaatatggaaagttaatttgcttgtttgatgtggtcgttgagaaaaatacataaaagctttgatgtttattatgtgagcaaccaatataaatacagtttagttgaaaggaacactattaaggtattgtttccaggcagaatttcagaaatgtaattaattcagcaaataggttttttaaaaaagacatccaaaggttataaaattatttagaagtattttaggtctgaagctgtaatagttgacttaagcaattaactcttcaaaggtgaatgatgaatatgtggttaattcatacttttgtccatttctagcttacaaaacactacacagcaaaataatgatctgctagactgctaacccgagcatccagcttccacaatgcctgtgcaggcagctcaatggacagaatttctgtcctgtccaatctgctataatgaatttgatgagaatgtgcacaaacccatcagtttaggttgttcacacactgtttgcaagacctgcttgaataaacttcatcgaaaagcttgtccttttgaccagactgccatcaacacagatattgatgtacttcctgtcaacttcgcacttctccagttagttggagcccaggtaagcattcaagattttactataggttggtgcaaaaataatcactatttttgccattattttaacggcttgtccagcctgcaggctacatgtggcccaggacatctttgaatgcggcccaacacaaattcataaacttccttaaaacattgtgagattttttttgtgatttatgtttatgtttttagctcatcagctatcgttagtgttagtgtatcttatgtggccttttttttttttttttttttttttttagacagagtctcactctgtcacccaggctggtgtgcagtggcgtgatctgggctcactgcaacctccacctcctgggttcaagcgatt

SEQ ID NO: 16757 - DNA, 1110 bp, Homo sapiens
tgatttttacatgatccagccaaagagtaccaattctatgcaatagtgagactctaccctgtcaaccaaacagcattttttggtattttctgtcaacatcatttcttcacagggaaatttcaagttggagtgcttcgtttgctcacattcatgtcttgtttttgttactggtttgaagactaaaaggcacgggttcaaataagattggtctctttggttggagactatttctgggttcattcagttgttcaagaaacattagttaagcacctactgttgctagacactatgctagatactgaggataatgaaggtaagattgatatagtccctgccctcatggagcttatagtctcatgtggtcttagtgaaacaaagtctcaatttgcttttatactagaaataataaagaaagctgccttgctgtattcgatcagttaaaatcagcaactttgtgcttttgtatcagtaaaacatttagttctcaccttttgaaaatgcaaaccactgaagtgatttacagtctcctccatttttggctggagaggtgttctgtttctgtgagacatttttctaatttttgtggaacttcactttcctccttctttgcttatacgtgtttgttagattatattgcaaagaagtcaagttactgatatccagtattttacagaggaagatgactttcaaaactagtcatatttctgtagaggaggaagatttttaaaacctttatcattcagcatttgtattttatggatccccaggagaactaaaaaggagatgactctctaccatagtttggtttaaaaaaaaattactctgtcagttatttatttattatttaatactaaactccaaactgaagtggctctgaggtaaatcagatatgattttaatttaagtttctttattagcagatctataaatggaaggtgaccaatgtcactgcttctaaaatactgtcctaaacaacccagaagattttatttcagctcatgaatagctgttctaaatctgttgtatgttagacatactatgaactacctcttcacttattatggggaagtttccttaataaaagtgtgacgattaaagctctggtgtcat

SEQ ID NO: 16758 - DNA, 1139 bp, Homo sapiens
tggggcttgcagtgagccgagatcccgccactgcactccagcctgggcgacagagtgagactccgtctcaaaaaaaaaaaaaaaaaattagagggtagaaaacagaaggctaatacttatatatttttggaggctaagacttgaattgcaacttagcccaaagaaatcactgtaagtagttagggttatcctgaagggaatatgttttatttatttttttgaagtctgaaatatcttggccttgaatagcatgaaattcccttattatctggaataaaaaaaaaccctaagctataagtagtgaaagtcttaggaaaatatttttgaagcatttaaaaaaaaattctgaatatgttgtgtaagaagtacagtgtaattgaatatctggcagacattctatatgagtatctttatggtttttgtttttcaggcattaaaaaatatttaatcattcatgtgttgagactcattcttgagttatggatgacaaggcttctgttggaaaaatcagtgtctcttcagactcagtatctactcttaatagtgaagattttgtcttggtttccaggcaaggagatgagacaccatctacaaataatggaagtgatgatgagaaaacaggactcaaggtaaaactccctaacctaagattgttttgcttagcttttctaagcccattgcaaaacttggccttaacagaaaacagatatgggaggaaagtgagaacatggaagtaatatacttctttttctttaaagaattttatttgcacttagtgagaagtttgtatttgattaaagattttcactctgattagcttttcctaaatttttcaatacccctaagtgtcaaaactagtggttatagtataaacatttgtcattttagtattgttttcacttttccattgaattacaagtacttgttttgtttggtcctggtttacataatgtaagggcactggcaggtcaaagatgctatttatgaaaatgtgttttaggattattgaaacaactttaaatacctggccatttttttttttataatttctcagccactattacttattttccaatgccctattattgttctactctttattgatataaataaaaacagattatctgttaaagttgtca

SEQ ID NO: 16759 - DNA, 1165 bp, Homo sapiens
acagaaatcatttgcatatctcctggacacaaatctataggttaacatgtaacttcagagtctgagtccttaattaatagtaagtagctaagtcaaaatggcatattcatctagaaaattaagtaatccttgggtggacatgttaaaccaaagttgacagacaggcctgtaggtcaaacctggcctgtcacttgtttttgtaaataaagttctattggaacacagccaaactcactcatttattgcctggctgcttttgcactataacagcagagttgtgtagttgtaatagagacaactggcccatatagcctaaaatgtttactatttggctctttacagaaaagtttactgacttctgtattaaacagtgcttcaagatgatattgaaagagcatgttgccactatcgtggccttacttccatgatagggttaatttattttaagaacccaaatgaacattgcaatgataaaaatctgctctggctgatatttctatagctcatgaacatcttattcccccatctccctttctgtgtttttactttggtatgtgtgtatatatatatttttgtatagccacctttctagttttctctgtaccttttcctatagctctccctttttattcttccctatatttcatgctaccttccttatatggaaggaagaatgttagtatacttacttacatgtaatatggaatgttaatgtacttataatgtgtattgtagtgtaaagttttatattcctggtttaaatttttaatttaggtcagtttaaattatatgtttgcctcaaaataaaactaaaatacaatcagttggagtaatcaacatttttgtggttactgttgatgtgttctctgccattcacctccccctgaccccaccccaactccaagttgtagctttcagttgaagaaaaagttctctacactgttttaagcaaaaggagtggggataaaacactggaacattattagaagtaagaattttcttagtcttgaagtttatgttttagagtaatttaaaacactttttctgtgtagttttatataggaaaccttgaaggatgccttcactaatttgggagatacagaactgttagctctttagttgacactggttaaacattggtagttggatacttgacaatatggtt

SEQ ID NO: 16760 - DNA, 1178 bp, Homo sapiens
ccaagggtactttggcagggggtgctggggaaggggctggcctagggccaggttcatcataccgttagccctgcagccccatgcctgtgtgtcctggtttacccgccgtgtagtggtcctgcaggagtggagcctgtaggacttgcttctcagcggctccaagcagaactctgtctgggaaggtgggaggtgcagccagtctagacctgaagccctcacactaaggactaaggtaggcctgctcagccttagcccttcgtcaggcccaagggtgggggaggcaggaggaggctgagcgtagtcgtggatagaaacctttccctaccgcacggttacacacatggcatgggactcctggctgtagctcactcgggtctactgaagaccaagttggtttttagaaatctatttaaaatatctatcatgtatctatttactgtgtttttctgaatacgcaagtgtaaatagtataatttgcagtgcaaaatccttggcaataactttgtgtattatgtttaaaaacactggaaaccgtgaccaccatggactgcccttcccctctgaggcaattattacatgtaggactctgaactttaaaccttcagcgtgactgaagcagcagcctgcacatgtggatggtcatcagtgcctcgcccagagatacctggccttcatccaaagggaccctgctgccacaagtcctccaggcagcacccgcactgtggctccttcgcactgagtatgttggactctgccatagactgaccctcttgtctggctgctgcagtttgtctgtaatgccctgacatgttgcattctccccatttggataaataaaaacaaacaaatgcttctgtcacacacagtaatggattgttctgtgcaagacccactgataaaatgaaggatacagctttggtgaaaggttcaagtgcaggctcccttttcctggcccttaaggctctagttcagtacatgttacaggttcttcccttcatgcaaagggatggaggggccgaggatgtttgaaggggggtggatggctcctgataatggacagtgatttgggtggggccagggcctaattcatgatcccgttatggtccttaaaaccctgcctctctgtggtgtgaagtttcctcaacatgaaacatgaacctggcaccctggcacagtga

SEQ ID NO: 16761 - DNA, 1207 bp, Homo sapiens
cctagaaagatgtgaagctacaagggtcacactttcggagcaaattttcttttaggcaaagtgcagagcctggagctacatcctttatatcctctggcacactcgggtgtggtcaaggcttccccatattttgaactgagccgtatgggtaactaggaattggagactaatgcaataataagcttacgcaggtttccttctaaattcaaactctctagttcctttgggtttgggtttggccatttgcttttaactattcagctggcttctgggtctcctgaccatctcatcctctctgtgacttaggtctggtccatttatccaagtacattttggctcactagactcactgtactatgtcttgtataagtgccaaaacatctgccgcttggggcagatatttaaatctgtgtctttcttttagacatacagtaagtttcagattcttcagtaaaggtttgctagagctcgatttttcctttgaaaatactttaatatctagattctaagttacattcatgtttttccttggtctttttttctctcttgttcctccctttcctcctttaacattatactttcaccctgtgccctctgagcccccacatcagaaagctcctctcttccacgtgccatataactgacttccaaagctggtgaaatttgatgcccccatttttcacataaaagatttggtttttaaatgttactgtgatgcaaacctactaaaacgatgctttattttggctgtaaggtaaatatgtcttttggcctttgtaaagctgttgcatgtggggtaatttccctctgatcatctggtgctcttgaatacctgctgttgctgctttgtgatttctccataggttaaatattagcataggaagaggagcagatttcaaatcatgctcgactatgcagaagtctgtgaggccacaagaacgtattaattacaaattcagaaagtaattaatctttccagatttgccatgccaatattggccatagccattaagaagttaagtaaacgcctggccatggctccagctggagctgaggtctgcatggaaagctatgctttgaaccttgacaacccgtttctcctggaatatgtgatatgccacattgagaaccaatatggatttctacagtcgattagaacatgattcaatagcattgcttttgattttcagaattcatggtagctcac

SEQ ID NO: 16762 - DNA, 1105 bp, Homo sapiens
gtgtaaaaaaattgtcatcctcagtttatttttagtatatctcattgatatgagacataattgatttccagttttccttaaagatggttagagattaaaatttcttctgttaaaaaaattgttaatgctattggtcccagatttcccttctttgcatcctgccaaaggaaaaagtgctctgtacttattttgtgccctgtaatgttatagatgcttaataagatcccagattttaagtagcagctgtcattgatttgtttactgaatgaatttttcatgtttcattgtatttgtgcacagaactactctgatgactgtttacttaaataataatcatagtgcacataatttttttaaaaagcaacacagccaaatgaggaaattttctgggagtcttattagttcactcaaatgctgttattctttttattttttattgtttgataatttgataggaatcgcttggtcaaattgtatttgtctctctttatcccattttactgttagaaaatgtttcgatgaaagatcctccggacttattggacaggcagaaatgcctgaacgccttggcgtctcttcgacatgccaaatggtttcaggttggctttttcttactatcttattgttattaaagtttgtccaagtttcatttggaacacctgccacttaattggtttctgtgtactacataaaatgaggggtgctttctagctcatagtgtggttgttggagtaattgagttaatttagatatgtgcctagtatagcttctatagttcatgatgttttattataattctttttggcttagtattctgaatttcagatggttgcttataaaatcaaacatgactgagaaaagctaaaggttaaattaggtagttgcctggagtggggttgccatgagactacgaaattaattttaatattatggtccttttatttttaaaatgtacctttttaagccttaattttactacttgtgattaattgatttttttgtttgcctgataactgatgaataatttgctacttagtattcacttgaaagaacttgcccaaaatgaagaatagatctcaatagggatatctggaatcattttgtt

SEQ ID NO: 16763 - DNA, 1138 bp, Homo sapiens
ggggctgcaggcacgagcagtgacgccctgctcgccctcctggacccgctcagcacagcctggtcaggcagcaccctcccgtcacgccccgccaccccgaatgtagccaccccattcaccccccaattcagcttcccccctgcagggacacccaccccattcccacagccaccactcaacccctttgtcccatccatgccagcagccccacccaccctgcccctggtctccacaccagccgggcctttcggggcccctccagcttccctggggccggcttttgcgtccggcctcctgctgtccagtgctggcttctgtgcccctcacaggtctcagcccaacctctccgccctctccatgcccaacctctttggccagatgcccatgggcacccacacgagccccctacagccgctgggtcccccagcagttgccccgtcgaggatccgaacgttgcccctggcccgctcaagtgccagggctgctgagaccaagcaggggctggccctgaggcctggagaccccccgcttctgcctcccaggccccctcaaggcctggagccaacactgcagccctctgctcctcaacaggccagagacccctttgaggatttgttacagaaaaccaagcaagacgtgagcccgagtccggccctggccccggccccagactcggtggagcagctcaggaagcagtgggagaccttcgagtgagccgggccctgagggtgggggatgcaccgaggcccgagggtccgtccactgctgcggttccgaggctcccccgccactctctctctgcccaggttctgctggtgggaagggatgggacccctctctgctgccccctcctcccctccacactgcccatctctgatgtctggccctggggaatggcaccagttccagcctgggaatcaacccagttcctgagtgcccatcccaccccgcggttgcctctcctcggcacccttgattgggttttgcactaaagaggtcagctgggccaatgatattgctccagaccgagtcctacccaccttcccccggaagtgtcccaagaggctccgaaggcctcccctccgagcccagctctcctgtctcctccacagccaggccctgcacgcccacctcctcg

SEQ ID NO: 16764 - DNA, 1261 bp, Homo sapiens
ccaaggcctggatctcttagatggggcctaaacggagatttagggacttttagtggagaaagagactgggatgggaagccagcaggggagcctggccctggaggaccccctcattataggtggtgacatctcaccagaggaacaggccgaaagttgtggtggtcagagaactacaaaaatagcagccctcatactgcttcctacacaagaggaacgggtggttccagggcagataagaatgactttacaagatgaaaatgatcagtgagggcacacaggtctggagaggagcggagttggcattttttggccctgcaaatagctgcccatctgctctctgtcagaatatgttaggggtgcatctggattgctgcccctgagtctcggctccaggctggtcatgtggttgtctccacgacaactccaggagcggtgtaaacggctgcgcttggagccagatgctgctctgcacatgtggtctaattaaacggtgttccctgtctccctccgccctcccctgcccctcccagcacacacatacattctctcttttccatccctccctgcacccctcctccttacatcctcagtcagcctgtctggctctccaccctgtgtgcctcttcttcagaaatgttcctgttgcctgatttgcagtagaataattcatgcaacaagcatcagagcgcttgctctgacccaggcatggggctagaagctggaggtgcagaggcgagtcagacacggcctgcccctgaggaggtcaccatctagtaaggatctgaccggcagccaggcaatgtaatgcatggcaataaatgctacagcagaggtgagcgtagggctgcagagcccagaggagggacactgacccagccccgggcaaggaggaagcatcccagggcagcttgccctgggttaatcctccaagggtgaagggcaagggggactccccagcctgagtggcctccccacagagggcccagcacacacaaaggcaggagacttacagacctacctggagaaccgtggctggccccgtgttatgggaatgcaggaagtttggggaatgaggagccgcggtgggcggggtgggcagggtcacaccttggggggcttctccccaactccatactctgcttgcttctgcaggcactgaaagccaaggaaatgggagcaactcagtggctgcctgagggggacaaggggccctgagtgaatgaagcctcctgggcatgtttccctcgatgcagtcctgccc

SEQ ID NO: 16765 - DNA, 4122 bp, Homo sapiens
gttacgggtaccagcagagtgatgattttggcccttgatggatctaaaactcggaacattactcctcaatgccgtttccccagttgctctgagaaggaagagacatgttcctcaggaaaagctccagctagcatgtttttcacgtcagtgggaagattcttgtgtgttcgtgtgtatctgtttatttctaagttcacgatacttgttcccctgaattttatttaaccaactagatcacattctttggccacaggtcagactctgagctgctttcctccagatcgggaaggagacacatatcacagatgccttctctaagacagctcctgtgtacagcatcgttctttgctgaggcctctatctgtccaattattatttttgaaattgcttttcaaattaaacattttacccgttgtgttgggtgtcaaaagaaattgctctctgatgaggcaagaacatgtctctccaacaacgtagtattgaacagagcaagttgttaatttgtggagtaggggaaaggttctgcaagttgccattgtacaaatccagttttacaaatgtttgcagcagattccacagaacaaagagcccattcattgccgagagccctgcagaatctcagagcaaagtggctgtgtgttccgagccggagcctgacctgtggaccgtctttaatgtcttctgcaccagtccttttatgacgtgggctttttttaaacagggtaaagtgaatgtgttgcattgcaaactcaggtattatgaggagaaggtaggagtgtagctagcagcgtggagacattaggtcagccactagatgtatttgtgaatttggtttgaaggacacggagaaaggttggaggggaggtttggtgtgtttgttttttgctttcttccccataatgtttggttaacaggtagcctttttgcgagtggaaggagagaaaagttgtgcatgttttctctaatttctctttctgccctctctctgatccccaaccaccaaaagcactcactttgagtgaggatttttttttttttttttttttttttttttgaggcggagtctcgctctgtcgctcaggctggagtgcagtggtgcgatcttggctcactgcaagctccgcctcccgggttcatgccattctcctgcctcagcctcctgagtagctgggactacaggcgcccgccaccacacccggctaactttttttgtatttttagtagaaacattgtttcaccacgttagccaggatggtctccatctcctgacctcgtgatccgcctgcctcggcctcccaaagtgctgggattacaggcgtgagccactgcacccagccgagtgagaatttttatgccataaaaatacgactctgaaagctacatggaaaaggagaatcccacctccttgcactacattgaaacatgcaagcctttccctccctctcctttttgatgttttcttgtcccaagacaaaagtttggcatcttggaacttattcatgctctctggctgcctttgtagacttttggagtcctttgcaaggtttggtggtctcgtcgttaatctggagaaattccccagaatctgtctcaaagcgctcaacctggctcagaggacacccagcccctatgccccactcacaagagaggtgggcaagcccccagggataggaggaagtaagcaggatcctccctgtcctgtttcccagaaccagagcaaggaatggggaatcctaagggtttctgtggcatcactgaatgtcacccactccacatcaacctgcctctcacctgccaccctttttcagggaggtgagtacctgccatggtcactgttaccagatccttaaaatcctgggctctgagctaggtgcattgctctgttacccatttcctacatttgtttgtttgttcttgatttcctgggggaatgggactgatggagacagacaaacccactgtgggcagcatctaagccatgtccaaggttggtcgaattaagggaaccctggcctctcagcaggacagaaagctgagctgtggttccaggccctcctctctgggcccctggtgtgtatcttttttccttgttgcttttgaaatttttgcaattattttaagaatccagtctttcagaccagcccttttattaagctttgaatttttaattgatttttttaaagtaaaaaaaaaaaaaacccaaaaaacaaacaaaatttaacaaaaaaatccgctactcttactcccctgcctccccctaccccagcccatgagagttcccttgcactcccctctgcctttgcaactgatcatcctccctttctccttggcttgaagcatctatgtccagtatctgtgaaatgatgttttatctgtgtgtcaggatgagaaacggcagtcattccaccaagtgttggaaactggttagcctggagacaagggtttctggggccacagctcagggatgtgtatttaattacaggatccccagaaactcctctctaggctgccacagcaacattttttctgggcttgggagccatacctgaactgtttcctccaaggcgggaactccagagagcctgccaagtctggagcaagctggggcttctgctttggccagacctgggccaccatgagacttgaaggcttctagctgtcctacgacacgagccacggtggccctgcctctccccgctcatagaagcctggtccctctgtctagcccagttcccatctagcatccgtcttctgggcctgaagccctaaatggaccacagcctgcacaggaatcaactgtaggctcaaagggaggcggtgagtaaggtcagagcctgctccaagcccaagaacaaaagttgtgttatgggtggaggctagtcccccagatctagccctgccgtctttgccctttaatgaccattgttttctttctctaaaatgtcttgtaataggtgataatgttgttgattcaaatttccatgaaaaagaaaaaaaaaactacctcttaagcgacatcctggtcgattcctctctgaggaatcctgtgggaaaagaatactgtagctcctgctctgtttacatgtttctgtcgggaaagaagccccgcctgccctggggtgttggtgtttttgtctgtgttgccatcccaggtctgccataggggctggtggctgcattgtgatgtctgggctgtgtctggggattccttcccacctacccagccagggactagtcacccccctgaagaggcctccatttccttcctgtgctccagggcatagggagcaccactcccacagacaccacctttaagggctctagtggcacacacatccacgagcctacccccaggttacctgccctaggtccacctccacccacagtcctgtgtgtaggaatcgaggaaacgggatgtccctgagcccttgtctccaaagggccggccaagggctgcccgccagcctgactccatcaaccctccatgaccaaatgatagctggcgggctctgcaggctacccaggccctctgctacctcccaccctgccagctggcaagggatgggccctgttctgtgaattgactacctgtggaaatgtgaccaattagtgtgaaatgcatgtttagcaagtgttaggtactgtatttgaaccaataaatgtgaatccttctgcacatggcatctgtctgtgaagcttgtctggggttctggggagggatgatggcgtgtcctgaggcgccggcttgtgccttcagacctgtgtctcttgctcatagctgacacccacctcaattctgttgctgaggctctggcagaaggtggtgtctcggaactgcctgaatcaatgaaccagcactgactgaagtgcccaacttgtgtgccaggcaccatattgaacttcaaggattattctgttttataagtgaagaaactacagttgagtgaggtgaaaagactctcccaaggtgagtggcacaaccagagaagtgagcctagtggagaggcagatacagacttttgcagtgcaggggggatgaggttgtcattagggatgtatgtggggttgtaagggcctggagaaggagtggcttgttctatggaggatagtcaggaagagctt

SEQ ID NO: 16766 - DNA, 1824 bp, Homo sapiens
ttctcttgccccagtcactcagcaaggtgatactctgcctccaccagcccaaggaggctgacttgcctgtccactagagtgaccactgctaactcttcttctccccccttgttcccaggaaagatggtgaatgtgcccctggagcagctgcccctcctctttaaggtggtgctgcattcctgcaagaccagtgtgggcaaggaatgacctgttccaggcgccctcctcaggccaaccacagcgtcttgggtgggcaggacaggctctggagggaaaagccagagagaccaagatggaggctgtggagcagcatttcccgttgcctccatagcaagaagagtttttgtttgtttgtctgtttttttaacctcatttttctatatatttatttcacgacagagttgaatgtatggccttcaacatgatgcacatgcttttgtgtgaatgcagccaatgcattttcttacagtttacagaatgtgaagatgtttaatgttacagtgttgtcattgtttagaaatagttcttttgtattttgagggagagggtgggatggggctaagatgactatttccataatgttgacaaagatgactacctcaatggaaatggggggtgtggccatccctactttttccacattttctcagcagactcatacatttgtctgtcagagagcaaattgccttttttagccacagaattgccagataaaacggcacactgtaagggggcaaagtgttgttaggagattcactaagcaaggttggtgagacggcaacagggtaggaggtgaggattgagccacgtcctttccttggaaagcgtgaaaattaagagagtagggcacagtgaccatatttaaggcaggtgtccttccacccaacaagtcctaagggcagaagaatttctgttctcacaccttgctgccccccttacccctgcaccaccatcattgtctaccactgcgaactttccatctaggcaaagtcctggcaatcacttgatccacaggactcgcctcccagctccctcggggcccccagctacctagtttccttacctggatctcctgaggcccaccttcctccttcccactcccttacacatttgacttcctattggccctttgaaaaaccagctgagcagaatgccatgttctgaagcctggtgcccactactgatttattctcctttcaccttgttttcttcaaagggtagtagggcaaggccagactgcaaaaagaatagacactccccttttgaaatctgttcctctcccctccccttcctaccgcaccctcaggtctaaatccgaaaacttcaggcttttttaaacaatgagaaggaccattcacctgtctgctgaccagaaatgttgcccctaagttcttctccaagttctccttttctctccagagtgagaccagttttcctcagggacccaggacacaaagcccaaggcccagagtggctcagctgccccttacttcagcagtggactggccagccaaggcctggagggctggagccagaagcacctggaagggaaggggggctttaaactacctcaggttcctaatggcccggctgctacctctgcagacatggcctggactccttgacctctcactacctgccccaccttatcccaggacgtgttccttaccctcttgactttggccagcgctacaccaggtctgtctttgaactctttcaggtgcttgtcctgcctacacccaggtatctttcacagccagtgtggcaagcagaccacttagttggctgcatgcctgggtaggttggaagggcccacggcacctt

SEQ ID NO: 16767 - DNA, 1305 bp, Homo sapiens
ccctagaatgtgctctatctcaggaatcctctttcgaggatctgtgacgggatctaggtcagggaatgtcccccctgtctctggcaagccaggctccccttggccagccaggtctcatctgacacgttttcttttcctgcccccacaggccttagcagtaggaggactaggctccattataagagttcttacagcaagaaagactgtttaaaaaaaataaaaagactcatgttaccttgagaagaattctggatgcccaggctggtgaagaagggattgacaatggaccatcttcctaggaactcccaagtaaactatttcaggacatgtatctgctgaaatgtattttattttcaaggtggaggggaaaatcgtctgtttcctaaatcctgtttaggatctgatagtctatgcctttgtctccgagtactgcagaactgacattttgacggtctaccagcgtggcggctggtgttggtcagatgcacctgtgtgcactgggggagggatggtttgggcaggtgcagatccaagggctgtggtaaacgggagagcttgtgtttttgaagtggaaaaaaacccaagagtttgtacagacatcctgtcttcccagagaaggtggacactcttgggctcattgtaaagtgcctgctgcatcaataaagctcttggcttattagtctatacattgcggtgtgtttcgtgtatgtaaaaaaaaatggtaatgaatgggatggtaatgaatgagagttcagttgttgttccggaaacccgatgtggaaggagtagacctgtgtccctgttgagccacccctgggagcgagcatggcaatccacaggccctctgccacaggacgccagcctcggcctcagagctgccggctgctgcagagaggtgtttgctgaataaactatttattgtttcttattcctttgatttgtatgtaattaattttggagcttatttaattaatttaataaagtgccaaacatttaataattgatctaggctttaaaagtcttcagtttgtgggattgcacttggaatcttttgagggtggggcctcagatgtgcctggtcacgtctcctgatgctgggttggctgtgctgcagaatcactgctgcatggacaagctttctttaaagaactaaacgtcagaaatggggagcaatcaatcagcaaatagatggtataatttggttccccataaccaataacagagcttctctgaagggcaaaaatgcttttctttccttttcagcacatgtgactgcagcttgcattctgttaaaggttagggccc

SEQ ID NO: 16768 - DNA, 1181 bp, Homo sapiens
cagtctgccttgtctgtggagctgctctctctccctcatcccaccccaaatacttaaaatgacactacacccagacggcgcccagctggctgcagcacttgtagcatgcacatgactctggtagtaaccaacaaaaacttgttttatggattcctcgtttactgaggaaagggaacatgctggttctggaaaagccacaatattgaatctaaaaggaaaccgtttattgtttgatgaaagtttcactggttaaataaaaaactaaattaataactggagcctctaaatttattatccattatccagtgatggaaagttgtatttctcaatcatgcttagggccaaaataggtatataaaatgtgtcacagaaaaacacgcatttgcaacgttaacctaacgaaatttccatgaagaaccaagtcagggcagcatctccttagtcccagctcaggctctctgccttccagaggccgcttctccagtgactaacctcctcctctggctcctccttgcagacagttatcccttgtttagaacacgaatttccatttacctggtgggaacacgaaacaggagtctcttctgttctgcaagtttgatgggtaagaggtagccttttttcaaagtaggatttcctttttcaactgttccaggaaagaatctctaagactgggtagctcacagccagccaaaggcagctacatttccacagaagcccatccgctgcctccgtggcttctccagccattgaactggtcccacacgcaccccaggccccactcctcggcagtttcaggtgtagctgtggggcccgttcctaggtctgtactcactttagggaggcttcactgactaggctttcctcctgcatgttgaatttccttcagctttaagaggaagagtggaataaatattctaagtgatttaatgcactttgacttgtataaaactttctgtgttagcgacggtatctatagccctttatacgagcgatggatcttgagctctccttccatgttgtaaatagggattgtattcttgaaaactgctgtagcaaattcatctgtggtgcaatacactttttgattaaagctcttcaatccagatgcaactacaatggattttactagtttggtgtgtcagtatttctttgactcattaaatctggtattttgtgtc

SEQ ID NO: 16769 - DNA, 1307 bp, Homo sapiens
tcacttcaggctaggaatttgagaccagcctgggtaacatagtgagacctcatttctacaaagaaatttttaaaattagccaggagtagtgatgtgtgcctatagtcccagctcttcaggaggctaaggtgggagaattgcttgagcccaggggtttgaggctgcagtgagctctgattgtaccactgcatgggccaactgtgcagttccacttaagacacagcctttttttttttttttccaaaaaataaattggaaaaattttggagatttcctacagtttggaaaacagatgaactacatagcctaggaatattgaaaacattgctcacctgggccctgcggccagcagaattggccccgctctatggctgctggggcctgcgcactggaatcgccgtggcctgcgcaccccaccatgccagtttgaacctccatggcctcaaccagattcggaatgtcaaaaagcagagtgtctatttgatgaatttgaggaaatcgggaactttgggccacccaggctctgtagatgagaccacctatgaaagactagcggaggaatcactggactctttagcagagttttttgaagaccttgcagacaagccatacacgtttgaggactatgatgtttcctttgggagtggtgtcttaactggtaaactgggtagagatctagcaacctacgtgatcaacaagcagacaccaaacaagcaaatctggttatcttctccatccagtggactcaagcgttatgactggactgagaaaaactgggtgtactcccacgattgcgtgtccctccatgatgtgctcgctgcagagctcactaaagccttaaaaaccaaactggacttgtcttccttggcctattctggagaagacgcttgatgcccagcccggttttaaggatattaaaagctgtcaggccaagaccccagcttcattatgcagctgaggtctgtttttttgtttttcgttttttgtttttcattcctgcttttgaggaacagctctgtggaaagaacgtgttgcctcctaccttgcccacaagttttgatttttaatttctacagaagatttttttggattaattgtctgatttcctccctcatatgatatcctttatcttttataatgtcttatccctatacctgaatataacaacctttaaaaaagcaaaagaataagaaggaaaaattccagcaggagaaatgaattgtcttcactcttcattctttgaaggacttactgcaagaagtacatgaagagcaactggttaacctgctcactgttctgtctcaaaa

SEQ ID NO: 16770 - DNA, 2666 bp, Homo sapiens
ttagcgtaaagttatcttttcttttttcctaatcagagttcttgaccctttggttattgagtttaaaacttcaattgaaattcaatagtatttatttttgaaaaaaatcactaaactgtgcctaaagaacataactgccatattaatgttttggtttatatcctctatagtaatagaaaaacatttaatacttgtaatgctgatgtgttaatttgataccagttgagtagaatgtgatcaatccagtttacaatctatcatgagtattattaactaaaatctatgtgcttttcaataggaatcattcttctcttgctgtaacacttgaccttaacttttagaaagtgttcatttttaaactgcaactggaaaggttgaaaagttaggactcttgtatttgtgaactgtaatctgaagcagattatttaaagtgtagaaaaagaaacaagttcttcttttttgcaaaggtctgtgataccatatttcagctttgtgtaagtaatttgaatatccaaagggttgtgatgatcagttctgaatatgcaactgtccacttaataaggacaagtattccagtatctcttatgactgtagtcataaatgatgttggaatgtacattttgtgaaatagttggtatccctttactatgattaatttttgttattccaggaaatacttgtgaagccagccaattaataaagcactttagcatctgttcaggtagttttgaaaacccacttttccccttcaggataagaacttccaggttacctaaaaatgcaataaaaatctttatagtctaagcttcttggcatataatttttcatcagggttttcttttattaattgagcacaatactgttttgatttaatttttttccctcaaaccacccagctccttacatagtttttaattatatagctatatgaaagaggtggctaagacatttgctgcacacacttgaactaatgttgggtcagtagcttcgtgttactgccctgatcccagtgtaattcaggtggaaaggtatttttatctcacagggatatgtagctatgtattttactaattgtgaaacactggaaattaatgatgcagacaacttggtgtggtctttgaacagctctctgcagtatttttttttttcctgttaccataaattgtatttaagtgcttgctttccacttaagttgtactaatagaaccggtaactcccagccctccctgtttgacactccttagcttagattgatgtagttgtttttgttatccctataatgtgacttttatttttaagtcattgtgtactgcatttgtttgtcactagttgggcacgtgccaataatattctctccattccttatctgccatctctgttttgcctgatttctcttcaactgaataatggctttttgcatggaaaaaatagtttttactattagacgtgtaaagggaagagagagctaatgtattggactttgtgagcctacaaggaatattttggatccctccaataaataagggctatgtactatatgtactatatagagttatcatgtggtggaagatacttgcaagtcatagatttatgggcaggaggatttgttactccctatatctaggctgaatgtaaaatcccttatgttgtatcaatgggggtaaaaactatttttatttgcctatgatatacttggtttctaataaagtgccctaggctctagtgagaactgtctactttgaattgccatttactccctttcctcctttggccgatatgctcttggctagctttttataagttaatgtgtttccccaaaaagtttcactactttatattcatttgagtgtgatcctaaaacacctggatcaacagtacatctcatatgcaatctgcatcagctcctattctgtctggatgtctagaactgttggaagattttgacgtcttaagccctaggttttgctttgggaaataaggtttgaaatattgttcattgcattaagatttgtgtgtgtgtgctttgtaagcccagaaccaggttttggaaaatgcctgtactgtgaaagcaaattaggactctttctgagcctctttcattgtcagaaatagaatcactttccatcagcttccaggaaattgtgtatctggagtcgaagagatttgacatcaagaatccagatttttaaatgtaattgttttttaaatgctaatgtttgtaaagcaccttcagttcttcggatgaaaggtgctatattccctcagtgtaaattaataaaaagattacaggaagtttgtcaaaaaattcaatgcatagtctgtagtatgtcctgacaagaagttagcattttatataagaaattaaaaaatgcttattcctccacttggttgcttgactggtgaacaaaagtgaaacctttttttttttgttttgcatttgactctgagctaagtgttccaactctttaaaggcaatgtttattgttacaacctcgatccagtgcccagaactatgcttcatgagatcatcacaactctttaaattgtatatttacagtgtgtagtgatgctgacgaaatacacggtagtaaaccaaaaagaaacatttggaaagtcccctagcatgatgccagacacactagatgcttggggaaggttggttctgc

SEQ ID NO: 16771 - DNA, 1176 bp, Homo sapiens
gactttggttgcagtctctgcagcagcagtgatcacttagtgaagagtgcttagggtagttggccaggatcctgaatatcaaaatcttcagcggcagctcccaccagggcttatctcagaaaactgccgatcgcctgggcctggagctcggcaaggcagtgattgagaaattcagcaactaggagacctgtgtggaaattggcaaaagtgtacgtggaaaggatgtctacatcattcagagtggttgtggcaaaatcaatgacaatttaatggtgcctttgatcatgactaatacctgcaagactgcttcagcgagccagcttactgcagtcatcccatgcttcccttatgcccagcaggataataaagagtcaggtgacaatctcagccaagcttgttgcaaacatgctatctgtggcaggcgcagatcatattatcaccatggacctacatgcttctcaaattcagggcttttttgataacccagtggactatctgtatgcagagccaggtgtcctgaagtggataagggagaatatctctgagcagaagaactgcactattgtttcatctgatgctggtggagctaagagagtgacctccattgcagacaggctgaatgtggactttgccttgattcacaaagaaggccaatgaagtcgaccgcatggtgcttgtgggagatgtgaaggatctggtggccatccttgcggatgacatggttgacacttgtggcacaatctgccatgcagctgacaaacttctctcagctggagtcaccaaagtttatgctatcttgactcacagaatcttctctggtccagctatttctcacatcaacaacgcatgctttaaagcagtagtagtcaccaataacataccccaggaggacaagatgaagcaccattccaaaatacaggtgatcaacatctctatgagccttgcagaagccatcaggaaaattcacaatgaagaatccgtttcttacctattcagtcatgtccctttataatacagtaacttctgaggctttttaagaataaaatccaccccaccccttgttttcccttggtatttgatgacgaattcagcagaagacccagcttgctccagtgtagctttctatatcccacatcaggtatatctgagcttatccgaaatgaagaaagaaggatt

SEQ ID NO: 16772 - DNA, 1587 bp, Homo sapiens
ttctgtgagccttgcagctttaactatagctcagctgttacaagatttcagacttttgaggatgttgtgtgggggtgtttgactgtgactggagaagctcagactactctgcatgtgaatgcttcagggttttctttgttgagaacaaccagcagcaaagccaacccatgtgtgagcagttctccccaaggtctatgctaaattatggcaagagccctgggcaaccccaaacctagtcccggtggctgagcaccctgtaaggcaggagtaggcagttgggcttgagcagccatggggtagggggtggggggtggttgaggggggaggcagcacagcgcagcaaatgtttcttgggaggaagaagcctgatccatcatcatctgcttgactatgtagcttggattctcttttgtacctactcctttgatttggctttaccttcatccatcttgatcctttcctggccaaagatcctcttgggcccaaatgaacactgtaccgtagtcttctggaaagcaaatgtgcttcctgctatgtaatcgctaacattcacattacatgatttgctgtagcttgatcttccttagcctactaccactgtggcagtaggttttaggtggtatcatagtgccttttgattaatttaagtatttaattttcatcttctttctttggatctatttggcttttcaaatgaacagagatttctgttaaaaagaaaaaaaagatttgacgtaggctgggcgcggtggctcacgcctgtaatcccagcaccttgggagaccaaggtgggcagatgacctgaggtcaggagttcaagaccagcctcaccaacatggtgaaaccccgtctctactaaaaatacaaaattagccaggcgtggtggtgtacacctgtaatcccagctactcgggaggctgagacaggagaatcgcttgaatccaggaggcagaggttgcagtgagccgagattgcaccattgtactccagcctgggcaacatgagcgaaactcttgtctcaaaaaaaaaaagattcatgttattgtctcttgtagaggaaactaataaagtgtctgtatctgtgtgatttgaggtctttgagaaaaaaaaaaaaaagtattgcctatcttggtcttgccattttgttacttaactacagtacttgaaaggaaaggggctggccgggtgcggtggctcacacctataatcccagcactttgggaggctgaggcgggtggatcacctgaggtcaggagttcaagaccagcctagccaacacggtgaaatcccatctctactaagaatacaaaaattagccaggcatggtggcgcacacctgtggtcccagctactcaggaggctgaggcaggagaatggcttgaacctgggaggcagaggttgttgcagtgagccaagatcacgccactgcactccagcctaggcgacagagcaagactccatctcaaaaacaaaaaaaaaaggaaagaacatttactttatacattattaccaaatggatgctggagtaggtgctttcactgtgtcatcttatttaaccattaaagaaagacatacgttaataactaa

SEQ ID NO: 16773 - DNA, 1906 bp, Homo sapiens
ggggtgcagtggcatgacttgcaacctctgcctcccgaatagctgggattacaggtgcccaccatcacgcccggctaagttttgtatttttagtagaggcggagtttcgccatgttggccaggctggtcttgaacccctaacctcaggtgatccaccgacctcggcctcccaaagtactgggattattacaggtgtgagccactgtacccagccaatgattagcattctcactaataatagcatctgagctggctcctagagtacaagaaaaaggagttcacagtactttaaaatagataaaattcagttgagttagtaacctaactcattgttagtactagttgctgctccttgtagaccaatatgaaattacttttagctcgataaaaccaaaagtgtcactttatgcttcagactgaaatgcggggatctagatgtgctaatgcttgtcagtaacaactaacaagtttttctgtatgtaacttctaggtgaaagacccctgacaaaagacaatcatcttctgggtacatttgatctgactggaattcctcctgctcctcgtggggtcccacagattgaagtcacctttgagatagatgtgaatggtattcttcgagtgacagctgaagacaagggtacagggaacaaaaataagatcacaatcaccaatgaccagaatcgcctgacacctgaagaaatcgaaaggatggttaatgatgctgagaagtttgctgaggaagacaaaaagctcaaggagcgcattgatactagaaatgagttggaaagctatgcctattctctaaagaatcagattggagataaagaaaagctgggaggtaaactttcctctgaagataaggagaccatggaaaaagctgtagaagaaaagattgaatggctggaaagccaccaagatgctgacattgaagacttcaaagctaagaagaaggaactggaagaaattgttcaaccaattatcagcaaactctatggaagtgcaggccctcccccaactggtgaagaggatacagcagaaaaagatgagttgtagacactgatctgctagtgctgtaatattgtaaatactggactcaggaacttttgttaggaaaaaattgaaagaacttaagtctcgaatgtaattggaatcttcacctcagagtggagttgaaactgctatagcctaagcggctgtttactgcttttcattagcagttgctcacatgtctttgggtgggggggagaagaagaattggccatcttaaaaagcgggtaaaaaacctgggttagggtgtgtgttcaccttcaaaatgttctatttaacaactgggtcatgtgcatctggtgtaggaagttttttctaccataagtgacaccaataaatgtttgttatttacactggtctaatgtttgtgagaagcttctaattagatcaattacttattttaggaaatttaagactagatactcgtgtgtggggtgaggggagggagtatttggtatgttgggataaggaaacacttctatttaatgcttccagggatttttttttttttttttaaccctcctgggcccaagtgatccttccacctcagtctcccagctaattgagaccacaggcttgttaccaccatgctcggcttttgcattaatctaagaaaaggggagagaagttaatccacatctttactcaggcaaggggcatttcacagtgcccaagagtggggttttcttgaacatacttggtttcctatttccccttatctttctaaaactgcctttctggtggctttttttaaaattattactaatgatgcttttatagctgcttggattctctgagaaatgatggggagtgagtgatcactggtattaactttatacacttggatttcatttgtaac

SEQ ID NO: 16774 - DNA, 1277 bp, Homo sapiens
cctcagcctcccaagtaactggaactacaggcacaccaccacacctggctaatttttttttttttttttaattttcagtagagacagggtttctccacattgcccaggctggtcttgaaatcctgccctcaggtgatcctcctgcctcagcctcccaaagtgctgggattataggcagaagccaccgcctggccagactgtaatttaaataagggttaaactatgtgacaatacacttaattatcttttatccttttaggttacccatgcagttgttactgtaccagcctattttaatgatgcccaacgccaagcaaccaaagacgctggaactattgctggcctaaatgttatgaggatcatcaacgagccgtaagtatgaaattcagggatacggcatatttgccaaatagtggaaatgtgaagtactgacaaaacttttccctttttcaatctaatagtacggcagctgctattgcttatggcctggataagagggagggggagaagaacatcctggtgtttgacctgggtggcggaaccttcgatgtgtctcttctcaccattgacaatggtgtcttcgaagttgtggccactaatggagatactcatctgggtggagaagactttgaccagcgtgtcatggaacacttcatcaaactgtacaaaaagaagacgggcaaagatgtcaggaaagacaatagagctgtgcagaaactccggcgcgaggtagaaaaggccaaacgggccctgtcttctcagcatcaagcaagaattgaaattgagtccttctatgaaggagaagacttttctgagaccctgactcgggccaaatttgaagagctcaacatggtatgttccttgttttctgctttgctaatgagatctccttagactctgaattcaggacattgcatctagatacttagataacagacatcacagtaaccatgtcttttttctaggatctgttccggtctactatgaagcccgtccagaaagtgttggaagattctgatttgaagaagtctgatattgatgaaattgttcttgttggtggctcgactcgaattccaaagattcagcaactggttaaagagttcttcaatggcaaggaaccatcccgtggcataaacccagatgaagctgtagcgtatggtgctgctgtccaggctggtgtgctctctggtgatcaagatacaggtaggtcatcatcgcagcatctttcttagtgattcagtagcttgatggaagactcattagctattgctttagaa

SEQ ID NO: 16775 - DNA, 1196 bp, Homo sapiens
ttgtaaaatgtgaccatatctggataaagaaattaatgtattttctactcatttttcagagatgcaaaaaagaaactgaggcttgctctttgctctgcggactctgttgccttcccagtgctgacccattcaacaaggaatggtttaccagaccacacagacccagaaggtaaattgctgcaggatcgtttaatttttcctatgtttatgggttgcaccatatgaaattgccagtattcagctgttgaagctgtacagcaattccatatggttcaacttaatatgtttacattagtatcacttaagggcactttgattactgatgatttattaaagtattttctaattgggagtggcaatacagcttagttctaatgatacgtgacaaagcagaattgacgtcccaaatgctgaattagcttatttaagcacatggaaattctcaagaataacagaattcttgtatcttttatttagacaatgaaattgtatgcttcttaaaagttcaaatagctgaagcaattaatttacaagataagaatctaatggctcaacttcaagaaacaatgcgctgtgtgtgccgttttgataataggacttgtaggaaactgctggcttcgattgctgaggactacaggtaatataccccacctgttcagcttttaaacctagttgttagctgcaagtgttttcttttttatccttatttcagaaatgaatctaggcttcctacaaagtgcttggctgtattttcctggatgtagatttctgtgttagtctgttctcacgctgctgataaagatatacccgagactagccaatttaccaaagaagaggtttattggacttacagttccatgtggctgggaggcctcacaatcatggcggaaggtgaaaggcacatctcacatggcagcagacaagagaagagaacttgttcagggaaacccccctttttcaaaaccatcagatcttgtgagacttattcactatcacgagaacagcacaggaaagacctgtccccattgattcaattacctcccactgggtccctcccacaacacatgggaattcaagatgagattcgggtggggacacagccaaaccatatctttctgccccttgcttctcccaactcatgttctcacatttcaaaaccaatcatgccttcccaacagttgcccaaagtcttaact

SEQ ID NO: 16776 - DNA, 1259 bp, Homo sapiens
tgaaggctgaagattgttttgtatgatactgcacagcatcaggcattttaaagcagatctttactaaacaggttaatgagctaacaagcaggttctctcgtctttgggctctttcctttctgagttgcatattctattttcttgtccccaagtagagactagtactacaaaaagggaccacatttttcaagtatttctaagtataaaaaacaaaacaaaaatctcttaggaaatgtctagacctccattcttggattccctttctttccttttattttaaaaaagaacagtacccctcttttaagatgctgtcttacattaatgagcatctaatggaaagaaggtatgagttgcactgaggattagaatagtggtgcgttagtggcattatctataaatacactcacctaaattgaaagctaagaaggaaatgtaaatataatatatatttatatttgatgtaatatggacatctgcagattctaataaacaaggactattgctgatagtaggctgtgacatactgtcttgtgaaatggtttccttgacaaaatttaagctgagcttaaaagcaaaaaacaaaaagtacacagaaatatttattaaaatgtaatacagtttattgaactttctaggtatggagtttgatggacagggctgcctttaatgagtgtgaaggtcactaagtcacttagacatctcaccgtggaagtttgtgagcctgcattaggagatagactgattaccatacatgacataaaaaggaacagtggatagctcatactttatggtggttcttctcctccgaaataatatactgcagaaatcccagacagagctccttacaaacctttaattgtaatatatttttgatgattattcacattgaatgcacagaccaagaattcagtgaatgtcattttttaaaaaactaatttgtattgtctgctctagtgatacaagttttactagtgataaactattttaatcaaccatactattcttatggaaaaaaatatctattttggcaggtttctgtgcctttatttccctcttctgaaaaaaagtctgtgttttcatagtttggtttgcattgtatatcaataattaatcaggaatgggttttggtgcctgaaaaattggccatggaggcacaccaaagcttcaagcacaagtcttgtacatgggccatcactgtctggtttcacttcgtgtgtttcctaaacacatttagctgcttttttaacaaactcagcccc

SEQ ID NO: 16777 - DNA, 1133 bp, Homo sapiens
ggggtgccaggaggaggggcggtggctggtcctcaggcacgctgcactcccagccagacatggtctttccgtttcttaagtagcaagtgtaggtttcagctggcagttccacctgcatgttctctgcttcgctgccttggaaggggccacattccccattcctcttctccttacagcgcctgcctcctttttcaagcaggcggaaagctgctgtttctcacgtttcagggagaggggtgagcggagggagacctgtgtccgtgccgtccggctccctgggtgggaacaggcaagggatcagatgcccctgacaccacgcctctggccacaccagatgcctctgcagtcctcgacagcctcttcagtgtccctcctgcggtgatgtccttactgtccccagccagggccggggaccggtgtttcactgaggacctgcattagaaacattttttaaattgttgtacaggaagagatgtgtctaaaacagcatcttaaagctgagtgtatttctttgcacaaggggtcatgctgatgaattcttctttcattctgatctttgttcagccaacaggagcgtccttttctaatgtcttccattcctaccccccacccaaaaacaaaagaaatatttgtagcttgctatctgtatttgaatttttagcaattttatatttagatactttgaaaaatgtaaatgactaatttggtcattaaatcttgtgacatattcgatattaaaatgatattaaaataaaagtcatataaatacacacttttgcatattgtgttgagtttctgaagtctggagtatgtgatgccgaaaaccatgactctgccatgagcctcctgggtggtggcatttgccagcagttgacgaggaagcaacatctctgaaatgcaccggggcctctttggtgctaagcacgacaggctggccctcttcactcaggggtgacaccaaagtcatcacctccttcagccacaaaatcaacacccttctcttactgtgaaatgcaacactctcagtttacataaacacatgtgtccaggtgaaggaacagtggaaagggaacacagcagccaccgcccaggcccagcacggatcaagactctgcattcagctttccctgagc

SEQ ID NO: 16778 - DNA, 1258 bp, Homo sapiens
tacaatttttctttaaaatatttgcatcattctcaacaaattagttagaagactaaaccattctaaaatgtcacacacaccagcaaaatgtattcacatgtctaaaaaaccacatactaaaatttattgtacttctagtttatatagggaaaactgctatttgagggcatctgatttaaaagtattggattgcagtaagaaacagcattaaagtttatgggagctttccatagaagtgcatgtttgctctgtattagacatggccagaattatcattctcatagcgtcctgtaactacatgaatatatatttaccactagccgacttaactaagccctaattaaggactgagtgttttaataaaatttaaagtatacttatttcacttagtcattcttaaaataattaagatactaatgcgacttactttaattgaagaattacccaatatactacaaaatacatccttctttaacggatatggccatttaaatatagtaatctacacataagaattctaacttgagcctcaagtcaacagtaaataattatgatggaattgataaataatgaggtccctgcttgccctttagttctttggacctgtggtctcttagctagaaaaaacagatttgagctcatgaagcagtggttttgcatttttagaataaaatttatcagttggaagctactattctcaccagtaaggttgccatttctcaacctctcccgacctctacctctcttccctagcacagcctgattctgataaaagagcaaacttttcccagaaattttcacagtctcctttggattgtgatgcaccctatgttttagggaatttagtataataatgattcccatttgctttagatagtaaatgaaatacattttttgtgttcagcctgggcagtgtagcaggaccccatcttctgaaaaaaaaaaataaaaaaaagggccttttgaattttagggcccatttcagaatcattaggcctcttattatagtttgtggttataatgtcagagattcctgactaaattctgaactggttcaggaacgtatggaacatctagctcagccctctcatttgatagatgagggaaattaaactcaggggaggcatgacttgcccaaggccatacaaccaaataacagagcagatatgaagtgaagatacagaatgctgaacctctagtctagtcctctgttttataaattcgagttgtagcagattgatttagtacattcttttgg

SEQ ID NO: 16779 - DNA, 1178 bp, Homo sapiens
aaatcagcggactgcataatgtgcactactcattcccctaatcaccagaggcttggtctggtggctgataacaatgaacatcagtagaagagggagagtacttgtgcttttattctcatttttaattgatcttaaaattcttccatggccctttgccttgggcacaatccagagtcatgaatccttgatatgcggctcaacagagaggcacaggacagcgtagtccctttcccttcaccagtttcctgcctgcctttctattctgggaccactgtacagaccattccagttcagagatggagcaagctctgctcgccttcatgcactgcgcatgcagcctggccccactgtgagctctgtgcaggaggggccccatgacctgcagcctttgaggcttcctactgggtgagcttagggcttcttttgcaactaattatatccatctgtttttaaaaggtgaaaaaaaaatcctgaatttaggtgtcgattgatacattaattaccccatctcagttgcagcagtgtggtcttaatagctgattgctgcaatacccaaatctgtaatatcagaatgtgatgtgcatattttaatttgagaaatagtttaacatttttagatattcatttagatgtggttatgcaggttaaacataacgaatgatcactgcttctttcattgcttccaattaaaccttgcttgttagtttaacctctaggtaatcccatcaaacaattgatgtcaaggaaacagtgcccacagtagcttcggatgagtggccattaattttaattgccttgatattaaagattaagaagtattgggactagcagaataaaaacgatctgatgtcaagcaaatccacttgctaaagcttccccaggctgctggtgatattaaaattttactgtgagaattaaataaacctttattagtgatgactgttgtttgattggtccaggggtatgcataaacagaggattcttacatatctagagatgagaccttcgatggtacagagattcctcaattatgaaactgttaataaagctgtaatctgattttccaggctaggtttcattaatgtattatagcttctctgattgtcaaggtaatattaactacaaagtactgaatccaacagagaattgtttggaagaagagaattctaagatgggcc

SEQ ID NO: 16780 - DNA, 1139 bp, Homo sapiens
ctgtcacacagttggtgtttgtgccctgaatactgaatggctttttccctctttttattaatggccagtgatagtcctaaatgcatttatgtttaaaaaaaaaaatcttcaatcctgcagcctggagtttggatggaatatatttatcacctatcccagagaataaggttcttgattccccagatttgtcttacaattgtctgtaagacaatgaatgatacagaactctcctccaaggttgagatcctttgttagagagcagtttcttacgcctgacttgttttatagcatgaacgatcgcatgatccactggcgaggcaacatccataattttgaatgagggagtaaagcttgcctcggtggccctaagcatcgcttctggtgacacacttagaagtccttaatcgcttgctacctagaggcaataaacacacctatctttatgttccattgcctgtgtgtttacctgaaatatgccctgtgtagcaaaacgccagtttcactcctgtgagaaggtccttggctcatgaattgcacggccttcactcacccctattttgccaaaggtggtagtgccttttgtaggcccaagacgtagcttctttggccaggaaaccccttggctatttatgcttcttgtaaaactctggccatttgcttggtttccgagttctaagaaaggagatccatctctggtcatcatgtggagttcagggttcattctggagggcaagatgatgtctccttcactggtgtgtgcctgatgcccaatgcccagcccagggcctagcatacaggggatgttccatgacactcaatgtttcgttgattctgagaggacctgggtcttagaactggttcacccttttgtatccaccctttccagctacattactttagacagtttatataacattgcagtctgttttctttttttttttgtaattttgaattatattttctcttctgaatttgaggattaaagataatgtacatgaaatacccagtgcctagtaccaagagggcactccagaagtggagctgctataactgccgtaaatattgttattccagggaattgctgcttattataccagaaggcactggtctcattcaccctgcagtgtgacctcacctaa

SEQ ID NO: 16781 - DNA, 1841 bp, Homo sapiens
ggtttccctagtgtcccatggactgactgtgtctctctgtccccacccgcccctgcagtacgagtacagcttccgcacagagcagagcgcagccgccaggctcccgcccagccccaccaggtgtcagcagatcccgcagtcctgaggagccagcggccacctgcggggagaccaccgccgcccagactactgacggcaggggctgctgcccccgcctcctcctgccgcctccgccagccctccctcccacactgccccagcagggctggcccggagactgggcagctaagtgggcgcatcctgtcttcagctggcctcactgacaccccggcctccctggggacattgttcataaccatgactaatctgtgtgtgctgtagtgaccagcggctcctaacgtgtctgtgtgatgaccagttgtcctccaaaaacctcactcaccacggagtcaccctgagggccccgggcagttgccctggccgcccagtgacgcccaccggctccctccgctccctcctgtcacctaccagggcagaccccactaagccgttgagtctcttcctggaagaccctgagggccggcagctttgcctaggactctccagggtcgctgatcctccccggcccagggctgccaggaacaagttcctctctgcaggatctcacagcagccctgagaagacatgggaggaagaagccagtggccctggggtggaccctgccctttggacatcccatggacttgtcacccagtcgcctggaagtcggggagcagcacccctgcccccggtggaggggttgttgctttctggggaggaggacggttgacggccctgcttggatccaccaccaggacgctgtgctcggccatggcgcgcctcccccaagggctcatctgtgcaacaaccacatgccaacaatagctccaggtgcctcagccccgtgccctgacccggggaccacagggacaccctctgagacgtgctggccccaggaggatacaggcacacgggcacccagcccctctcagagccaggcgtgtcttgacggtatctgctgacgggaacaagtcattctgaaaggtccctctgacccaggtcaccaaatttgggccagaactggcacttccgagtgcccactggtgctggcgtcctcaaagtgccgggcgccaagttcagccccaggtgcgtttgcctaggcagtggtggctgccatccctcggggcccaggccctcacccgaagggctgcctcactctgtggtgtcaggcactgggctgtgtcctgattcctcagagtatggggacctgacatctttgggtccccaagagttggctcttggatgtggaggcttgatgctgcggttgggggctgcactacctgcgtccgtggaagcctctgcctcagcggggacggcctcctgctgcaggtcctgggcagcccacagtagtgctagctgaggcccagaggaacgggaggaaagggaggcagcgccggacggcgcagctggccaagaggcgggcggggccagaaatacctcatgcccctgcaccagcccctccgtctccaggccccaggcctctttgtggacccatcttcctcctctgccaccccgatcttcactcggatacctcttgatttctgtggataagggaagcggccacttctccctccctgagacccgaggatgcccctggtgggggtggccttctcaggactcctgggtggcacagcagcaggaccttgtcatgggactgatgctgagcagggagggggctgccaggctggctgccgatgctccgttcacataagccagtgtggttctggggacctgaggagccc

SEQ ID NO: 16782 - DNA, 1257 bp, Homo sapiens
caaagcccaacagcaagggtgactcctggcaggtgggggcagcaggagggcagagggcagagctctggccacttctgcccacttcattagggtttgtgaactttgtccttcacctcttttcgtgccctggttgtgagattgcctctaacaggtaatgccaggggcccttcactccgcccccatgactgggaagaggcctgtggcagcgccgctggaccctaggaggctcagaggcagtggtgtgggagccctgtctgcaaggacgcagaataagcagtgagggcggctgcaggagaggaaggggctcccacagcccccactgatgccgctgcaggcccctgtcgagctggggtcccagccaggtgcccccgcatgccctcctgcagttgctggatggatagggacaccaggaagaggacaaactgcatggactcaagcgagctggagccatcttctccatagcattacggacttagcataagagtaaatgactgtgaacgttgtagtaaacggcagcttaagataagtaagcagagacagtgttaaggacgagttggtgtctgtggtagcttttaggctgctcctaacccaccatttattgccttctgagaggtgggtgaggacaagcatgtgcctgtgtgtgtgtgtgtgtgtgtgtgtatatgtgtgtgtgtgcacgcacatgcgtgtgtataagcccacctgagtggggctcgtgcaggagaactgaggcatgaaactctggctcaaacctaggaattgagagcgtttctgtcttttgggagagtacttttctccacgagccctctggccactgtgggagggaaggacaagggttcccttggaaatgtgaagggtcttggcctcatccctcaggtccccccacagcacttcccactactgcttctgtccctgctggcagcctctgtccctccagaacggctaaccagagcacactgtccccaccgcctcccctttctctctggaaagttgaagtatctccaaaggccttggaaatggcacaaaggtgataaggagcaggtgctttgctgcagtctcccttgcaaatgtataattaaggcctttcttcccaccccaagtccaagaacaaatgccagccacgtcctccgccacttggagagatgagaacccagtggggtcacgtaaaggaattgcaggtcggtgagaggacaagagggactcccatgttctaagcacctgttcctggccaggctctaggccaggctctctaagcac

SEQ ID NO: 16783 - DNA, 1218 bp, Homo sapiens
ggaggcccagtggtggctggggaggcttggccatccatctggggctgctggcatttctgagacccaaacctggggcggggaagtgccatgtgtgcatggtgggtgtggctgtagcactgggagaatgcacatgcttccgcacgctgtgtgtgtctgtccagatgcatgcatgcctgtacgttcctgcccgtgagcatgggcccatgtgtgtgaatacgcctgtgagttgcacgcgtgagggcctttgtgagcccacgtgtatgtggcagcaggtgagtgtgcatcttacgagtgtgtgcgtgcatacgctgtggtcagaagcactcttgtgtgaatatctgtggtgtgtgtctttgcttgcacactttcgtgtatgtccacacagccatgtgcacaaccgtgcgtgcacctgtctgcctgttccccgagtgggcctgccttcctgaaagtgtgtgcagccacatgtacgtgtgtgcatgcctgtgctgtggttgtccgaggcgcacctgtgtgagttcctgtgcaggtgtgccctgcggcccaggatgagggagtgaggcgtgtgtgccggggaagggactcgcagggtacagcaggcaggagaccagggcccagatgaggtagggcctgtgggccacgggagggaaggagatcttatcctgggccactggggagccacggcaggtgtcaacagaggggacaggctcccatcgggcagcaggttgccgaaggggacaaggctgaggcctgggctgcccccgccccttcatcacaggccgggttgtgtcccccacagtgaagagcgaggatgaagatggggacatgaagccggccaaggggcagggcagtcagagcaagggcagcggggatgacgggaaggacccgcggaggcccaagcgaccccggaccatcctcaccacgcagcagcgaagagccttcaaggcctccttcgaggtctcgtcgaagccttgccgaaaggtgaggggcggccggggggcggggctcaggctgatgcccgcacacccactgcctttctggagaccaccccctgctcctgctgggggtagggacatccctccatcctccatctctccgcacatcccatcatacccctaaacccaccatctccccgttgctgcccctggagggcctgacctgttcccctctctctgagccaggtccgagagacactggcagctgagacgggcctcagtgtgc

SEQ ID NO: 16784 - DNA, 1204 bp, Homo sapiens
tagatacttaggtaatgtggatttgttttggtagctatttcactgaaggaagtgctacttatataaaagctagaaataatgtgattcctaggatgagaaattggttaacagagctctgttgtctggttttagtctttctaaaggatattttaactaaaactatggagatgctaagagagtgactttctaaatatgaaacagataatttacggtacaaggctgacatagtgcccttgtcagtttctgtaagatgccactactgtcacaaggtgtttcagactcttgataaggcagtgttttgtattttagttctaacattgagtttggacaattttatctaattgtaattctctagggtgccagagataggtatttctcattggtttgctttcccaaatcctgtttggttaattgtagcctccatacagtggggtcttctctgtggctggtagacaccaagctgctgtgactgaccacggtaccacgggctgccacagcccctgctctgtcttagattatggtgctttacaaagagagtggtccatgaccacacttagtgagaaggagccacaagttgtggctgagagttccctgtgaacttgagtagttcatagagtgctaaggtgacactccaccaaccagagtgagagggcagataggcaggattctatgagtggttatacttaagggggacaaaactgcccaagaagaatcttgagaatacactctttcaaggtgggggagatactctttagagggtacactgagctaatactaccagttctttatgagcactggaatgtgtttgtaaaaggagtcctaagtttagcaaggtagtctacagaaccatgctcccacattatagataaagctgcttaaacttaaaagtccacaaagctacgccgaccagaaaaaaaaaattaaaaaaacaaacaagaaaagcaactattctgagaccttttctgcccatcagttagatgatttaggttaaaaagaaaggtaatattgcacatgcttttaagctgtgtaacatacctgaggttatcaccagggtaggacagggtgctactaccatgtcatcttttccacaatcgtactgggttatttacttctaaatagaaacttttttttcttaaaataaaaataatttttcttggatttggggtgaaattttatttgaaaagtttggctttgctgtaatgta

SEQ ID NO: 16785 - DNA, 1285 bp, Homo sapiens
ggccgagatgggtggatcacctgaggtcaggagtttgtgaccagcctgaccaacatagtgaaaccccatctctactaaaaatacaaaaattagccaggcgtggtggcgcacacctgtaatcccagctactcgggaggcggaggcaggagaatcacttgaacctgggaggcggaggttgcagtgagccgcgattgcaccaccacactccagcctgcgcgacagatcgagactctgtctcaaaaaaaaaaaaaaaattcatacttatgccatgcttttacctttagatacacacgttacagtaatccacgtggtgaagtgcatgtcaccgttaactaaggaaggactgcggtaacttaccctgcagggctgtaggttgcctgcaggcgctccaggcccccagcctgttgattccgatttctaggtctcatcttcctctggtcccttttggccactactttaaaagcttgcccaaagggatcccctccattctagtgggcatttgctgaactaacctgcccctaaggctggcttctaaccaccggggaaagctgcttagcctccagggctccctccttgagaggctcacacacccccaagctgctgtggagtgaatttgagacggagcagaagctgcaaagctgtgctttccctggggaaggggatgtgctgcggcctcctgggtgggcgtggagagggcgccatcacaacgagtccaggtttttgcttttggaaggtctctgataatttaggggtgctggaaaccagcactgtgttatccccaatccctcctgtgccaccagttttgtgatttaggttgctttagtgggtgactaacttttgttcagtgaaaccagggtttgtttggggtttttttctttgctacttacatatttaaaggtacaagtttcttatttcaaatctctactgatagtgccctatggggagatgctggaacacattttgcaaatgtgacttttttttttttttttaatttttgcttgaagcctgtgtcatgttagttgctgctgccttctttccttttgtgaggttcccaatgtttcgtccagaaaagtactttatttatgcaagtcaggtgactcttaggccacaaaaccatttgatgataaacagattatcattaggtgcatatcttattgatattttgtgaaatgttatgcctatgttgcaaaagttgaatagttttgtctttatatattgctgtcttcagtgtacagcatggttttacttaattgaatgttaatgtttaatattttcttcttataga

SEQ ID NO: 16786 - DNA, 4166 bp, Homo sapiens
gtttttactggcctacaaatctaccttcattccgtactgtagaaacatacataccaggtaactaaatcgaatcactctctatcatgagttagtactcactcgcacttaaggaaagggatttgtagttctgtctacaaaattctccaagcagtgttgtggttttttttgtttttgttttttttctttctcttttcaaacagccagttcaggtgcacagcaactttttctacatgcagttcccagggaaactgcagaacttagaatttgtactttttgtaaagctatactctatgggaattgcaagcaatatatctatcttagtattgtgtgtgctaatgagagcctcagtggctcccccactctctcagtgtttcctgcttaaagaaccaacagtttaaaagccctctaagatactctgtgtgtcaccaaatctgtgtgtcaccattttttggtcatgtggtgctatttttgttaagtgtctttttaggtcagtatagttgtagaaaatgtgaaatctgatggtaataatgaattataattgttttcctctcttgagttcatagcttgaaaagagacctcaaaagcatgtgctggcaaacacgttactgtatgaaaacatacctgagtccatttgaataatgttttattagtactttcggaaatgtcttcagttctgtattgtgttcacatacacaaacaggctttacaagattgcttcggtactgtaaactctggcagagagtaattttgtaggcagtttggtggtgagtttgtgctgcaggctgcctgtgggatgtcagcgttctggtatctgcctgagaacctgggctctgagacgcacaaccagtgcacctccataggagaacagtgcagccacctaaaagaaaaacgaacgaaggaccagcctcagaggctagaagttaaaggaatacagaattagatgtttgctggttttctgtgcttttttggctcctaaaataccaatggtggatttgtttttgtttttgttttttgttttgagaaataaaaagtcattcaagccctttgtgtgtaatagcccccaggggtggcagctgtgcagtcgcatctctttggcacacaggatctgttcacgtgtgaactgctgcgctacacatcagtgttaactccctacagattacactctaatcccgctgctcccgaggagcggctttgctaaatcgggtatatagtatatgcctttttcctcgtcaaactgcctaagtaggggttcgttctctccctgaagcacttgttcaactcctgttaaagccgcgtgcctcaaggggaggctggaccccaagtgtttacccacttaaatatgttctggggtttcaggtaaatgtttgtgggtttttttttccttacatgaataagtttggttttgatttttttttaattgaatgcaaaaaatttgtgttgtgatacaaattaagtttgtgacaagaaatgcccaaatccaaggacataagaggtcaagctcagggaaggaacctccttttcactcaggcttggggcctccagcgaggtttccagagcattccatggtatgagagacagtgaggagggagggcacctggcgcgggcacttccagcgtcctggctcttggcattgtccgtcttaaccttatttacatggagttctttgtatttgtgaatctgtttaactggtttgagtttaccaaagagtgacttatccaaaattgtctttgacaaaaatatccattgctttgattgtacagttcaggttcaaacattgtaatgggactgttaaggggcagaaaattgattgagtttctctctaagaatcatgattccacattttgcaagttccacttgctcccattcgtgttgctaacactttaccctttccactgctcgcagtgttaagaatgaattctcaagccataacacagtactgtaaagttccgcagggcttcgagggaggcagcgcctaggccagcacggagctgtgtagcctctctgagcgttcgcactgtcatgcttcccaggggtgtgactggtgagagattaactccattcagatcgggcagcagcaattaattgtgccttgccgcatgaggatgtgtcaggaggattaacatgaccacagaaccgaaacattctctccctgaagttcacttcacgtctccgcagacgaagtacgctgtgtaactccttagagcaactctttttggaaagcaaagtccctatttctgtacagttttaggttaggtgtttcatttataacagatgcagaaatcaattaagataaagtgatatgtgaagaaatcttttacagtaaaatatatcctgaattcatataggcttgttcataattgagtctcttcttgagctaccttttcaatattagacaatgtgaagacagtgacagcgtccttttctagagatatttagcctgttattacaaactgtgaagacaaagaattttatacttttactaatgtttgtggttttaaacagttattttcattctaatcagttctctaccctctaatttctactaaagctgtaaatacatttagaaattatatttgtaaatacagtatatggagacaagttaattttttggtcagtggaaaaagcctcccaaccaattggccctgccttggcagttgtgttttttgttgttgttgttgttgttttagtttagtttttttttttaaacagcagaaaggatactgtcggttcactgttgagcagaatatactgtagaacgaaaatgataatttttaaatcttccagagcatgagtaaatgtcttttctaatgatagcaaatataaccaactctttgtttttcccttagcccagaccatatagacctgcgtattttgtgtgtggttttgtttttatttttgttcttacagcctagaccctaggaaaaatttgcaggaacacgaaacaagggctggggggaaaatcatctatgtgaatgagctttactttaaagagatcaatgtattttattttatcaactttttctcttagttactgtgatttttgttgttgttgtcctcgttattgttaaattctgtaatggtttcctgtgaagcctccactgaaagggactcaaatatgcaacacctaaactattttccaagggcacatgccccttgaatggtgcttctagactggtcagggttatttattaaattttatatatgaaagtattggggaattatgtaaattctttatatgaaactatctagttcataaatcatagatttcatattactcagtgcaactgaactaaaagttcagaaaagtcattcacattgttccaaatttgtaatggttgtcacatgtcacatgcgtctttttcagtaagtgccagagtgttcccactgtttctgcccagtgcttgacttctcggcccggaagagaacctgctttctctggtttccttcctgagtctggcacagacggggctattgtagttcttgatcaagtcctggagtcagccttgcctggctctccttgtagcagattcagtccacagacctcttgctgcccctcagtgacaagtatgctgtgaattcaacctttggacttgctgcccaagcctttggttgctgccctgactattgtaagaggtaaacttacctggtttgtttgagaatgaccattttcctaatgtgaaaaccatctctctcaccacttttattagtagggctaacatttttttccgttataaatggttgagcaatttgaatgacttaacacagtgtcattatcttgcaatataaactggtaacctcacaactccacacttcatcaccatatgaagtaaatgaagctagctaagcggatgctgtatcaactagtaacttgccattaaggattattttatagcatgaatttaagactatttattcaaatgatattttactcttgtattcactttgttttagatttgtgacatgaatatttcagtgctgcttaattttgttctgaattcttgtttcttgcttgtaaatggcttttttatggtataaataaagtcaatggacattgctgtttgtaaataaaaatgctgctagagcaaatgtgctgtggtctccctctgcgtgggccccctgagcttcggtgagtgtcagtggctctgacaaacatctgcagtgtcata

SEQ ID NO: 16787 - DNA, 1233 bp, Homo sapiens
gaacccagcaatcttcagtttaacaagcccttcaggtgattctgatgcctagtcaagtttgagaaccactactgtagttcctgcactattattctaagaggatcatatgtcagaccccaaattactgtaggtgctttttaagggacccttgagacatgtgcttactgtcatcacttcgaaaacagagaaagaaaagttataaaccataaaaccctaaagtgaatagaggtccctggaaacattctaagaaatttatcaaatgctagtttgtaaggaagcagtgatcatttggagacatcgtatgaaaaataagttgtttctgacaaagtttcttttctcatttattatgcatacagtcacttatgtcatgaatatttattaatcttttccaatgtactatggtcaacactggggattcaatggaaagaaaacagtgtatgatttctcctgcacaggactcaggttctagtggtagaaacagatacgcaagttcaataaaagatttacagagtgtaaatagtgcttcgaggagaataaacaaggttctccgatggagaataacagcaggaaggagggtggctttatatggggagatcaggaaaggccactctggaaattgacacttgagctgaaacctacgtgatgggagagagccagtcatccccggaactgtggaagagttccaggtggaggggtcagtttgggagtgtcctctctcttcctgtatagaaaaccactgttagtgatgagtgtgcatctcaggtgtgttggggacagaaaaatgttcggatgcacagccttagaacttggattttcggatttttaatactctcagatccagctatcctgaatcctggcaatcgccttgacttcctgcctctgacccattggccagtgtgctttaaatatctttgtcccttgtctacccttaattgaccaccaagaatttcttcatctagtggtgggtcaaccaaccttgtagaggtcgattctcttccaacatttgattttgtgtttattatgaaatacttcaggtatacaaaaaaaagtatagggaataacataatgaagacctacaaaaccactactggccgggcatggtggctcacacctgtaatcccagcactttgggaggctgaggcaggtggattgcctgaggtcaggagttcaagaccagtctggccaacatggtgaaaccccatctctactaaaaatacaaaaaaaaattagcca

SEQ ID NO: 16788 - DNA, 1536 bp, Homo sapiens
tcagacggctgaggcaggagaatcactcgaacccaggaggtggaggttgtagcagtgagccaagattgtgccactgcactccagcctgggtaacagtgagactccgtctcaaaaaaaaaaaaaaaagtgccatgtagtccctgtgtggggcaggccccaatcagtgcatgtgggaggaagatgtcagcaataatgacctataatcaggagaccacatacaggtggcaggtactgggcagtttaactccctggcaatttaagcttgtcatttctctaaaacagtttctgccatgtcagatttgtgaaggcttggttttgccctcagccacccgccactgcacctgaccaggtctctgttggctggtgcaatccagtggtgagctgatagtaaaccccagcttaggaaacagggttgttcttcatgtggatgactctgtgccgaaagcatgggaacagcctagaaatgaaatgaaggacacatgatctgctttggcttcagactttaaaagagcttttgctgtttcctcttctgcagttaaacacagtgggaatatcacttttgatgagattgtcaacattgctcgacagatgcggcaccgatccttagccagagaactctctggtaagagcaggacaacatgtaaccgccataactgtagttgtgtttttcactgagtgataacattcttcttacttgaagggtgctcagtgagacccaagatggggtgcagttttctgggactgaaaggatggatcgtaaattggatgtgtttaatctgggcatcaaggacccatggaagctttgcattccgggttatggaactagatggaactctatattctatattaggggagcaggaacctcattccttccattgcctgctatgaaccccttcagtattccccagtatctgcagattgtgagggactgagccagcacctccaatgccaccatttctttacttaaaggaaccattaaagagatcctggggactgcccagtcagtgggctgtaatgttgatggccgccatcctcatgacatcatcgatgacatcaacagtggtgctgtggaatgcccagccgtaagtgacattttcattgttacagtaggggtgaaaggggggccacccagtgtattcacagagataagctgggaagttttggaaatggttactggtggggtgggataatccttttaaactttttactgattttttttttctttcccacagagttaagcacaaaggaaaacatttcaataaaggatcatttgacaactggtggattttctggtgtggcgtcttccttgagggagctagctcctttgtggggtggtcagtggggtcagggtggcagaacctgtggagaagtaacaagcaccttgtggtgggtaacaaaactgccctgtatgggctgggctgagctcagaaaggaagcctttctttcctttttttttttttgagacagagtttcgctcgttgcccaggctggagtgcaatggtgcaatctcggctcaccacaacctctgccttctag

SEQ ID NO: 16789 - DNA, 1536 bp, Homo sapiens; identical to SEQ ID NO: 16788

SEQ ID NO: 16790 - DNA, 1224 bp, Homo sapiens
cccagcgcctccgcatctaccacagcagctgagtgctgcccgcccacctgggcctggtcctagccctgcctcggccactgtgagccccgggctcctgctcagccttgtgccagccagactcgtatgaggctcccccctgccctgggccccttccccactgcccaggagcccccatcctaagctccaagcatgtctgggccaggcagaggtgctcctcatccatgacaccaccagtctgaatggtcctgggggctggggctggagaggccgctgcaccaccacccgagcctgggagccagcgtcccagcctaatcacggatctgctgcctcccagctgtcttgactgaaggccaccgcccctgcaggagcttgggtcctcatctgggggccatgcacaggcccgtcccaccctgcatgtgggaagggagcaggagggcctggctgggtgaggggaggccttcctgggaaggcgtgtggtgcaggcctgtgctcacagtggcaccagcaaccctgggtctccctctctgctgctccccagaaccccggggccctcctgctctccacaactgtccctccttaccccatgtagctcgatccgaagcaggagtgtcaataaacctgtcttcagtgcgcttctggcctgagtcatcactgggttctcatgggagcccagggaggggaggggacgaggtctggggatggggctcgggcagagggcagctcttctcggggaaggagccaggagtgcgccgcacctcagtcgagaggagaggtcaggtagggccatctcgaatgtcgtgttatcccagcgcccccttcacaggtggagagaccagggcccagaggcagccagggccggtgatggctgcggcctgtgcctccatgagcggaggagccctgtgtgttccgtccattatcccagtgaggcagctgaggctgatgggggtaaatgctcagggccttgcaactgggacatggtgatgcggggtttgaggcccagaagcatcctcaccttcaagcccgtgcggttgtgcaggttggtcactgcacaattcttggagccatatacacttgcactcgctgcagaggtgcacgttgattatgcattttccggcagacggcgttgagccaggtgcagcctcttccttgggctcgtggcaggcctgcttggagcacctgggctctgcctccagctcattcagtgatcgtggccagtgtttgggc

SEQ ID NO: 16791 - DNA, 1882 bp, Homo sapiens
gggcccacctgagtcactttattgggttcagtcaacactttcttgctccctgttttctcttctgtgggatgatctcagatgcaggggctggttttggggttttcctgcttgtgccaagggctggacactgctggggggctggaaagcccctcccttcctgtccttctgtggcctccatcccctcatgggtgctgccatccttcctggagagagggaggtgaaagctggtgtgagcccagtgggttcccgcccactcacccaggagctggctgggccaggaccgggagagggagcactgctgccctcctggccctgctccttccgcagttaggggtggaccgagcctcgctttccccactgttctggagggaaggggaaggagggggtcttcaggctggagccaggctgggggtgctgggtggagagatgagatttagggggtgcctcatggggtgggcaggcctggggtgaaatgagaaaggcccagaacgtgcaggtctgcggaggggaagtgtcctgagtgaaggaggggacccccatcctgggggatgctgggagtgagtgagtgagatggctgagtgagggttatggggagcctgaggttttatgggcctgtgtatccccttctcccggccccagcctgcctccctcctgcccgcctggcccacaggtctccctctggtccctgtccctctggtggttggggatggagcggcagcaaggggtgtaatggggctgggttctgtcttctacaggccaccccgaggtcctcagtggttgcctggggagccggacggggctcctgaggggtacaggttgggtgggccctccctgagggtctggggtcaggctttggcctctgctgcctctcagtcaccaagtcacctccctctgaaaatccagtcccttctttggatgtccttgtgagtcactctgggcctggctgtcgtccctcctcagcttcttgttcctgggacaagggtcaagccaggatgggcccaggcctgggatcccccaccccaggacccccaggccccctcccctgctgctttgcggggggcagggcagaaatggactccttttgggtccccgaggtggggtcccctcccagccctgcatcctccgtgccctagacctgctccccagaggaggggccttgacccacaggacgtgtggtggcgcctggcactcagggacccccagctgccgcagccctggtctctggcgcatctcttccctcttgtcccgaagatctgcgcctctagtgccttttgaggggttcccatcatccctccctgatattgtattgaaaatattatgcacactgttcatgcttctactaatcaataaacgctttatttaaagccagttgccttgagtggtgctgttggggtaggggacggggggcctgggctggggactatgtctaggcccccatacggctcggctttcggggcttctcacttgactgagtgcctctatgtttatgatctgagttcttattccattttacagagaaggaaacaggctcagcgagaagggacttgtccaaggtgacctgccttctggtggcagcacaggcagcttcctcagccagacctgtgccgggtgcccctcgggcagccttgggtgatggtgagtccaagagggatggcagcaggcagcagcttcaaggccactcagggccctggggtgcccacagaggggtgggcccaggctcgggctggatccaaacagtgatgccagctccttcaacgctcccgatcacactcctgtttaccaagcgctcactgtgggccaagcgccttgtgtgcaggaacagcagcctcgagagagctctagaaagtggacacagtcgtcaccaccatttcaccgatgtgta

SEQ ID NO: 16792 - DNA, 1768 bp, Homo sapiens
tatcttatacatgtatcctaaaaagagaagctcatgtgcaattggtgcacagcaggagaaatttctggactgttaggatgaatggacgccttctccccgttatttaagatttgtgaccttgtacataaccctgggtgacgtgcacattgcttgggtatggaacggtagaaatttgggtgtttttaaaaccttgtttggggttgttcctgtccttgttgagaatcatagagatgtctgtgttcttggagtatttcacactgaggactaatctgctatcttcattccagtccctacccctcagtgcctgctctcatccaaataacctgggaggtgacaatcaggatatctcaggaggtccaaggtggaacagacctctttgcctttcccagcgtctcatacccccggtagtgcagctgtgggtggaggctggggtgtctgcacgaagtcaggccagcgtcctcctccacagcctgtcactgccccctccccagcctgtgtccacagtgctgtgatcccgagggaagtcctccagtctaagtcacagtgccctgacaggtgagaagcaaactcccgctggaagcctccatctctttggaaaaacagttagtctggagcctgtggcccaggcccttctgtccccaggcatcatcccaacagctcattttccctagtccgccttcgttcaagggtcaggaatggaccagaacagatgggttctggaggcccctgaacagagggctatggctgtggagaaggttcttggcccgttggactcacacagaccctgtaccctctcggcaagcatcttcagtcagattatcctcagtttcagatacttcataataccttgtgttgtgtggggtcatacatcatcgtgtttgtaagagaagatggtcattttattctctgtataaaacttagctctaaagcagaaactaaagcagcaaatgcaggaaggctgtctcgccatcctcaagactcagcagctctcattctccagtggtgagcacaccatttgtgctgctgctgttgtcgtgaaatataataacagtggaagtcacaaaaatgtcccctgcccagccccctcgccgcccttgacctcctgcaggccatgtgtgtattacttgtctagtgatgtcctctcaaagtgctgtacgcgagctcggcgccacctccgcctccctttcagagcctgctccccgccctctctgctcgctgcattgtggtgttctcttctcaaggctttgaaatctccccttgcactgagattagtcgtcagatctctccccgtctccctcccaacttatacgacctgatttccttaggacggaaccgcaggcacctgcgccgggcgtcttactcccgctgcttgttctgtcccctccctcggaccaaacagtgctcatgcttcaggaccttgtttgtcgaagatgttggtttccctttctctgttatttatataaaaataatttatcaaaaggatattttaaaaaagctagtctgtcttgaaacttgtttaccttaaaattatcagaatctcagtgtttgaaagtactgaagcacaaacatatatcatctctgtaccattctgtactaaagcacttgagtctaataaataaagaaatcagcaccccttcccggtgtccagggggctccagtctggctttcctttgggcaacggaaggagaaagcttttgcagtggttcatcgcagaggaggcgaccacctccggctgtggcatggagtcttctggacccaggtccccgtt

SEQ ID NO: 16793 - DNA, 1172 bp, Homo sapiens
tctcccaacttggctgtcagtacagaccccagggctgggctctgtactgcgctcactcttgaccactttcccctctttctcacccagttccccattacagccttgcgggagatcaagatccttcagcttctaaaacacgagaatgtggtcaacttgattgagatttgtcgaaccaaaggtaagttatttggttcttacgagaagatgacacttgtagcctaaggttttgtttgtaaacttggaactaggcacacctaaactgcctcttcttaactcagatggacccatggtgactgctttttctggtcctctttcatcgtagctggtgcttcctcggggcctgccctggcccagaagaggcactcagaaaatatttgaccggtgaaggaaggaacagacagatgctctggagggcatgggtgcccgtgggttggagcaggaagaaagaagctggttgtgggaaagtgtgttgggtgtggttttcttgactttttcttctttctattcctgcctcagcttccccctataaccgctgcaagggtagtatatacctggtgttcgacttctgcgagcatgaccttgctgggctgttgagcaatgttttggtcaagttcacgctgtctgagatcaagagggtgatgcagatgctgcttaacggcctctactacatccacagaaacaaggtgggggccagagctgggaggaggacccaggcttgggctggtcttggctcccactcccgggtggatgtcactaaaggacccactcttgcccttcctgcagatcctgcatagggacatgaaggctgctaatgtgcttatcactcgtgatggggtcctgaagctggcagactttgggctggcccgggccttcagcctggccaagaacagccagcccaaccgctacaccaaccgtgtggtgacactctggtaccggcccccggagctgttgctcggtgaggactcccgagcgggccaaggggggtgagggccaggcatctacctggccccttccccccaactgccagggcttcttgagctgccggccctggggcattgagcctcaggaggccctcgggctcaaggggccctcctggtgcgctcttcttcccaggggagcgggactacggcccccccattgacctgtggggtgctgggtgcatcatggcagag

SEQ ID NO: 16794 - DNA, 1208 bp, Homo sapiens
ggacaactatgagctgtacgaaaagctggagctggtcaagggccagaagcggaaggtgaaggacaggctgaaggcctatgtgcgtgacccatacgcactggacctcatcgacaagctgctggtgctggaccctgcccagcgcatcgacagcgatgacgccctcaaccacgacttcttctggtccgaccccatgccctccgacctcaagggcatgctctccacccacctgacgtccatgttcgagtacttggcaccaccgcgccggaagggcagccagatcacccagcagtccaccaaccagagtcgcaatcccgccaccaccaaccagacggagtttgagcgcgtcttctgagggccggcgcttgccactagggctcttgtgttttttttcttctgctatgtgacttgcatcgtggagacagggcatttgagtttatatctctcatgcatattttatttaatccccaccctgggctctgggagcagcccgctgagtggactggagtggagcattggctgagagaccaggagggcactggagctgtcttgtccttgctggttttctggatggttcccagagggtttccatggggtaggaggatgggctcgcccaccagtgactttttctaagagctcccggcgtggtggaagaggggacaggtccctcacccacccacaatcctattctcgggctgagaaccctgcgtggggacagggctcgcctcaggaatgggctgtttttggcctaaccctcagaaacactggggctggcacaaactcttggtttcttcaacaggagaattttactgtgtttcttttggttccattgtttggagacattcctgggcacagtttggtccgttagaattaaaagttgaattttttttttttttaaatttttttttttcctccaggacttgtgtgttttgttctgcgcacacaccgccaactgttcccccacagtcagcagcaggttgggcctgaccattgggacttgattgtcaagtcactggaggtcttgacttttttatctcagttcatgttctcttccataattggaaaggacctttgtctgtttttcctcttgggtgccttccagaacgcatctcatgtccctggtgagggaattggtgagggcctgctgtgagctgctgtggctgcgatggtcacccagctgggcaaatcactggagtgacaatttgacctgt

SEQ ID NO: 16795 - DNA, 1254 bp, Homo sapiens
attggcttccttgacgcgagaggctctgagggtctgaaaagggcatctcaatggcatgggtgggtggggagtcagtcatgtcactgaaattgaatgggggaggcccaatgaggtggctcatgcctgtaatcccagcactttgggaagctgaggcaggaggatcccctgaggtcaggagttcgagagcagcctggccaacatggcaaaaccccttatttactaaaaatacaaaaattagccgggcatggtggcatgtgcctgtattcccagctactcatgaggctgaggcaggagaatggcgtgaacccgggaggtggagcttgcaatgagccaagattgcgccactgcactccagcctgggtgacagagcaagactccgtctcaaaaaaaaaaaaaaaaaaaaagaaattgaattgggggagtcatggtcaggggtgagacctgaaggacctccccctgtgtggccctggacacagcccaccctctgtgagccgtttccaattctaaaacagactcaatgtccccctcacccccacctcaaggtcaggatgagaacacactgagtgaggagtggacgctgtccattgccacggccatgagggctggagaccagaacagcatggcccgaagcgtgcggggccccggatgacttggggacaccccagaatcccctggggagaacccttcctgcgcgctttcattttttgacctcatcactgagaaaggctcaatttggtgctcacgtgtccttaacacctgatctggcccaagctgggctccctttaagccaagagagcctcttgtggaccccgcctgcccgaatgaaatccgaacagttggggctgttcatggcaagtggggctggtttttcatttccattggttatttaaagtttcctttaaaataaacgattttaagttataaaaggtgaatctattgaaagaagaacatgaaagaaataaacaggagttcagcggagctagcagaagacaaggcatgtagggggagccattctgtcccagggaagttgtggagggtaggggctgtgtggaggcctctgcagctggtcctcggttttccgcatcggcagaaaactgatggggcacgcagggacaccgcaggctccaggtcctgggtcctgcatctgtcaaaccagattcacacacacacactcacacacgccagcgcgcgcacacatgcactcacacatacacactgatccacacacttgcactcccacacacgcatgcacac

SEQ ID NO: 16796 - DNA, 2070 bp, Homo sapiens
ccccaggaggcatggggatttctcctattgaggtcctatggtaagcgaggggctgaaagggcaaggaccctgccagcgctcaccttgccctgatgacgcccgtctgctctgtcccagccagcggccccgcctccagcgcatgccctaccactactacgagcccaaggggccggacgaatgtgtcacctacatccagaatgagcacagtcgcaagggcaaccaccaccgcttcatcaccgagaaaagggtcttctcatcgtgggcccagctgtatggcatcaccttctcccacccctcctggacctaggccacccagcctgtgggacctcaggagggtcagaggagaagcagcctccgcccagccgctaggccagggaccatcttctggccaatcaaggcttgctggagtgtctcccagccaatcagggccttgaggaggatgtatcctccagccaatcagggcctggggaatctgttggcgaatcagggatttgggagtctatgcggttaatcaggggtgtctttcttgtgcagtcagggtctgcgcacagtcaatcagggtagagggggtatttctgagtcaatctgaggctaaggacatgtcctttcccatgaggccttggttcagagccccaggaatggaccccccaatcactccccactctcctgggataatggggtcctgtcccaaggagctgggaacttggtgttgccccctcaatttccagcaccagaaagagagattgtgtgggggtagaagctgtctggaggcccggccagagaatttgtggggttgtggaggttgtgggggcggtggggaggtcccagaggtgggaggccggcatccaggtcttggctctgccctgagaccttggacaaacccttccccctctctgggcacccttctgcccacaccagtttccagtgcggagtctgagaccctttccacctcccctacaagtgccctcgggtctgtcctccccgtctggaccctcccagccactatcccttgctggaaggctcagctctttggggggtctggggtgacctccccacctcctggaaaactttagggtatttttgcgcaaactccttcagggttgggggactctgaaggaaacgggacaaaaccttaagctgttttcttagcccctcagccagctgccattagcttggctcttaaagggccaggcctccttttctgccctctagcagggaggttttccaactgttggaggcgcctttggggctgcccctttgtctggagtcactgggggcttccgagggtctccctcgaccctctgtcgtcctgggatggctgtcgggagctgtatcacctgggttctgtcccctggctctgtatcaggcactttattaaagctgggcctcagtggggtgtgtttgtctcctgctcttctggagcctggaaggaaagggcttcaggaggaggctgtgaggctggagggaccagatggaggaggccagcagctagccattgcacactggggtgatgggtgggggcggtgactgccccagacttggttttgtaatgatttgtacaggaataaacacacctacgctccggcttcgtgtcctgtgtcacctgggtcgagcacagccttctggtccagcgctgcatgcggcctcaggaccacgtcttccggttgggggctcccagtaaagcgatcctcagcttcttcagcagccagtggccagtgaggtgtgtatttttgcatcttgagtggagacctgggggctctggggatggtgggggcgtgcggagccaggcccgtctggcttttcctgtccccacctcaccctgcctgtgtgaccacgggcaagtcacttcgcctctgagagccccaattccttcaagggcaaaaggggaccagacactgccctcaaggagctcaggttccaggaggggaggagccccgtggtacactaggaagaattcccacagaagctgggaaaagagtttgagcagtgaatgcagaaggggtgaggggaaagacatcccaggccacagagccagaggtctctcagctccttaagcgtctggggacctga

SEQ ID NO: 16797 - DNA, 1171 bp, Homo sapiens
ggggttttcctgttcatccttcgaggctgccagtcagtaacctctgggtttcctggtgccccaggctttttggactccaatgacctgtctacctctttcctgccccaaccccatcatcactctgctcacacctcagtcaccctcttgtcaccctggcttctaattcctgcacctctctctctcatggcttcctagggatggggactgtgtctccatcattactgcacatctagaacaggctgtggcactgaggctgtgctcagaaagtcatttggatgagtcagtcaacagccgggtgcctggatgatgggtggatggatgggtgggtgggtgaggtgtaggaggaggtgggtaggtatgtaggtggacagacaagtggttgaccgggtgatcgatagatgggtggatcttgttccccttggaatctgaaacactaaatgcagcatcttgcttgaggcaggcactcagttggtgtttgttgagtgaatgtgagtagacatatgccttgacgaatgactagggagataagcaggttccctggaggatggttgggtaggttcacagccctgtgtgtgggtggctctgctgtgtcatgccctggcctcccagcagccctgagcttagatcttatgtggcctttctggtctgtgtatcccaggactgttcatctcctatgtgatgctgaagaccaagagagtgaccaagaaggctcagtgaaggtcccgcagggatgaggctgccagccccttctctgcttcccctccagcacagggaccaagtgggggagcctgcagaacctgtccaggcacagtggctcctcaagcctgcctgtcctgcagagtccccatggcatggagcttacacctgactgactggagccccctccccgactcccacttccagaagctaggagggagggatacctggaagactccggtcacctccttcttgctcagggcctaaaagatgctggtcctcccaacctcactctcagactccctgccaccttttcccctgggttctgccgtcttgcctcacttcccctcctgtcacatgctgacgttggacttagcaggttctaaggccacatgtgtgacctctctgacttctcttcctccaccaaggcagctttccttaccctgacacagccccagaccccacaaagccttct

SEQ ID NO: 16798 - DNA, 1247 bp, Homo sapiens
tgggtcctgagcagctggttttcctgcaggaaggttggagcaagcaaagtccttctctgccctcagggtcagctgcccagactggggcggatgccagagaggcaggtgggctgtggctggactggtccggagctggcttccttaccagaaaagcctcagccttcctctggaagcatcccccgttctgggcaagggggaagggctcctttaaggggtgtgctttcccagtggggagcagtctggccctgccccctactaaagcctctgctctcagcactttcccccaagtccttgtaacttgcttgaaggtgggttctggctgccagccagtccctggacaaactctcctgccccttttaaatttcactcattttgtataaacccagcaggctggtgtttacttagccctgtagcttttttcattttttctttccgtctttcttcttgagttcacggttcaatattgcctcctcgccctggtgaggggaggtgctgcttttctgccccacctgccggctggttccagcagcgctggggcccagctggggggccgggatgggggcttctctctctgggaggggtgcaggtgccctccccaggctgggagggttccttccctagctccccatctgcccccgctggtgagagttgggcttcttggtcttggaactccctggcattgggaacagagcatttccagcatttgttgttgttttactcacctaacccttagaaaatgaatgttagaaggtgcctgccgaggcgggacagagtgttcgctcgcgctggagaaggctctgctcagccctgagagtcccttcctgccccaccgatactggcactttaaaaaggaagctgaccgcacagtgtccagacgaattggcccccagaagatggggagttctgtcctgcccttctgtgtctgcgtgacctcacccagcctaggagggaggtgcattcagggtagatttgcctctcattcaaagttctggggctttgggtggaaaacagccagctttggcgctgttggggagactcctccagaccaggaaccccagaaggagacagagcctgccacatcctcccacgccaggccctgggccagggtgattggactgagaatttggccacaaccaaattgatgctggctggaaccagaggccagaaagcctggccttgtccccatgtgggagccctgtcctcagccctcttgtccccttgagctcagtgaattcccaccaggtgcc

SEQ ID NO: 16799 - DNA, 1185 bp, Homo sapiens
caccaaacccctgtggaggagaggccaggaatgccccttgaagagaaagggaggggcgggactagagcagggagctggagagggaggtcaggctgctatactgcaaccctaggaggcagcctctgcgccacggtttacgggaatggacccccctggagttgtgcagtgcatggcctgggcagctggatgcggcaaccctagagatagggaatggtactgaggtttggagtcaggatgaagcaaattctgggacactgggaaacgtagaattgaacaggatgggtggatgaggtcctggccttgtcctggcctgggtcagctccttaggagaacccaaggctgtggacaaagacggcactgggagagagcaggcagcctcagtgaggccgaggagcaggggagcatccctgggaagaggatctgaactcaataggggtcttgtacggagcaggggcttggtccctcgtacctctggccatacctatggagcccaggggatgcttggcagcacctgggaggtgccaaccccgggtggcaagggagggccggtcccacgctcacattgtcttctgttctctctctctctttatctgtgtcgatgtctctctctcttcccccgtgcccgtgccatcctctccacccctggattcctgtctctgcttggctttcacccacttctcctccccacccacggctgctcctcctcctgtccccacctcctccccgggtgcaggacgggcctcttcacacctgacctcgcttttgaagccacagtgaaaaagcaggtgcagaagctcaaagagcccagtatcaagtgtgtggatatggtagtcagtgagctcacagccaccatcagaaagtgtagcgaaaaggtatgacggccgcctgggcggggctgggcctggccgtccattccttgtggccacagcctcccgtgggcagaaggatctgctgagccggcctcacggctacccgcagggacccagccctagtgtttcctgccagtttctaaccctgggtacttgcactcatgacccctccaggcccccatcccagaagacttgactccaacccaagcctccttggtggcacctatgctagtgatgaagatgatgttaaggagatggcagctgtttactgagcacctactatgtgccaagcacacgctaagtgcttgcccttact

SEQ ID NO: 16800 - DNA, 1106 bp, Homo sapiens
gggaggatgatgcaggagaatggcatgaacccggaaggcggagcttgcagtgagccgagatggcatcactgtactccaggctgggcgacagagcgagactccgtctcaaaaaaaaaaaaaaaagttgttttaaattgaaaaaaggatgagcacaccagcctcacagtgtgtgtggcagtgtcccacggggcatctgggcctgtctcatttcagtttgtttccacagatatgcatggcattgctgcttgtttgtaggggcttaagggaagacagcttgaataaatatagctcctgccctccaggtgcttagagtcgggtgtatatgtgagtgtaggagagaggcagggagcaagagggcagcaccagggaagagcctggtgatggaagccggggaggcttcttggaggaggtcacccaaggcaggcagatgtgaggtgcagaagcctgcagggcagcacaagcctgcctggctggatggcagtatcactgatttggggccggggagggtcttcatctcgctgaccctcaggggccatccctctgcctccaggaaacatcgtgggaatcggccagtgcctgctgcatggcatgacggtggtgattcggaagaagttctcagcctcccggttctgggacgattgtatcaagtacaactgcacggtgagcgagagcgggaagggtgagctgtccctttcccctagttaccctcttcccaactacactccggggcatctgtcttatagctgaggtggccagtcattccaaagggctcatttgtggcaaagttcccattgttcagatgggaaggctgagacccggagagggaaaggatggcatggccagcccctggggagagtaggggcttgagggatcaggagaatcctagtgtagtgagggcagcctctggagcctcgaatcacaccaagttcacccccagattgtgcagtacattggtgaactgtgccgctacctcctgaaccagccaccgcgggaggcagaaaaccagcaccaggttcgcatggcactaggcaatggcctccggcagtccatctggaccaacttttccagccgcttccacataccccaggtggctgagttctacgggg

SEQ ID NO: 16801 - DNA, 1546 bp, Homo sapiens
gaccattctttgcaaactgtaaagggctgtgcctcctcccccacttccctcccctgtttgtcctccagccctgctccctgccttcctcagtactggtggttgggaagctgggagctcgggcccctgccctgcactgagtcttcttccctgctctcccaggaacctacaagttccagaagacagagctacggaaggagggctttgacccggctattgtgaaagacccgctgttctatctagatgcccagaagggccgctacgtcccgctggaccaagaggcctacagccgcatccaggcaggcgaggagaagctgtgattccccccatccctctgagggccggcggatgctggatccggagccccaggttccgccccagagcggtcctggacaaggccagaccaaagcaagcagggcctggcacctccatcctgaggtgctgcccctccatccaaaactgccaagtgactcattgccttcccaacccttccagaggctttctgtgaaagtctcatgtccaagttccgtcttctgggctgggcaggccctctggttcccaggctgagactgacgggttttctcaggatgatgtcttgggtgagggtagggagaggacaaggggtcaccgagcccttcccagagagcagggagcttataaatggaaccagagcagaagtccccagactcaggaagtcaacagagtgggcagggacagtggtagcatccatctggtggccaaagagaatcgtagccccagagctgcccaagttcactgggctccacccccacctccaggaggggaggagaggacctgacatctgtaggtggcccctgatgccccatctacagcaggaggtcaggaccacgcccctggcctctccccactcccccatcctcctccctgggtggctgcctgattatccctcaggcagggcctctcagtccttgtgggtctgtgtcacctccatctcagtcttggcctggctatgaggggaggaggaatgggagagggggctcaggggccaataaactctgccttgagtcctcctagcctgtgtgcaaaccacccaagcccaccctgaccccagaaccccacagccccactgtggccgcttgatcccccacgccaaccccctggcccattgacccgcctcatctgttcattcacttatctaagctgagggtgtagcaggtaagatgccgcagcccctgcctccaatgtgctggttcagccgggggcagtgcccatgtgaatctggcaaggtgtttaacagtgtgggcttgaaagtccaaaccagctctgtcactctaagtgtgtggccttggggaaatgactcagtttcatctgtgaaatgggattcatcagttaagaggattcagaagctaaaagtgctatcacgagtaaggagcttgaggggaaaccgtcacctcgggcaggaccctgactccgcctgaggtgcattttcccagttgtttaggggcgggaaagatttgcaggggtgggggctgcagtgagagccaaagcaaggctgcctggcagcccggac

SEQ ID NO: 16802 - DNA, 1176 bp, Homo sapiens
accagcttcaggaccaggacagcgtcctcttcatctccactctgcacggcggctgagggcccttctctgggcctgggcacccttagaggggagaacgaagcaatcagacatccccttgggccctgcttccaggtctccctgtcccccttgcctgccttcttccctgctctgtcccctaagctccctccaggcagggaaaagaggccaggtgctaaaaatgagcctttctcaagcacgtgagcagcggaaggcagacaggcgccagagcccagcactcccttttccagcagctgtggtgggggagggttcccctccagtttgtcaagagttgaaggaggctctgtggccaggtgacctggctgccttccactccttgtacctcagtctaaacatggagtggccgctgacaaggcgctccagccccagagccagcgtcttcatggggaagatgaatggacctgagtagctgaaggaaggcccctccctacccaaagactggaggcttctcagcctcaatttccctgtctgtacagctgagggctctgcctgtcccccactgctatcagtatggaaccccagctggggtcccctattgagtgccgactccccccaccgccagcagctgctcctccagccacacccctcctgctccccccacccctagcccttgaccctggctggcctgccccgctccacaggccaccagatgggctcctgagaccctccccaggctgcttacagctcattctgctgggggtagagatgaggggagggagtaagttaaaccttggactagcaagtagaagcctggggggatgcgtgtgcctcagtttcctcctccacaactgaatatagtggctgaaaactggggagatacttgatggcgcgaatgtccgttttctctcccttcccacctcctgcaggaagcaggacggggcaggcagcacctggtaggcacagtgctttgcccctcctccccttcccttctggaagtcttggggcctcagtgcttgcaacagccggccttgggcaaataaaagactaggttgtttactagccttgcttggagcttcatccttggaaacgggtggcacctcatatccccccagccgtggtctgtgatacaacctctccatcctcagcctagggcctcagagctacccttcacccaaaaga

SEQ ID NO: 16803 - DNA, 1149 bp, Homo sapiens
ctgtcatagctcactgcagcttcaaactcctggggtcaagtagtcctcccaccccagcctcctgagcagctaggactacaggcgcacaccatcacacccagctaatttttgtattttttgtagagatagagtctcactatgttgcccatgctggtcttgaactcctaggctccagtgatcattccgtcctgacctcccgaagtgttgggattataggcatgagccactgtgcctggtcttagaatattttcagaaagaaaccccatacccattagaagtcactccacactcgcctccccaaacctcctggcaactcctaagaaagtccctatgtctctatggatttctattttggacactgcacagcgggcccatgctctgtttctcctcgttaggcggaccgccgctaccagagccggctgcaagacctgaaagatcgcctggagcagtccgagagcaccaaccgcagcatgcagaactacgtccagttcctcaaatcatcatacgccaacgtgtttggggatggtccctattccaccttcctgactagctctcccatccgctcccgatctcctcctgcctgaggccacttatcagggcctggagccctgatggaagccataggaactccagagttgccaagccatagctgagaagcctggtggttttcctctcccagtgaaaaaatgggttcagggtcttgtccttagctactagctctagaaaagtcccaaaagcagcagaaggtgaagcaggaagcacttggttttctccttcctgatatagtcacctgttggaagtgttaaaatttcctcgacaggccttaaatttactactacattagggtaccacattttaacttaccatgactttgctccttcctttcctgagaaaatatttccactggattttttccaccagtccccttacagccctcattgttttaggaatctctctcaggttttttctgacctaaaccagcaggaagtcgtcctgggctgtaagcaccatcacttgctttttttttttttctgatttcacaagtgtggtgttttcccaaggctcccttcccaagctcagtgcaaacctctcactcccaagtttctttgaggccacttgcccccaagcacttcacaatagaccctcgag

SEQ ID NO: 16804 - DNA, 1615 bp, Homo sapiens
tctgacttcctccttctggcgctcctgatgtcactccatcacccaccatcaccgctgctgcaaagaggcaataataaaggaactgaagacagctgtatttgggagaagtcatgtcagattcagaaatttgccattatgtatttttatgtatttatgccttgtgactaggagaggagattttcatgggtcacaaaattcttggaggtcccttagtagatttggtagttccttaagagatccacgtgataaaataaatggagttggcctttcttgttttttgcaaaagtgataaaaggtctttagcacttggtctcctcccttgtctctagtgtctttcagaaagttggcaataccttaacaaatgcactctgagctggagggagcccaccatttgcacccacctacccaccctcacccctgttcagatgaatttccagaaagagctaaggctcataaggttcccttttaagtattatttaatagttgaggccagatacttacatgcaagtctgggttatggttgttttgcctttctcagcttgtgaagtcattctaaagctagaggaagtatgtgatatacacatggactaaggctcaggtgacactatggctagattaacatctgggattaggactggaaacacatgtcattttgaactaagggaaactctttgtcatcctaatttggaatttggtccctggatggctagggatccatgaaccaggcaggtaccttttttgtttttgttttgttttgtttcttttctgtttgaattaagatgggctaagatggggcttgcaacattaaacatgagctgagcatccataagcattgaattgggattaaataaagatgttgggcaggaactgaacactgctaatatgatgataaatatgcctgactaaagccactacagaaatccagagattggctgttaaaatttgttttgtggaaagactaattctctttgatactgcagaggcagtggccatggatctgttcctctgtgctaaatgtcttgtggcagggtgtgtttgtgggggagtgttcactggtactcttgagtggcctgaagtgacccattctatgaattgttaattaaggtgccaaaaaaaattaataataaagcttggttttttgaaaaacccattgctgatatattggttcaatatgatcaatttcctctgccttgagctatgtaaatcatgatagtatacaagtccaggtatagagcggtatgcatttattccttttggtcttcttgacctacaccttgggaatattacttctttttctgtcatttccttttttggaattatgtactaataactgaccctattttatctagcaagagatgtgaaagtgtattaaaatctttgaaagacacaataggccgtgcttagtggctcatgcctgcagtcccaacactttgggaggctgaggtgggaggattgtttaagtccaggagttcaagaccagcctgggcaacatagtgagacccccatgtctaaaacaaatttttttggccaggcgcggtggctcacgtcttaccagcctggccaacatggcaaaaccctgtctccactaaaattacaaaaattagctgggcatggt

SEQ ID NO: 16805 - DNA, 1240 bp, Homo sapiens
tgaagtcaatgcagcctggcagcggctgaagggcctggctctgcagaggcaggggaagctctttggggcagcagaagttcagcgctttaacaggtgtcaagccagagtgggctttggggaatgggtctcaacctggaggggagttgtgaagcacagggcatgtgctggtgagctgtcgaggctgactaggccttggtcccatggggtgttcctagttctagggagtcatcattgctgtggattaactggtgcctttgttctgtagggatgtggatgagactatcagttggattaaggaaaaggagcagttaatggcctctgatgattttggccgagacctggcaagtgttcaggctctgcttcggaagcacgagggtctggagagagatcttgctgctctagaagacaaggtgggttttacaagcagctgattctgtaaataagttaccaagggtcaggagaatagttctgacggagttcatttctaggtcaaagccctgtgtgctgaggctgaccgcctgcaacagtcccaccctctgagtgcaacacagattcaagtgaagcgagaggaactgattacaaactgggagcagatccgcaccttggcggcagagagacatgcacggctcaatgattcatacaggtgcaaataatgctccaggtcttaaccagtatcatttggcttcttttttggaagcaggaatagcagagttaagggtctgttctgtgttctgtgaaagtgtcaggtatcacctacaaatgcaaatcacttcttacctatgttctctctgtttggagactggcaactgtatcatgtgtagtatacgtatggtatttacaacttcataaattcttctattctgcatcactgcattatgattgatagaatgggaatgtccctttaagtatctgagtatcacatgaaatatcttattaaaaccaggattagaaaggaaaagaatccttgctagccaagggttgaacctgggaataacaaggaagttgaaaatgtgggacaggattggggcattatagtgatggagagaacctaagttttaaagggttgatttcagccttctcttgctttccttcacagtctagattgggaaattttcatatttcccagaattagaatttatatagtttgttagacatttgagaacatagaattcagagctttagggaggccattttccaccctggaacctccgctggaaacataatgtcttcctttggtttt

SEQ ID NO: 16806 - DNA, 1128 bp, Homo sapiens
attgcctaggaacattagataaataatgatttatatgatttatatgttttttagtattacatagagtaaagacatttcaaagacttgtcattagtagcttcggagcctaaagtctagggagtttctgaatttattttccatatgttatggagcacccactcagttgacatttcttagtggagagtccctactccatttatactccattaaactccatttatactgcctcacttttaaatggatgccctatttcttctacctgggagtttacttactgtttttacctaaagtcatttgtgatcatttggcaataaattaattctagattaattaaaacaggccatcccttttatattgaacatgcacatacaagtgaatgttgtttttccccttttgcaaatcggaaaaaaggcctgaagattagcactaggattaggaattccaggatagctgttctgtctgcctcggaggcattggggctgacctcatctccctgaccatgtctcctatgcccccaagctgaccgtcctttccgaggagagagcggcgctgctggagctgtgggagctgcgcaggcagcagtacgagcagtgcatggacctgcagctcttctaccgggacactgagcaggtggacaactggatgagcaagcaggaggtaatctgtgagcaaagccttgccagtggtgggagaagaagggcctgtgttttgcctcctcgggtagtgtgcttgttttgttttaggacatcagtaccatgttagttctgaatccattgaagagggggaattgagcaagcttctctcagctctgccagcatctctccctgctgagattgcaaggccttcagaaaaggccccagcttttcagattagtgtgatgtaaaatgttttattaaagagatttttttcttagaacttagcattgctgggtgcagtggctccctgctgtaatcccagcactttgggaggctgagatgggagtatcccttgagcccaggagctcaaggctgcagcaagctatgatcgtaccaccgcactctagcctgtgcaacagaccgagatcctgtctcacaaaaaaaaaaaaaacaaacaaaaaaaacaaaccttagcattatgtaacatctgaat

SEQ ID NO: 16807 - DNA, 1175 bp, Homo sapiens
ggaaggattccaaacagatttgatgaaagattcatatgcagagtactcctgtgggtgcttaaactttcacaaggatgacatgctatctcgttgaagacataatacaactttatggaaaaatgatttacttaatggaaacctccaaacttctttaagtttgtacccttcattaaaagtaggtcagggttaatattaagaggtactcttcccattgaaaatacatcttagaaataagaatttggaaagctgttaacctgtgtttgacccctgccaggagatcgtgccacaactaatgtctccagtcttgaatggaggtagtgcagtcttatgatatctgactggtgacatcaagcaaaatctcaaaagttatgagaaaaaatgtcatcaccaacctttgggtgaaaaccttgacctatgttaaagtttggtgtgttttatgatctgttcagcagttacttttctccagaggccaagcttgggactagtgtgcttaccaatgaagaactcttatcttccttcctaggcattagatgaatttgcaaccaagctaattcagaacaaccactatgcaatggaagatgtggccactcgccgagatgctgtaagtttgtaggttcttcatgctcctcctttttggtacatgaatgtctcttctaagatgttccagttaagtctcttcaactggatatccctttgggagtgaacactagagactcacaggggatccttgtctttcagctgttgagccgccgcaatgcccttcacgagagagccatgcgtcgccgggcccagctagccgattctttccatctgcagcagtttttccgtgattctgatgagctcaagagttgggtcaatgagaagatgaaaactgccacagatgaagcttataaagtaatgtactgttagtgttgccatgtagcactcgattagtaagctaaacacagctctcacaaataaattgtagctaaaggacgaaataagggattccagaaaccccactacttaatgtaagccaactgttttatacattcctccataaagataagtatgaaggtagtgcaagggaacttgacgttctcaggttcaagatagaaagaacccccttcttttattcacaggatccatccaacctacaaggaaaagtacagaagcatcaggcttttgaggctgag

SEQ ID NO: 16808 - DNA, 1073 bp, Homo sapiens
tacgtggctaaattgcctgttagcactcagtaaaatttctttctaagggtagtccagtctgttccctgaccttgctctgtgaagttaccagtgttttcagcacaggaaaatctgccttaagcatggcagacccgccaggaaaatgaaggtgaactaaccctctaattttcctgctatttctttactgtcatgtcactcatgacttagactgctccttagacctgttgaataactccatagtttcccaacattaagcatccaccatcatggcaccagtcggagctgctgcctttcatccctgtggattaaccccactaattcgtgcatgcttttgctgtgccccctctgtgcaggacacgcataactaaggaggccggcagtgtatctctgcgtatgaagcaggtggaagaactgtgagtaggctgagagtcttgcagagcaccaatgtccactgctaccctatccattctccctctgccgcttctcttgaaggcctttgtccatccagaaagatgaggtggtgggaggaactgcctgtccgtgcagcagctttggctcacaagggaagaggtcgcggtgcagctgtgtcggtcgatgactgcttatctcattggttgcttccatgtgcagctgtgtgttcagagtggtgttggttctccctcctgttggtttttgtggtggaccagccactatcagcagcaaacctgaaggcctgttctatagttttccttagtaggaaggaaatcatatgcttctcttaaagtgctctgattcttggtaactcattgcttttttattttactttgggacacttagatttgatgatgattctagttttttttaatttttagttttttattgtttgttgttttcgtgttcaaagataatatttcagccttttgtattttagttcccgagggttagaatattctttgattcttaagaaatctttcaagtaacagaatggcacagatactcagtactgtgcctgattttccttctgaacttgccaaaactttctgagagctgaatgtatcattttagaaatgtcctactaatatggagataaaaca

SEQ ID NO: 16809 - DNA, 1147 bp, Homo sapiens
ctgatgtttatttgtgacatggggtgggtgctcagtaaatcctgctaagtgaattatttggctttttagagttattggtggtagccacagacaaatatacaaatgtcagctaaataaatttttttaggctgggcgtggtggctcatgcctgtaatcccagcactttgggaggccaaggcaggcagatcacctgaggtcaggagttcaagaccagcctggccaacatggggaaacccacctctactaaaaataaaaaaattagctgggcatggtggtgggcgcctgtaatcctagctacttgggaggttgaggcaggagaatcacttgaacccggtgggggcggaggttgcagtgagctgagattgtgcattgtgctccagcctgggtgacaagaatgaaactccatctcagtaaataaataaataaataaataaataaattttttttagtgtcctgtaatcaaggcagttgtacttggcatttcttaacctgaatgtgtctcgcctttagagatgctgatgaaaccaaagaatggattgaagagaagaatcaagctctaaacacagacaattatggacatgatctcgccagtgtccaggccctgcaacgcaagcatgagggcttcgagagggaccttgcggctctcggtgacaaggtgagaggacccaaagtcatcttctgtctggcatttttgccccagaaagagcagagtcttctgttctgcagagcatacccccttactgcaagctcattcaccactttcttcccataggtaaactcccttggtgaaacagcagagcgcctgatccagtcccatcccgagtcagcagaagacctgcaggaaaagtgcacagagttaaaccaggcctggagcagcctggggaaacgtgcagatcagcgcaaggcaaagttgggtgactcccacgacctgcagcgcttccttagcgatttccggtacggagccatgttcactcagacttctggaacatagagccttctttgtaggggtcatttttattgtgaaaatagtacatgctcagcagggtacaatggctcacacctataatccaagcactttggggggccaaggcaagcgaattgcttgaactcaggagccggagaccagcctgggctacatggcgaaacc

SEQ ID NO: 16810 - DNA, 2419 bp, Homo sapiens
ggagggtgaaaagatcttaattataagcctactgacttttcctctgagaaattcggacttttaaaaaaataacaagaagttttttaacactttgcccaaagacctagcctcattcagtagatcagattaacccaagataactttctgaggcaagaattatgtcattctctgttttcctgggcagaagatctccttaccaggtaatataatagctatttttctggggtgctggtttccagggacctcatgtcttggatcaatggaatacgggggttggtgtcctcagatgagctagccaaggatgtcaccggagctgaggcattgctggagcgacaccaggtgggtggacctgcctgctgagtagcaaagacgtggctgctctgcagggccctagaggcctcattcccaccctttgtggtgagtcggtggttgacgtcagagtgggcatctgctgccagttacctaatcccttccctccttttggcaggaacaccggacagaaatcgatgccagggctggcactttccaggcatttgagcagtttggacagcagctgttggctcacggacactatgccagccctgagatcaagcagaaacttgatattcttgaccaggagcgtgcagacctggagaaggcctgggttcagcgcaggatgatgctggatcagtgccttgaactgcaggtgtgtgtgctcctggtttctgaccaagtgtttccttgctgaagggcctcattttctcacctgcctcttgccctctttagctgttccatcgggactgtgagcaagctgagaactggatggctgcccgggaggccttcttgaataccgaagacaaaggagactcactggacagcgtagaggctctgatcaaaaaacatgaagactttgacaaagcgattaacgtccaggtgaggcctctggaccatggagttggagtctggatttttcctgattgacatctgtttcttggcttatatagtcactgttatatctccaaggaatacctgcgttgtctaagaaaaatatgtacataaataatctttaaaactttatagattctggtatttctgagattttaataatgggggtgccacaggaaaaaaaaatattatcaaagggatggaaaacaaatgtgtgggtaggtaagggaataatgaacaaacaacaaggaagatgtaaaactgtttgatttatacgtcactttgctgtaaatctgacagcattttcctattatcaggcttaattttgttctgttctgatattctaacacctgccccacctgagtgacctggagacttcttgagttaaactctactctagtaatgaatgaaatcaagctttcttttggcattttacactcttgcttctaaagtgtcagtgtattctgatcctgccaccagctagttctcagtcacccaaaataactatccttttctcaagactggcagtccaggcagggcccagccacaggcccaccttgatctcatgcctttgttttctgacaggaagagaagattgctgctctgcaggcctttgccgaccagctcatcgctgccggccattatgccaagggagacatttctagccggcgcaatgaggtcttggacaggtgggtgtcctgtggcactgacatagtcaccagccctgagaggatgcatcccctcatacgaaggcccaggcctgttctgtctccccacttccttctccacggtaagatatgctcatgttggatctcatggtttcactctttcaggtggcgacgtctgaaagcccagatgattgagaaaaggtcaaagctaggagaatctcaaaccctccaacagttcagccgggatgtggatgagattgaggcttggatcagtgaaaaattgcaaacagcgagtgatgagtcgtacaaggatcccaccaacatccaggtaagctgaagtgactgggtgttggtcttgatgtagccttatgttattgagtagattttgttaaataaagcatttataaaacaatctccttgcacccatgggaagtcagtgagaaatatttcagtaagcccagccagtgggaaagccctagtcaagtttcagagccatttaaaagttgccttcctcatttgtctccattaaaactatttctgctgtaataaaagtctatagaatcccccttctattactgttcccaaatgctgagcttcctgggggaagtatgacaaaatgagtttctatttaatagctgatatgtgtgtccacatcagtgtactgaactcttgttcttttaatctgtttttgtagctttccaagctgctggtaagtttttaatttttttaagagttgtagttaaatgagctccagtatttgtgttactctgcgtagattattgttattattgtggtcacacggtttgctggtgtctcttcatccatcc

SEQ ID NO: 16811 - DNA, 1160 bp, Homo sapiens
atcacacatgaatcacacatgaatcacacatgattctccagaaatcaagacatgagagtctggaatcacagagtgggtgattcatgatgttccatggacggcctgactgactgtgagggctcaccttttttgtgaatgtttttgtttttgtttttgagacggggtcttgctgtcacccaggctggagtgcagtggcacaatctcggctcactgcaagctctgcctcccaggttcacgccattctcctgcctcagcctcccgagtagctgggactacaggcacccgccaccaagcccagctaattttttgtatttttagtagagacggggtttcaccgtcttagccaggatggtctcgatctcctgatctcgtgatctgcccgcctcggcctcccaaagtgctgggattgcaggcatgagccaccatgcccagcttttgtgactgtttttaagcatatgttaactatcacaatcaaagctggaggagattatggctgattttcttcctgtctcctgtaattaggggtcagcggctggaagagtccttggaatatcagcagtttgtagccaatgtggaagaggaagaagcctggatcaatgagaaaatgaccctggtggccagcgaagattatggcgacactcttgccgccatccaggtgagacagaaaccaaaggtgtcacctgctttctctcttggcaactgcctgctggtcatcatttccctgttggtttgttagagggccctgctcttactaggagagcacacagggccagcagccaaggcctcagtagttggttttagccctcaagatctcacactaggggacatcacccttcagtaaacaaaattggtatggctttgtcagtctcagttcacgggccctgtcattcaccaggcagcgctgtgggcttgagtcttcatatcagtttcctggggctgccataaataagtaccacaaacggagtggcacgaacggagtaccacagacagagtggcacagatggagtggctgaggacaacagagatttattgcttctcagttctggaggccagaagtctgaaatcaagaagcaggcaggaccatgttctgcaaacctgtaggggaggatctttccttgcctcttccagtttttgctggcaccaggcgcccttggcatgtg

SEQ ID NO: 16812 - DNA, 1149 bp, Homo sapiens
actatggctcacacctgtaatcccagcactttgggaagccgaggtgggcaaatcacctgaggtcaggagttcgagaccagcctgaccaacatggtgaaacccccatctctactaaaaataattagctgtgcatggtggtgttcgcctattagtcccagctactcgggaggctgaggcaggagaatctcttgaacccgggaggcggaggttgcagtgagccgagatcacgccactgcattccagcctgggcgacggagtgaaattcactccgtctcaaaaaaaaaaaaaaaaaaaaaaaaaagaattcctaaaagtagaattgtcagtacgtgtatttgtgtgaagcctttgaccgcattgctcttacaaaagccttaccctatcattgtttacccagcagtggacaggggagcaagtggcccattttatagaagtttagagcctttccagggagggcatagtcaggtaaccacagcaggtaaggctgaccagtgtgtgcctctctccatggcctagaacaatcaccatgaggagaacatctcttcaaagatgaagggcctgaacgggaaagtgtcagacctggagaaagctgcagcccagagaaaggcgaagctggatgagaactcggccttccttcagttcaactggaaggcggacgtggtggagtcctggatcggtgagcactgtcagcaaggcccggaagagccttcccagagctgctctttgtctccttccgtgtcattggttttcttctgcagagaagaaactgatcaattgtgggcatggcagagaacctactaccagggcagaccactgactgccagctaggaggagacagtgtcctgaggccagaactgccacccggaactgggctggcaccagggtcaataaacaaaagcctgtaaacgctgctgcacgcagagatggcataatgtgacgtcatggcatgaacaaagttggcacagcaaaggcaccactagctgccctggtcaggggcgccacccagctcctgggtgagggaaaactgggtccggatatcggggtccacgtgtcctgggtagtagtaatagcaactgaactagaagacgggctgcagggagctcgtcatggcacagatggaggccaggcctgggtgcagggaggggcctg

SEQ ID NO: 16813 - DNA, 1092 bp, Homo sapiens
gaagaagcttctggaggctcagagtcacttccgcaaggtgaggatggggccacgtgaagcttagctggcccacagctcaaggaaggacgcccaccttctgtctgcccagctctgccactcccccttgaggaagctgtgagctcagtgcagagctttcaaacatgggtgtggctggcatcaattaaaaccagggcaaatgagagggccctgtgagatcgccattcagaagcacgcaggacagactagagacaagggcaaagggtaggaaggggaaaaaaggctggtgaagacttgaagggggagcaggagacaggagcagaggggagctaagctcccagcaggctgtgtgcgcctctgattcccaggaaccaccccgcaccccacctcctgcactgcgtcggcacgtccagccctggcgactccgccaactcagtctcttctgcttccaggtggaggacctcttcctgaccttcgccaaaaaggcttctgccttcaacagctggtttgaaaatgcagaggaggacttaacagaccccgtgcgctgcaactccttggaagaaatcaaagctttgcgcgaggcccacgacgccttccgctcctccctcagctctgcccaggctgacttcaaccagctggccgagctggaccgccagatcaagagcttccgcgtagcctccaacccctacacctggtttaccatggaggccctggaggagacctggaggaacctacagaaaatcatcaaggtacacctcccgctgccctcaggagctgctcggcctcccagagccctctctgggccctgctcagagcccacacttaactgagtcacgacaagacgagcaggatggaggagcatggtttcatcagaagtttcatttctttttgtgttcttgaggcagggtctctgtcacccaggcttcagtgcagtggtgctaccatggctccctgtagcctcaacctcccaggctcaggtgatcctcttgcctgagcctcttgaataactgggactacaagcacgtgccaccacgcctggctaattattttaatttttgtagacagggtgttgctatgttgcccaggctggtcttc

SEQ ID NO: 16814 - DNA, 1206 bp, Homo sapiens
ggctcctgggctggtgactgagctgagggcccccgtctgagcatctgtgctccccacccctgcagcgcaagcaccaggaaatccgagccatgagaagtcagctcaaaaagatcgaggacctgggggccgccatggaggaggccctcatcctggacaacaagtacacggagcacagcaccgtgggcctcgcccagcagtgggaccagctggaccagctgggcatgcgcatgcagcacaacctggagcagcagatccaggccaggtacccgggagggctgtgggccaggctcagcccagagcagggggaggaaaagacacagtcacctgctgtgtggagggtctgttccctaatttctgtttttcttccaggaacacaacaggtgtgactgaggaggccctcaaagaattcagcatgatgtttaagtgagttcagccttactcgccctggctgggtggggggtgttcggcagcagggctgcctgctgagccgccctcggctttgtgctgcagacactttgacaaggacaagtctggcaggctgaaccatcaggagttcaaatcttgcctgcgctccctgggctatgacctgcccatggtggaggaaggggaacctgaccctgagttcgaggcaatcctggacacggtggatccgaacaggtaaattaattaaggccaggtgctgtgagcctctgcccggggcacccacctgccctccctgctcaggctcttgcttcccccgctcctagagatggccatgtctccttgcaagaatacatggctttcatgatcagccgcgaaactgagaacgtcaagtccagcgaggagattgagagcgccttccgggccctcagctcagagggaaagccttacgtgaccaaggaggagctctaccaggtatgggcctcaggaggtgggtgaagaggtgtcctttggaaaactaaagccaaatttgtggcagagctgagtctggggtaacaggccctgcgctgggtattctccccatttacaaatcaaactcagtatggacagaagtcccggatctgcttgtagaagcagctccgagcccccagcatcctgagacctgggaggtcgggtttgaagtgggtgcagctggctcaggcaccaggtgccatctcttaccccacagaacctgacccgggaacaagccgactactgcgtctcccacatgaagccctacgtggacgg

SEQ ID NO: 16815 - DNA, 2173 bp, Homo sapiens
ttttttttttttttttttttttttccctcttgtgctcagtcgccctgttcttgaggtctcttttctctactccatggttctcaatttatttggggggaaataccttgagcagaatacaatgggaaaagagtctctacccctttctgttcgaagttcatttttatcccttcctgtctgaacaaaaactgtatggaatcaacaccaccgagctctgtgggaaaaaagaaaaacctgctcccttcgctctgctggaagctggagggtgctaggcccctgtgtagtagtgcatagaattctagcttttttcctcctttctctgtatattgggctcagagagtacactgtgtctctatgtgaatatggacagttagcatttaccaacatgtatctgtctactttctcttgtttaaaaaaagaaaaaaaaacttaaaaaaatggggttatagaaggtcagcaaagggtgggtttgagatgtttgggtgggttaagtgggcattttgacaacatggcttctcctttggcatgtttaattgtgatatttgacagacatccttgcagtttaagatgacacttttaaaataaattctctcctaatgatgacttgagccctgccactcaatgggagaatcagcagaacctgtaggatcttatttggaattgacattctctattgtaattttgttcctgtttatttttaaattttctttttgtttcactggaaaggaaagatgatgctcagttttaaacgttaaaagtgtacaagttgctttgttacaataaaactaaatgtgtacacaaaggatttgatgcttttctctcagcataggtatgcttactatgaccttccaagtttgacttgtataacatcactgtcaaactttgtcaccctaacttcgtattttttgatacgcactttgcaggatgacctcagggctatgtggattgagtaatgggatttgaatcaatgtattaatatctccatagctgggaaacgtgggttcaatttgccattggtttctgaaagtattcacatcatttgggataccagatagctcaatactctctgagtacattgtgcccttgatttttatctccaagtggcagtttttaaaattggccttttacctggatataaattaattgtgcctgccaccaccatccaacagacctggtgctctaatgccaagttatacacgggacagttgctggcatgtcttcattggctatataaaatgtggccaagaagataggctctcagtaagaagtctgatggtgagcagtaactgtccctgctttctggtataaagctctcaaatgtgaccatgtgaatctgggtgggataatggactcagctctgtctgctcaatgccattgtgcagagaagcaccctaatgcataagctttttaatgctgtaaaatatagtcgctgaaattaaatgccactttttcagaggtgaattaatggacagtctggtgaacttcaaaagctttttgatgtataaaacttgataaatggaactattccatcaataggcaaaagtgtaacaacctatctagatggatagtatgtaatttctgcacaggtctctgtttagtaaatacatcactgtataccgatcaggaatcttgctccaataaaggaacataaagattttttttggactggggtcattctccttgttttatagagaaatgttacttgctattggattcagaaattgttctagttttttgtcttcacatcgttagtgactggggaagcgtgggttagcgctaatggtatgacattggtttagaaagctttgagctggtcggtgtccgagtaaaggacaaattcaaatatcttacttggatacagtttctgagtaaacagtttctgagagggtgagtatagcattttcattctgaagtctcaaaaggacttttcactaggaagaaaattgagtacagtgggtcctgttatctgcagcttcagctacatgtggtcaactacaattcagatactttgagactacattcacacctatactgtatgttaaatgtgtgaatgtatagttatagtatacaatagtcaaaattatcctataccgttaatctcttactgtgcttaatttggaaattaagttttataggcaggtacaggaaaaattgtatggggcttgatactcctgtg

SEQ ID NO: 16816 - DNA, 1188 bp, Homo sapiens
tcctgttccttttacaacagcctgcctgggacccccggcacttggttagacagaacaagctggcactctgacccgcagtgacccttcagaatctccaaggggcagctctcaggtgcccaagtcagtctgcaccagtacagacaggtgcccctccattcagctccttctcaaggaatggccgagtgccggtgtcagaaggggtttaggagtgagcaggactgaaacagtctctgccttctgagagcttccagtgtaagtcaggagacatatactaaacctggaaacagatatgtaattgcaaatactgtagtgctgtgaaggagggaaaaactggtgcttttagagaatcagagggaggccctgttttcctttgggggatcgaggaaagcctttccagggaggaggctcaggatgagatatgaaagaggaggaggcagcaagctgggtggaagagtctgctgggctgaggcacagcacatgagagtgccctgtggccggggaagaaggcgcatggcaggataaagcagggtcctcctttcccttgccaccctgggtgctgctcctcagcccaggctcatcttcagatggccccatgtgacccccgcacagggcaactcagccaggctgcaggaaaaaggaggcactgcctcttgtgctctcaggctagggttggtgcagtgtttacccacgaggtgttctgattgctgtgttcaagtcaagaaccactccgtgacctggggaaataggttctgtttttttgttttctgttttttttttgtttttgtttttgtttttttttgagacagaggctccctctgtcacccaggctggagtgcagtggtgcaatctcggctcactgcaacatccgcttcccgggttcaagcgattctcctgcctcagcctccctagtagctgggattacaggcatgtgccacaacgcctggctgatttttgtatttttaggagagacggggtttcaccagttggccaggctggtcacgaactcctgacctcaagtgatccacccgcttcagcctcgcaaagtgctagcattacaggcatgagacaccatgcctggccaggttctgttttacatgggtagtgatcctttggtgcttctagaagcgtgtttgcaatgtgctaagtataagaagtctgaaaaatgtgcgtgtactgcaatacatatat

SEQ ID NO: 16817 - DNA, 1347 bp, Homo sapiens
tgggaggctggcaggggcccctccctgcctcggctctgccgccccagcctcagttcctgcttctggtcttctcctgggctccactcaggggaggtgcttggccaatgggccagaaaccgcttctgagcggggcacttcggctgctccacagggaaggcgacactgaaagctgagtcctgccgtctgtctcacccacagatgtctgtagtcggtcggtgtgaatgtgggcccaagtccccaggcatcttctccgtgtgtgtgtgtgtgtgtgtgtgtgtgtgtgtgtgtgtgtgtgtgtgttagggagtgagggtctctcaggcctccaggtctcccagcccctccttctctgtctctacctctctgcctgtctccttccacctccttcccagagtgggactgtgtcttgcttcatgattcctctctccattactctccctgcccttctctgttggggtgccttatcctgagccacctcctctccccgcttgcctctgctcccctgaacctgggagacagatgaggagactggctcagcaaggcccctggaggtcaagcttggcctttgcctcctgttcccatcccccagccctggctcctaggtcctcccaactgggagggagtcctccgtgcctcacttagagggttctgaacccgttccctacacagaaatcttggaaaccaaatgctgctgagtaaggatgaagctttgagcctcctgcccctgctttctgcccagggagggagaaggaagagggggagctggtttttctggaggttcccccagaggccctcctgtccgaaaagaaaaggaccttgattctgagcccagggtcggaacccattgcttcagaagagttgtcattccctcggcttccaggtcccaacccagggttgggttgagtgagtcccacaaagggcaagtggggcccgaggaagcctctctggggccaggggtagctgagcttaaaggccctgggtcctgccagttccaggagggccatgtctgtgcctctgtgtacccctccacccgctgcgggctgagggaggtgcagggccttctctgacccctgcctgagctgttcccagggctggagcaggtgtaccctgagcaggggcagctggccactcccagttctcaccaagtcacctccctccttgtacaaggtttgcgtccggaagccgggtgccatagtgaggaccctcgtcctccagactggctggcaggagtcaggccccagcagccctcctgcccccaaagctttccgagtctggtgggcaggacttctcgctgcccttccaagcccggctttgggccaggaaaggcttccccaggtggctcttcta

SEQ ID NO: 16818 - DNA, 1327 bp, Homo sapiens
ctcccagagcacagtatttgggagactttgactatttattcagactcctggctatgtattgcacattggcaagtgctctggggatgaggcatgggtataggaagggagaaaggagttggagacaagatcctcttcattttccaagatcaaagtcagcctcttctccccatgcttctaggaactgcctggttttcgagcaggtcctggctgagcgggctctgagttctgtactggaattgagtgtaaagatgggaagagaactgggctgactccaggacctccaggatgaggcagaggcatgatgcttcctgctcacctgggccaccctctctccaggacttgtcagctggtggttcagccccttctccaaccccttcataagcttgggccactgcctgggacccagcagacactgcccaggactctttagtgcactcactcttgtctgccccctaccttccctcctggaaccacactacttgaatcaccattactttgcctcgctggcagagttgggtcaagtgccctctccttgaccttgagatgaaggtcaagagcacagggaccaggccttggttaggctgagctcccagcaggacaccgcctgcagaaaggacctgccctgataatgtcccttccccagattctcaagcagatgcccaagggaggtccccacagagccagagtgcctgaggcttcctgcttgagaacctgccccctggatcttggacacttacagattgagctgtatgaattcagcgggtctcactccagagggtcagaacgtttgctttagttttttcatctgttttgttccttgagtcagtgctgttgatgacgagttgtcttgaataaatcatgtgttctttgcaatgggcattggtgctgtgatgagctgaaactttggagacctcagaacagggaaaaatgaacagggatggagtcagagtctcttagagtagcccttctaagaaaaggtccaggaaatccttctgggaagagcctgttggattcttccagttcagcctcagcagtctgcagctgggggaggagggagtgagtactggctaaggaggttctgcatacatgattacatagcctgttatttttcagatttaaaaaagcttagaccatccattatatgtggaaaaagcatttgacaaaattcaacatcttttccttatttttaatttaattttattttctttgagacggggtcttgctctgtcacccaggctggagtgcagtggcacgatctccactcactgcaacctccgcctcctgggttcaagcgattctccttcctcagcctcccaagtagctggga

SEQ ID NO: 16819 - DNA, 1121 bp, Homo sapiens
gtctggaagctggagcggatgctgaccccaacctggaggtggctgaacccagtgtcctctttgacctgtacgtcaatacctgtcctggccagggtagccgtaccatccgcacggaggtgagcccgcctgcctccccgactgccagccactggggccttgggatctgtccgaggggcgggtgctactcttgccctgtcacccacccttgcccgtggctgccttgtctggaggtggtcctctcatcccccttggcctcttgccacagcgacgagacatgagtgtagctgggagtcaaccatgggtgctagtgcccgtcctgtgctcccagactgggtgacccagggggccctgcccacccctgctccgggcctctggttccttagccgtgcgctcagtgatctcccagggccctggttctgccacttccttgtgtgtgaccacggtgggcacagcagctctccccttggggtctcacttgcatctgtcccacgggggaagccacgtgcagctggagccttcgtcctggcctcatggaacctgtgtacccacttttggggtcaggcataggacgctgtgctacgggaactctgctgggaaggctggtactcccatcagtctcgccgggccgacagccctgtctacccatccctaaggccttgcccaagccgagcactctgagcctgacagccataccccccagcaggaaccctggctgccacccttccaacccctgcacgaggggtgaaaacttcttgcccctcttcttgccctcccctggccctgggaggtgggcgttgttaccttcgcccccattttacagaagaggagcctgaggagcaggctgtgtggtcctccaggtggcaagtgtgcagtgtgaacctgggcctgtcattaacctcaccaggccctactaaggacaggggaccccagtgggccaggtctcgggcagccaggcactgaagacaggctgggagcgggggcacccgctagccccccaggccccagcccactgccacgcttctcttccaggaagccatcctcatctccctggccgccctgcagcctggcctcatccaggcgggtgcccggcacacctgaaagttctaaggggccgaggacat

SEQ ID NO: 16820 - DNA, 1263 bp, Homo sapiens
tccggatctggtgtgaccttggtccaggagttctatttgttcctggggagggaggtttttttgtttgttttttgggtttttttggtgtcttgttttctttctcctccatgtgtcttggcaggcactcatttctgtggctgtcggccagagggaatgttctggagctgccaaggagggaggagactcgggttggctaatccccggatgaacggtgctccattcgcacctcccctcctcgtgcctgccctgcctctccacgcacagtgttaaggagccaagaggagccacttcgcccagactttgtttccccaccgcctgcggcatgggtgtgtccagtgccaccgctggcctccgctgcttccatcagccctgtcaccacctggtccttcatgaagagcagacacttagaggctggtcgggaatggggaggtcgcccctgggagggcaggcgttggttccaagccggttcccgtccctggcgcctggagtgcacacagcccagtcggcacctggtggctggaagccaccctgctttagatcactcgggtccccaccttagaagggtccccgccttagatcaatcacgtggacactaaggcacgttttagagtctcttgtcttaatgattatgtccatccgtctgtccgtccatttgtgttttctgcgtcgtgtcattggatataatcctcagaaataatgcacactagcctctgacaaccatgaagcaaaaatccgttacatgtgggtctgaacttgtagactcggtcacagtatcaaataaaatctataacagaaagtggcctttggaggtctttgtgtcatgggaggacgcttccctcacttctctgaagcctgccgggccgtgtggaacgttgcttgggcacctacaggagagttaactctgctcatctcctgccccatgagactctgtgcctttggaggcagttactggagcttgtaagctggacgcagcacctgctaggtaacaggctgtgacctgggctggggatcccatagccagcacaatctctgtcatcctactcacctgtggttgggcactcatgagggggtttttttgttgttgttgtttttttgacagggtctcattctgtcacctagagtgcactgctggaatatagtggcgtgatcacggctcactgcagccttgacctctccaggctcaggtgatctcacctcggcctcccaagtagctaggaccacaggggcatgctggctaattttttttttttttttttttttttg

SEQ ID NO: 16821 - DNA, 1163 bp, Homo sapiens
gctgcatgtacctcctgctgttggagtattataaattctaggccttctcggtggacagagctattacagataatatattaatatatgtatgtatgccacagacctggttttaaattttagcaactgtttatgagctgtgggatttttggtaagttatttaccctaagtgctggcaattccatttgtaaaaggagaatagtaatatttgccttttagggcagtagtaaggatcaaaaataatgtaacttaatgtgtttacaaataacattgttataactgtaatttaaccactttttttttgttttgttttgttaggcataaccagttctgcgttatgaagtttgtagaggtgaatgggtgtgtgtgtgtgtgtgtgtgtgtgtgtgcgtgtgtgtgtttgtgtgtgtgtttataggcatctgaagggcagaaaatagtctgtaggaaaaatattttaaaatatttttattttaaactcagtgggctattgagaatgaagaaatgattcactgttctttttgtagtccaagttcagctgaaaaagtgaaagctaataaagatgtagcttcaccattgaaggaactgggtttaagaatcagcaagtttttggtgagtaaaaattagcactcgctcaatttattacttgcagtgtggatgtgcgtggttatattgctagtgatagtgaaaattcagtttctttttgttttggggattaaattgttttataaatacccaggttgcaactcttctccctaaaagttacaagtcaaagttgcctgatccattcactgcatatcatagggttttcttcaccagacatgtggtggtctttaaggtgactaagtttgtcattttggaagctcacatcatgcctactgctgtattaatgtgcttagtgaataagcatcgttgtttctggcatgtacatttaattgtaataaaaattgtatgtcagtgactggctcttgtcttctattagagtcagaattgttatgttttatgaatctttgagaagcatttttgtttattcaagtcctgtgttcattgtagaagacaaatctttaaattctctgcatcctgtgtgcgatttctgagctgttccttacttaaaatctctgtgtttcagggtcttgatgaagaacagagtgtgcagttactccagt

SEQ ID NO: 16822 - DNA, 1195 bp, Homo sapiens
tcatagaatcttgggctattagaggtgataaggatttggtagagtttcttttttttttgagatggagtttcgctctgtctcccaggctggagtgcaatggcgtgatcttggctcactggaagctctgtctcccgggttcacgccattctcctgcctcagcctcccaagtagctgggactataggcgcctgccaccacgcccggctaattttttgtgtttttagtagagacaggatttcaccgtgttagccaggatggtctcaatctcctgacctcgtgatccccccgcctcagcctcccaaagtacttggattacaggcgtgagccaccgcacccggccaggatttggtagaatttctagcctgcccagcccctcattttacataagaggattgaggccagaggagaaggggagggatttgagcacaggtttgggtacatttgggtaaaaagtaaggtggaaagtatatgtagaaacaaatgtgcaattataatcttgaaggatgaagtgaaggtatctatctttttttattacttgagttttgcctaaaagatggcctcttaactgctctgtttttcttttcagacagtactgcaagatgagaggcagagccaggccttaatcctgaaggtcagtagtagtcaccatttctattctttgatgtaaaattgagtgacagcttcttgacctcattttcctgagcattgctggcttttgactctttgttgggtaagcatggaggtctttatgaagaagcatattaactcatttatgaaaagatgcttttatccactggacccagtagagaagtttctcccaaggagattcttcagctactggtggtgagaacaagttcatggatattttttctttaggtgtaagtccaacaggattaatttgtatttctttatttctttattcttcagtccctttccagcaaccttctcacttaggatctcgtgttaaaatgtaatttgtgacttctgaagaagtttcctattttatatttagtgagaataagtacattagttacaagcaattaggacctatatcagtggaatttgtttttatgtgtttggcctgcctgttgatagcattgtgtgctacatgaatgctctgagaaatcatgctagaaaacatttttggaaacttgtgtatattgttaaacaattaattcctttcatcctgtatattc

SEQ ID NO: 16823 - DNA, 1199 bp, Homo sapiens
actaattctctttctaatgctgctgcaagtattaaggatctttaaatattaagcacctggaaggttcagttgcttttgtgttcctgccttttgctaactagctgcatcaaaactcattattcttgagaaacagtagattcaggagagaggcgcttgctcaagtcactggattgaatgaaacattccgttctattggacctgctggcacaaagggaaggagtgttaaaaggctaaatttgggagtctgctgtcttatttccctccctcctcttctgtggggcttttgggaatctacagtggaaggaatcttgaagagtttttattgatcaactctataatgcataagtgtgattcatgagaggaaaatgtaattttatctatggaaacctttcatttatacgggaacaactgacttatcagacacatattaggattgagactggtaaaatatgaagtgaccaccaaagggagcttgagagaggagaaaatgactgtgagagggaaaaagttatgatttcaaacatttatttcctttttagacccaagttttgggaaaatttaaccagtccgctgtttggaaccctttctcctccctctgaaacatcagaggtaagctgtggcagagggcaggatggtggctacaagtcccttggaggaaaggctgtgggctgtgagatggggccgtagacaatgatacctcccctaattaaacaacagaatgttcccttcactagaaacgtctttctcagggaagtgccagctttctgtccctttgatgtcttgctttgggaaggaaagtggtttgcgctactgtgtgttggtggctctgtggtcttctccattcagttggagacgttgtggacctgacgcctctgctcttgcaagtcaggacattcacattcaacaggggttgtgctaacttgttctgcaagtgttgggcccctgctctgttccctgtttgatatactgggggagatcagtgatcagagatgtgataattgcctgttctgctatctccacagcccagcatcctggaaacctgtgccctaatcatgaagataatttgcttggagatatactatgtagtaaagtgagtactttcccctcttgagattttaactgaaggttgggggagtgggagttggtggcctaccactgggtgcatggctggaagagccaaggcagaggagagaactggt

SEQ ID NO: 16824 - DNA, 1346 bp, Homo sapiens
actggtggatatcctgagatggagcaggggcagtgtgtggccttttatgaggtattttgtctcactccccaccccgtattcttttttttttttttttttgagacggagtctcactctgtcgcccaggctggagtgcagtggcgcgatctcggctcactgcaacctccacctcccaggttcaagtgattctcgtgcctcaacctccctagtagctgggattacgggtgcgcgctaccatgcctaatttttgtatttttagtagagacagggtttcaccatgttggccaggctggtctcgaactcctgacctcaggtgatccacccgccttggcctcccaaagtgctaggattacaggcatgagccaccacgcctggcccacccagtattctttctagagagttaggttctgtggatgaaatccttggacccttgacggagatcctggagggagtgctgcaggccgaccagcaactcatggagaagaccaaggccaaggtgttctcagcattcatcacagtgttgcaaatgaaggagatgaaaggtgaggggcagaggcagggggagcagcagctgcagtctgcccactcctgctgacagccaggcagggcttccttcagcttagggccacacatttcttctgggacttttgagtttccagtcatggaattcttaccccaagaaagctatttttttccctcatgtgtctctccctcctctcccactggacagatgctgtccctcctagcgccctagtacatctccagccccttcctaggaaggaaaccttggtgtacagtgagagttggcctggtgagcatgacagtgtccctccctgtctattctacagtaagtgacatcccccagtactcccagctggtgctgaatgtctgtgagaccctccaagaggaagtgattgcactcttcgaccagacccgccacagtctggcattaggcagtgccacagaggacaaggacagcatggagactgacgactgttctcggtcccggcacagggaccagcgtgatggggtgagacagtgccctagaaggccatccgtcctttccactgcccgccagctctgtgcctgactctggggataagtagtgatcaagacagatagtcgctgcacttctggagttcacggcctggtgggaaaggttaatagatcagacactgcagaaaagcagaagcagcccattgtactgcaggagagaagtgcagggagaacttagtctcacttctgacttgaactgggacttaggtgccttttcagcaatgacttagagattgtagccgcgggcaaatgcaggatccgaagtgaaataggaaatgatgtaaggcttt

SEQ ID NO: 16825 - DNA, 1162 bp, Homo sapiens
actgggagaagggaagtgggtggtctgggggcttgatggggcctcagcaccctgccctctgtgtcccttggttatttctagtttaacagatacctcctaatttcaaaagagtagtcttcacctgaacctctctctctcatgagagtcgtgaagtatttggtcatctagcccagctaccccttagaggaagtatgtaggggccagagcagggcagtgacatgtccaggttcgcatagctcgtcagtggcagacctgagtctggaaccctgggtcttgtgtctcagcctggtgctctttccttgaatctgctggtgttggcccctttctggccctggtggccagacagtggctgtgtctattctgggagatcttttcctttcagcgcagctgggctgccttagttgctgtactacaaggaggtcctgcctctcagcagggttcctgagcttgtctgctgtttgtatcttagacacctagtgcctctcggaagtccctggatgccccctcttggccaggagtctaccgcctgtccatgtccctgatggagcagctgctcaaaactctgcgctacaacttcctgcctgaggccctggacttcgtgggtgtccaccaggagcggaccttacaggtgaggggctgcctgcattgcaggggtgggagtttcagggtaaaaaaggtactgggccattcatggggcaggtgggtgtggagcctgggcctcagtagcggagggttgtcgatgccttcatttttgagatgctctaagtactctgctggctcactggccagctagtctgctgaaggacgggaacggtctcgggtcagaatcctggttgtaccactaagccatttctttgccaactcagcatttgggggcctgggacgttgcctctccacaggagggtaggtgtgggtatgtcaggtccctcagccatccccatctttccctgatgtgtgctttcctcccagtgcctcaacgcagtgaggacagtgcagagtctggcctgcctggaggaggcggaccacaccgtgggttttattctgcagctctctaacttcatgaaggagtggcacttccacctgcctcagctcatgcgtgatatccaggtgggggcccaagatggtgtcttggagtctggggtaatgcttggagacagggagg

SEQ ID NO: 16826 - DNA, 2605 bp, Homo sapiens
aaaggaccggctggggctctggtggtggacaaggggacttcaggtaacctggggggcatcatggtgggcagtggctgggccaggcctgacaccagccctgctcccccagcaccagattgtgcagtacctgagggacatgttcgacctggacaatgtgcgctacacgtcactgcccgcgctggcagacgacatcctgcagctgtcccggcgccgcagcgagatattgctggggtacctgggggtgcccgcggccagcagcgcaggcgtgaatggggcgctgccccgagagaatgggcccctgggggagctgcagtagaggcggcacgggctggggggtggcagagagaaggctcctcctcccttccctgggttggtatctgacagctgtggtggctgagggccgttgcccctgactttgccccacccccatcatctgggagtccccaaggcccagaggggacatttccatggagaagaacggttcctgggggaagcagaggccaggaccagtggggcctgtgggagagaaaggctgtgagagagggggttgttgtggagaattgggacaggcagagccaggatgccccaggtgggggaccccaaaacctcccatcgctccagggctgctgacaagggtgctgggagggtggaggtgaaggatggggcctagagccctgtggtgaaggtcacagtgtcctgagctagaagccacctgtggctatatggtctcagcatccagctggcctgtcctgatgccctccccacctcaaccgccttctcagagagtttgcaactccagagaaggagagtggggccaccttagtgggcagcaggcctgggccatccagagatggggcagaggtgggcctcccactcctgtgctctcttctgagcaggaactgggcccttgacagtgtcctttgacattccctcgccctaccaaagatcgtcttttctcctcccacctctgtcaccaccaaagacgggcggaggtggggctgggccctcctgcccccgcccatcccccttccatgagcccagacctccctgggtggtgctaggctctgagctgggggctcagaccagggatcgctcaggcccctgtcacctgtgggcccggggaccacttgggggaggtcagaggatgtatgtggccggaccagcttccccaccttcattaggacaagaaactgcccagcactttgccttcagttcaacgcacaaacgctcctggggcctcatgggggcagagcctcccctgggcctgcagagagtcctgttagcagcgacgtccccccgccgcggggtcctgtcagcccggcagtgtcttctcagtgtcttcacctgagcgagtgtctgtggccccaacgcgttctgctgtggctctgccctttccaggttgagaggcctgcaggagaaacacactcccctcctgggtttccacactcaggaggtcagaggactggctcctgtgaccagggcccctctcccctgaatgggaaaggggtctggggatgggagggcgcaccacagagaggagatgatgctgggtgtggcccatcttctgtgggccccttcccagacaccggatccatgggcactaacccgcctcccaggctgatgcccggaggcagcttcctgggcaggagggttccatgggcactaacccacctcccaggctgatgcctggaggcagcctccagggcaggaaggaccctgtgctccccgccccccatcctgacatcctgttcttttgcacttaccctgtgctgtgaatgtaacagtgggccttggccccgcccactctgatttgcattttcatttgtgtttgtttacacatccatgcactgcctgtagcagtcgattgtcacagcttcgacttttggatggtagagtgtgtgcactgactgtgagtcgaataaacaattgagacgatttccttccactttgccatgttgttggttatgtgcatggctgtttgcttcttggggcagagcagggcacctgctttttggggtgccgtgggtgaaggttccaggaggacaaaggtcaggagaagcctggtgggggctgtgatcctacttggggcaacttgactgcctgacaggatccagccatccctaggcagggagggccccggtggtccgcggggaagggtggggagcggccagtgccacgctcaaggccatggatgcaaggtgggcagcctggctgtggaccctgctcaggcaccatcttagggaagtcgattctcactggccctcagtttccacatctgtaaaatgcaggcactggaccgggccaagatgcagactcacaggcttaaaggttgttaccccccaagctgtgagagccagggggaggggctggaacactgggaacaggtccaagcctgccggatcgttacaagttttcatgggcagctggaaatcacaagttttattttacaggtttttaaaaaagaaactttaaaaaaaaatttcaaatgtatggaaaaattgaaaaaactatataaaaccaacacttctggtcatgtaattaacattttgacttttttttttttttcttgagacagagtctcgatctgtcactcaggctggagtgc

SEQ ID NO: 16827 - DNA, 1173 bp, Homo sapiens
aggcctcgccggggagatcagccctgtctaggtgccattcccagggcaggtgctctgattggcccagttcaggtcaatcgctggctactgggtgtgggcatttgcctacttagttgggactacgggtggggtggggacagctgtaggtcactgaacaccagatgtctccacatctgacccccatcctgttttgcaggaacagacaacgcaagctggggacgaaactgcagtgaccagtgggtgtggctgggtccagcctccagatctggcccgcacgatgccttgcaggatggacaggatgacagacagggacgaagcagagacctctacagacccaagtcaccaagtggagcctttttttttcttattttaattttaatgaacaaggtggaccaaagggctgaaccagcccctcaaccaggaccctggggggcctgctgcctgggggccgtggccagagaccctcgctgtgctgctgccagcccctggctgggcagaaagtgccctcggcatgggcacctgggtgtggggtggaggaggagggctcgcgcctctggtctcggggccaggaattccaggtggcgtgagaagtacacactatttattttttggttttgtcagaggcaggcaggattttggagctggaagaatctgctctccggtggctgccctgtgaacagagggctcccggtcagcttcccaggcccttcgccctatgcccagagggcagactgcctctccctgggccggggtggcctgggtgccaggaggaggggagcataccccacaccctccctgccaccgttgccgttccagaacctcggtcagtgtttccctgtctgggggcagggcccagagcgagcacgcgtctggcggctgctgtcgttgtgttctaccccgtactgacccaacaccacaagggctttctctggtcccctgtccctaagacaataatcgctttctgacaaaggagcctgcacatttgggtgagcagacccaagctgtttacagctctttcttgtcctgccatccagtagcagttagtcttcatccccacgtgaacaaaatgggaaggagccgtgaggagaggagtgaggcaacaggcacccgaagtccctcgtccttccctctgtgtgctctgaatatgtccttgtccttcctgacccatctctg

SEQ ID NO: 16828 - DNA, 1208 bp, Homo sapiens
ctagagaagtaagaggcctgccaggagtgggtcaccaggtggcagcccatggctcaagagtgggggctcctgagggctcttgtggtgaactgatgcccctttttggagagcgtttctggcttatcttttctccttcaaaaaataacccagtctcccctgacacccgcatgtttctagaaccttccaagtctctgtttctttgccagattcagcctctttgcagagtcttccttctgcagcatgggtctggggtacagagccctgttcccctgtaaatgctgcctatgagctggggggctgtgtcgaggggaattatgaactgcttggttaataaatacaaatgtgctggacttgcggtgtcagggggatatgctcaggcacacaggcgtccctctgtggtttctgacgtcatgggaacttcatgctggctgcagaatctttctcttccgtcctggagggtcagactctttggcaagagggaggaccaggaatggagccgtccttgtgcctgcctctttcagctgctgtggcggccaccccttccccacctcctggccaggccaggctggctgctgcttcaggcacccctgcctcccatcggccctctcttccctgcctgcatggcaggcagagggctgtcggatacctgggtttggtcatacccaccttggtcctcttgcaaattgaccctttcctcatctcttctagctctgctggtggcaggtgcagaccacgtgtcctgtgggggggcctgggggagagggggtgggcctggaggggtggggcctagctgctgctgctatttatctgaacccaagtgaatccctgtgctggagaggcgctctgaggctcctggggagtcggtgggaacgacaccagaagctcaggtggagatcttatcttcctgaggctgctggatttggtgggcgataggaatcaggccccctttttttggctgtgggagaaagaggggtgactgcgggtaggtgggcaaggaatgttatattttcctagcaggccttgagggccaaaggggaaccttgtctctggcacttgcatgtgcctgtttgtatgtttgcccctcaggcagatgctatagcttggtccccaagtgtctgcgcgtgcattgtgtgcgtgtgcgtttgtgtgtgtgtgtgtgtgcatgcatgggtgtgactttgctgcaggggaggagggatgagctccca

SEQ ID NO: 16829 - DNA, 2235 bp, Homo sapiens
ccccagtgatcaggagggttctttccacctcaggttcccaacttccctctctgggccaagtgatggcacctggctgcctctcttctcggtttctaccttgtaggtttgggctgccttttctctttctctctctcgtgggtctcgttgtggagtgggtgtctttggatagaaggagtgaggaactgggggaggaaggcctgggggatcccctggcggggctacttcctgggcccgggatggacacctgggagctgctgcggttgttggggtcctggcaggggtgtggtgtggccctcaccactctgctcacctgctccttcctcacagtgcctggagaagttccctgtgatccagcacttcaagttcgggagcctgctgcccatccatcctgtcacgtcgggctaggaggggccaagccgaagagccacccaggccacagttcctgtgcctgccttccccaccccagcagtggcccctccccatcccctccctctgttcgtcccgtttgatgagaggctgtttactggggtggggtggcgagatgggcttgagggggctcagagcataaggcttcagggcccaagttgggagaagtgaccaaagtgtagccagttttctgagttcccgtgtgctagactggccagaagagagggtctggggcctggtcactcggccactctctcctgtttctggcctcttctcccttcactcccgtccagtctggttttgagagcaggggctgttctgcagcaccgcagggaagggaggagagatacctgctgcttccattgcttttcccttcctggagtcgatgcctttctaagggttggagctgctccttgcaggggcgggtcagtttcccaggccatgccggggtggccatctatggtagggctggaagctgaggctggccgccagctgtgggctggggtggggtgggtggggtcgggtggtggagaggccttagctgtcctggctggtgcccctcccaggctccttttcaccctgccccctgggcctgaggccccctgtgtccaagcctccccctggctcttcagttctctagcccttggctctgctgggtttcctgactgtagccacatctctcccgctccctaagggtaacctagccaatggaagctgccctttgggtaggtgctgggctcctgggagggcccagatgatggggtgaggcatgtctttccagaactttccctggcagggaggggatggcagaaactcagggaggggcttggggcccattgtatctggagagcctggattcctcttggcagtcttaggcccggccacttctgctacctttgcgctgctgtgagcctcaccctgggcccctgggccctgcttctctgctcccctgggtgatgggtgggcccagaaggtggcagtcccacaccttgtcctcccacctccctgaactgtccattgcttttatagggtgaggtaagagacagcctcccaagcccaggctttggcactcagaatgggcccagtgggggctgggcaggcccattgagggccaccgccgaggtttctcctagggctgttcctgggcctggctcttacaggctcgtcccccaggcctgcccttctccactgccccctcctgtgtctgggtccacacacccttcaggaagggggagcactgagaagcacagcacaggggctcagcctgggatccggtgatggtctgggcagaggctgggtcaggagtcccaaaggtcagtgacagtttctcagaagaggcccagcgtccacctctctcccagggccagacagcccttcctggctcccccatccccctatgggctcccagccccttgcaccctcattgctgttcagattaaagcctctgttttgcacctgtcacttgtgtgaggtatgtcttttcatgtcacatgtttaacccatttctgcatgactgacctccatcaggtccccttctctcaggccacagtgtctgagacgagctgtttcaatttgggttgagcctttcctgggtttaaatcctagctgtctgcagtcccagctgcaaggttgtaagttactgaagcccctgagccccagcttcctcaattcacaaaatggggacagtcacagggtgactgccagcagtggacagcagatgtgaagtcctcagctcagggcctggcacatagcatatcccgggtggtcactgcagctgtgcttggtgaagggggcccctctggactccca

SEQ ID NO: 16830 - DNA, 1234 bp, Homo sapiens
cgggtgcgccgcgctccagccgccgcacggcgcgccccaccgcgggcagcccttggagcctctgcagccgggtcctgcgccgctgccgctgccgctgccgccgcccgcgcccgctgcgctctgcccgcgggaccctcgcgccccggccgcctgctccgcgcccccaggggccgcccctccggccgccgccgcttctccgcccgcctccccggcccccgcctcctcccccggcttctaccggggcgcataccctaccccttcggacttcggcttgcactgcagcagccagaccaccgtgctggacctagacactcacgtggtgaccacggtggagaacggctacttgcaccaggactgctgcgcctccgcccactgcccctgctgtggccagggcgctccgggaccgggcctggcgtccgccgccggctgcaagcgcaagtattaccctggccaggaggaggaggaagacgacgaggaggatgcgggcgggctgggggccgagccccccgggggcgccccgttcgccccctgcaagcgcgcccgcttcgaggacttctgcccggactcgtccccggacgcgtccaacatctcaaacttgatctccatctttggctccggcttctcggggctggtgagccgacagccggactcctcggagcagccgccgccgctcaacgggcagctgtgcgccaagcaggcgctcgccagcctcggcgcctggactcgagccattgtcgccttctagggacccccgagggcacagggacccggggccccgcggggctggggccagacaaagactcggcaaaggggcgagaggagggaacgagcgggcgccgggccactcggggctgagctgggggcgagcgggggcaggcggctgatgttttataaattgtaaaataaaaaaaaaagaaatctaaaatcttggactttatttttgcagagagaaaaagcgcctatttaagtatgctttgtgtttctcctactcctttttttctttttattgtagtgattgcagtggtgtttagcgaggagcctaccacgtgagggagggctgctgcccggaggaggtgccgggcagccgggggcgaggcagggcgccctggccgccggggcgcgccgggggcgcagctcaggagggcgccggacctgggaagccgattccaatcagttgtcagacccgggaagcccgacgttccgctctcccgagtccctctgtggggtgaggaat

SEQ ID NO: 16831 - DNA, 1228 bp, Homo sapiens
aggtactctggaggctgacgcaggagaatcgctggaacctgggaggcagaggttgcggtgagccgagatcgcgccactgcactccagcctgcttgacagagcaagattctatctcaaaaaaaaaaaaaaaaaaatttaaattatttttcaaaagaagttaagttaaatccggagcccgcgcgggggaggggcgagctgagcgagggggtggagccagccatgggcccgcccctaaacgcccggaagtgacgttggcggacaaaggcagcgcgcgccgcgagctgtcgcgtctggtcgtggtctggcggagctgcggttggcttgtggcgtctccgccgccgccgccctcccttcctcttccccatcttcttctctcggtcccgggagcccccgcccggagtgagtagcgcgaggcggtgcgaagggtaggcagccgctgggagaggggaggctgcgacccctaactgtttcggcgccctgaggtcccgggtccccggctcgtcacgtgacccggcgcgtgcgcgcgggccggcacaggcctcacgtgcgcgtccccaagaggtctacgggccggacctgggcagggactacggagcagtccatgggtcggggtacaggaggaaagtcaaggcactcaaagcccaggcagggcactcccccaccccggtccccagaccgcagcaaatccctttctctgagcctgtttcccttccgagaaacagggatatggagagcgcccacttggaggatggatgggaggaatcggtaaaatcggtaaaatgcccagttcagagcctggcacagttaagtgcccgctgcacagaagttgctgtcgtatttaaccttgggtgccacccgagcgccagcccgacacaggtgcagctcaaaaaagacagcccgagagcccttgcggccaaggtcagcctgtctgcagggaggctgccatatcgaaaagcccagactttgctgcgcaccaactgtgtgatctctccctctggactttggtttctcctctgtactataagtgattgccacaactggtgtcagaggccctgacagcggggagggacagtgtaaccggtggttgtggtgtgtagaatgattgcccagtgagatgggatgagcctctgggaggaaccagggctggtataaggagcctggattccctccttaattctgttctcggcttcctgtttgtatgtttaaagacacgtcacttcctttagtg

SEQ ID NO: 16832 - DNA, 1223 bp, Homo sapiens
ttacgtgaggaggatgagatgactgcaaaagtctgccggtgacagtttcagcactgttttcttccatgggtcgtgggagaagagatgcagtaccttgggtctgaacaccttggcggggaggaggaggcagcagccaggtgactgtgaaggatgtaggatcacatttactggctgagcagccatttaccaggcatgaggggtttgtcttcctctctgagctagcctagagtgcacacaaagcccgtgtgctcctggccccctcccaggcccttcagccacatacggcatctgtgctctggagcagagtgtagcaggaccacctgctgttggctgactgaccttgctgttccctcagactcttagggacctcctcctgccccactccaatctggacaccacgaggcaaaatgtagccaggaccccaggaatcccgtttattaatgaatcagctgttagggcagatgtcaaagtcaggcttgctatttcccggccaggatgtgcctcccctggcttgttcccagaatttgcgtgtaagtggaattcttgtaaattagattattcaggggaccctgacatttaaaggaatcatgttacaaggcttttggtaaagcacagaattatattgtcggtagcagccttcaggccttcagtatttaccagttctgaatggttggacttttgtctgtaggattttcttagagtggaaaatggctatagctgcacaaagcccattcttgcattatttggcaaccagttagtcaatgcccacctggtatcaggcactgggctaatggtgtacaaggtaatgtctctacccccaggaagctgcatgctgggagaggagacggatggagtccagcctggtatgtgtttgcccccagatttattctgttcatttgatcagaggtgaactttctgttgaatatttgtgtttcatgggatgcaagagaagcatggtgataaatctcaaatgttgccactgctctcaggagctccccggccaggcgagagagagaactgaatacaaaaccttcagtttgccaagttgggcggtgagagggagacaggcttgctctcgccatggtccagtctgaatgggagttgtgccagcatggtgtggaagagtagtagttcgttttttaacctttgtctttaattttcccagccaccaagtgttttttgttttttgagacagggtctcgctctgttgtccaggctggact

SEQ ID NO: 16833 - DNA, 1663 bp, Homo sapiens
ccagctgggatatagaatctaagagttgattgtggaaaacacgtgaatctattgcgcgcatttgtcatttagcaagatggcagcagtccagctgttctttgcagctggagatgaacttttaaaaatccccttcacacttaatgtactgaccgagacagaagtacctgaaaacagctgtgcatggcaggcccggcaatagcttctgacccacagcacccgcgcctcagaagctacggtcacaactaaaggagtccagggacttgctgcaggctggggggcactgggtggttctcaccagcaggctgcggggcactgtgttctcattggccaaaaacatccttttgctctgtctcgttctttacacagagttcactgacttgaagtatactcagttaaaatcggggctggaggtgcagacggtgtctgaccggaggatgtggccgtgcccgccgagcactcttgatctgagctgacctgtgtgtgtgtgtgtgggggggtggggccttcacctaagacctctgcagcagacctggacagacaggcccctcccgcctgtccatcgctctagctgctaatacagccctggctgtggaatccttcaccgtctcagctggtatcagccccagcctgccttgtgccatatctcagcttggatctctgctagagtccccccaaccatatatcatagagttgaatcacaatgagaccgttggctttgaatttgagtcgttggttcccatggtgagatgcttgttaagactttatacttgggtcaatctctcactttattttgtagaaccatttgaaatcctaggatgtgcttgttctggaaggatgacatgggcccagactgaacaagtcagcttgatgatcttaaatgatggaagtataggacgttgcttattttaaaacaagggaaggacacaaaatggaatgactgcttagtcctttctcagatactcttaaaacaattttttattgttaaatttgtggtaatacatggtcacaaccgtggatcaaacaaggtcagtctaaagtggcaggtcctaggtgtgacctgataccaccaccctttgtggcagcaccgggctggactgccctgatccctgggacgtgagacttagcttccagccagtgtgaatcattgtatctgtctcataatcacagcacagctgcagacacaacaacgtgcagcattttttacataaaaatatggtagaattaatttatgacatggaaatgccttacgtggtatcacacttagtcttgaaaaaaacaccaaggtgacgtttaaaatttttagtacatatcctcaaattggagctaagttatacttcttttataaccttttgggcatctggtcgagagaagacaagattttctctatttacagtgaggcaataaatatgtttgccacctttggactgccgttactgatttgtaacttgaaaaggctacggttgatcatgaccccgcctcccccacctcccttataagatgtggacgagagctttattgacctactgactataaaatagtaaattctagattttatcatgtgaaatgccacttgctaactttttctagtttatttggttccaaagttcagaatgaatttcagcagcacagctgtgagactcaccatatccgggacaggcgggtg

SEQ ID NO: 16834 - DNA, 1203 bp, Homo sapiens
atggctgcccttgacgaccagcccgcggaggcccagcccccgtcaccacggtcctccagcccctgccggacgccaggtatcagctggccggggactgcgggaggaacctcagcctatggcccagtacctaccgggtgctgagcgccgacctgcagtagcccccgggggacgggttcttcactagacccgaatgacagtggggaagtcagcctccgggggggctcagtgatgtgcccagggtcccctagctcataatgctggagcccaattcagagccctctcccagagccctgagccttccagccggacatggattggacaggtctgctccggcctgtgtgctggggccaggagtgggcacatgacagaggagacacattagggtcaggctttcgtccctttaggaggggctggcaggtcatcttcctgcccactcgtggagctggcctggctgccctggcccagcatggtaccctctctgcccccagagccggacaatgatgctcacctacgcagctcctctcgcccctgcagccccgtccaccaccacgagggccatgccaagctgtctagcagcccccctcgtgcaagccccgtgaggatggcaccgtcgtacgtgctcaagaaaggttcggggggcacgggagggtgggtcagcttgaggctgggagtacagattacgcccgtagctgcctttctcatggccccctgtggcggagggccgggctatgggctcctctcaggtacacccctgagacaccagtgtgggagccacgttttgcagaggatgacacagaggcatgagatggtgaattgcttacccagtcatgtgactcacggatgtcactccacatcctgtcaaaggaagccgcagggcccgcacctcgccccggccaggcaggtggaggctgggctagtcctgtgctgtgtccccagcccaggtattgagtgctggcagccggaggcggaaggagcagcgctaccgcagcgtcatctcagacatctttgacggctccattctcagccttgtgcagtgtctcacctgtgaccgggtgggtgccccagggatggggggagctgggccaggctgccagtggcctcagcagctcttgccctgactgggtgcagggtgggctctccacgggtgctccctgcttttatccaggggagggccctgcctgcgtggatcccgtgtctatggcc

SEQ ID NO: 16835 - DNA, 1137 bp, Homo sapiens
cccagtataggatatgcttgtatccccccgtcactcctccgcctgttttttaaacttttccaccacctgcgtccaaaaagaatgttatagcgagtgctcttaaatgttgaacctgggtgttgcttccgggccagtctgcgtggctccatgaaaagctcactgctgccccagccgggcttcttagaggaggtcagttgtcctatgtatcatcatttactctgggaatcctactgtgaaatcatgtctgtatttttctggagcagttcacatagagtagaatgtggaatttcccgtgaacgtctccttcctcccccgtatctgccgcctgtcacttcgccaccgtgctagaatactgttgtgttgtaagatgactaattttaaaagaacctgccctgaaaagttcttagaaacgcagtgaaagggaggaacttgtcctttacccagtttttcctttgtaggatgggaaagtataaaaaggcacagaaggttgtcatgggctgttccttgggggtttttatcctgctcaccgtggagataagcctgcggcttgtctaaccagcgcagcgcaaaggtctcgatgccttttggtaacatccgtcattgcagaagaaagtttacacgacgtcaaaaagtgacgttcatgctaagtgtttttccagaaatattggtttcatgtttcttattggctctgcctcctgtgcttatatcatccaaaaactttttaaaaaggtccagaattctattttaacctgatgttgagcacctttaaaatgttcgtatgtgtgttgcactaattctaaactttggaggcattttgctgtgtgaggccgatcgccactgtaaaggtcctagagttgcctgtttgtctctggagatggaattaaaccaaataaagagcttccactggaggcttgtattgaccttgtaactatatgttaatctcgtgttaaaataaaatataacttgtggctccgtgtcacgggactgttttgttgcatgaagatatgaccctagttgtggaagcagcctggtgtcattggaagccccctgggctggggagctggcccctgggaggagctggagacctagatagctctcagttccacccccatccacggtggagggggaggctctcag

SEQ ID NO: 16836 - DNA, 1208 bp, Homo sapiens
cagcgttgggtgttcagattccacgcgtatgtctgggctcactcacagcatggccgagtgtctgcagtgctggtcctgacccttccagagcagcagtggacagatgagataagactgtttcagaaacaaagatggccacagccttcctaacaagcaggtcatctggccatgtctgtattgtaactggtaaaaggcttcaagtcagattgatgatcaagaaaagtcaaaaccccagcccaagattgggaaagcaggtggtggttccaagcttttaaaaaattattgaagctctccatcctgttctgtgagtgtgtcttctctttctccttcacgtcatagccgtgacccaccgttcatctctgctcttgcgtaaagatgaccgatggagtccaaagccaagtggcttcaccagctgacaagccaccctcctgcagcctgagtttcacagtccactgggttcgttgtcatgcggtgtttgaatggttaagcccttgcagtatttcagatcgggcaaaaaatatcggatgcacatagcagaaccattggtggtatttatagctttgctttgtactcctcactgtttctgcctacgcaaaatatccatgtttcctctgagaaatctgttgtggactgaaagcgctgctggctgtgaaatttaataaagtgtgtatgctttgctagaaaattatttcttggacaataggaacagtcattgatctgtaaatcctggctcttaacagtgagtggccaaggacttgatcagcccatttcttggtccctcagtgctttaaaatttaagtagcactgcattttgtaatgttgaatatgactctagtgacttgtaggaggcacttgtgaggagatgcttgcttcagtgtaaaagatgctcatggcctgagtcagttgagttttctttcaagaaaccacttcagagtgaaatatccagggtttccccgccctggacatgtccagcctgcccaggcagcacacagccctgtaagtccacctcgtgtgggtgagatttcctcctgcgtgatgacctcatcgccatctctgctgtctcattccacagcctccctccctcttctctcctcctctgccctcgcccttcccccttccccatcccctccccctcctcctctgccctcgcccttacccctcccccttccccttccgctcctcctccctcctccacctctttctcctcc

SEQ ID NO: 16837 - DNA, 1210 bp, Homo sapiens
actaaaatgggtgtcttgttttggtacttaaaacagtctactccaggcatccagtccttacagaccaaggaagagcatagcgatgcctgttggaattgcagatgcattctggccttctcccccgtcctgaaacattttctttgaggaaggctcttagaacattagatagtctgctgaggttgttggcccagctccatacacccagtagaacagtggaacaactcatgcttcatgctgccaagctgctgtacttcaaaggaaacagatctagcacactgctgcacccctgcttccacactccacacttcaccccgctgcttttctctgacccgcccctggccttgtaagactcacgtaagctaagtccaggatgcctgtggcctgcggcttgattcttccctttaggattcagcaagttaatggcttcctcgctatagaagtgagactttgacttgatgcctcttggtatatcaaaaagatattcatccagaaagtaccaaatgttctgaaagacccgctcttcactccagttttccctagggtgtttctggcagggcgtttttaaaaggcatctacctgagttgacgctaatacttgtcaccacctggaacgtagttatcggtcggcaggctgaacatactccagattccccagaggccacttctgtagcccagcgatgcatctgagcctctctgcgtggtttatgcttgaaaaatagataatgcttttagatggttcactgccaggccatgggccccacacatctcaggccctgtgtgagggagcacactgagatggtgcaggagtgaatgggcatggcttggcctcgctacctcggggacctgttggagttctggcagcagggtgtctgcaggtgggacggcgttctgggcagagtcagaatggtcagaatgaaacagaacagccaactcacccacaggacagcttattttgaggcaaggttttggattttggaggaagcagccagatgaggcggtgagcctccagaaggtcagcctttggagcacgtaagatactgttacagggtccagaaatcgtgttcacatgggggctttgactcttcaaacagcttttgcagatcgtaaattgcatttgcctagtcgtgtgacctcaaaagaagtcagacatatttaatccagaaatagtttcgtttgagggagggcttgcaggtctgtaaatagcatttgct

SEQ ID NO: 16838 - DNA, 1167 bp, Homo sapiens
cttgacccgggaggccccggctctcctctcccctgtcctgcacccatcccccgcctgaagccaccggctccaattgccagcaacctctgcttgtccggaaaacgacaacacgaaatggaaaaggctacagccctctgcataaaccaaggacttggctgcctcgcaggcagcctccgttcctcccgctctcttgcgcgtgtgcttttgttttttattttgaacagacgttttaaaagaaaaaaaaacaactaccttctgtcctagaagacacagactgacagatggggtgaaggcctggggacctcagagaactctgccttgccctcgtccctcgtccttcggcagccggagaggctgtgggtgggccgagggtgtctaggggttctgcctggtcaacgttatttgtcgtcccatcttttggcagcaaaaccacctgcgtggctaggatgattaattatgaggatgatgattttttttgtgataacagtattgtgctttttgtggggaaagtgaggtttttttttatatacatatataattgatatctttaatttattggttgttaactgttgctgctgcctggtgtgtcctcagctcccagggctgcgggcccaccgtttacatgtgcacgccctgacccacctgcccacgccgacttgggaggatggtggcctgcagcggccaagaagccaaaaaaaattttttttttttcagatactgtgcttgatttttggagaggggagaggtggaaattcctaaatggctaatgcactgttccctccagcccgaatgcctcctgccaaaccccttttccctgctgcctctgtccccgcatccttgttctcccctgggtccgtaacattttttccgaggatgaacaggggacatctttaggtttctcaactcttgctttggtgtttgccgcagcatggaaaacagggcgcctaaggctgggagctggaagaaggggcattgggtacccaggcagagtcaggagaggtggtctttgaagtaagttagcagaaatcaaggggacccccgcctccttgggctggggaggggatttcaagatagttcatgactctctcccgctctgccttccctccttcctatctgctttttccagtaaactgcatggtgtccttccctggccttctcttggctcaa

SEQ ID NO: 16839 - DNA, 1891 bp, Homo sapiens
ggtcagttccagcagatgaatgtgtcatgtggcacaccttgtcccttcccgcagcatttcctggttccccccagacccttgagcgctctttgggacccagaaggagtccttgcacagggaaggcttgaggtgagaagccgcttcccagactgtcagggccaggcctgggtctagaattcttgctgctgctttgcagagtcaacagcccatcagcccatgttttagaggggacactttggtcctcggttcccaccctcagcaagcaggcctccagcccgaggaaggcctctgccgtagtgacgttgccgtgtggggctgcgtggctgttccccttggctggagcattcagccaaccccagcgtcccccctgaggcgttcattggcagccccctaggactgcacgctggccccacggtaaccccccctcccccaccaacatcctgcagggatggggtcagtggttccaccttcacaggccactttgaagggtggattctttgaggcccctgccagtcggctccctgctcagctgctggcccgggcgacctgggactcagcaccaacggctgaagtttctcagctgggctctgacctggggtctggggcagggaacgaacatggtggctttgggctgagaggatgagggaggtctttcccaggtcaaattactttcctttggcctctgcctgaggctcgatttgcctctctggtccaatgggactgacactgttgtacaacctgacctgtggctgagggtgtctgggcttaagcatgtggaccccttcggtgtgtccggccttcctccatcgtcctgccctttggccttttggtttgaagccacaggtgtggcttctggccttagcagatggtatgcttgcggaccgcagcccagcatgccggtgggcccacagcccgagccagcccagagctgccggaagggccgcccttcccggccctggcggggtgctggacactggccattttcactagagtttgcctggcagggaccgatctctgccccctcctctccccaggcctctggctgcagtgatgccgcagaatcctgagccaggtgcctcctgagcagcccgtgcgcctctccacagcggcgtttgccacccaatgcggctcgcttcagatgctctgatgcagagggcacgcccatagtccctctgcagagcctcgcactggggccagggcaggcaccagccccaggcggccagtcggccacggcctgtcctcttcctcgtagcgtctgctcctcactttgtgttgatggtgacttaggagaatgttccgattttccatgatctaagcaggccacgtttaaaataacatcaaggcaagcgtacgtgtcaccctctgtactgacatctcttcccctgaaatgcttttcagtttgacagcccgtttcctagacaagtgcacctggggtttcaggaactttgtgttttttcggagggggttggtggggaggtcgggatgcctgggatcccttcctggagaggcaggctgtctctggaaaaagcctccattgcccacccgccaggcggaaagtcaccctgttcccagcgcggtttcagcatttaattttaagggagctaaggaagcgcggcgcgccccctggtggtggtaagccgccaacgcacctgggggctgcaaccccaccggacgggtggtccggagggaggctggagcggggaggcgaggagggggctgtgagtcctcagaggccctgggccaccacatttctggcagcgtttcccagacacccctctgctaggccatccctggatagcaagtgaattaacttaagggcactgtgatgggaagccttgcccccctcttttttttttttttttaatatctgcggaataaacccaatggttaa

SEQ ID NO: 16840 - DNA, 1238 bp, Homo sapiens
cagcaaagattgtggaatcctgagctggaaggaccctgggggatcacctggttctgggatgggaaataggtcacaggtgatgggttatgtgtgaagccacttcctcatccagggcccataggagtcatccctctcaaactagctcctcttcgactgaacctggccacagctctgagtccttctctgtgtggctgtgctgttcaggactcttaggtgcaaattttagaaactgaactcaaaccaacttacgcaaaaaggaaagggaaaagacaattcttggctcacacaactgagaactccaggggtaggatggcttcaggcagggctggatccaggtgcttctaagatctatctccaactctacttggcttcattcttggcctctccacagggcaggcaaggctcatggtcaccctcatagcccacctttcccaaaaaggagggcttacccccagtagggcccatggggacccaccacgcattagtccctatggctgcatcatggggtgcgaggcttgggccatgagcctactccttcagtgggcgggatttcttcctctccatccctgtggaatggggtccacccaggaaagaaggttctgtttccagaggaagtgagcctgggtctctggacagacaaaacttagctcttgccaaaagtggcttgtttgccggcatattggcatgtctaactgcgcccaatgcccttgtcattcaggttggggaaagtgaggcccaggggaagaaatactttgctcacagtcacctggtgggtgagagcacagctttgaggggctgcaaagagcccagggtgtatccatctcactgtaggtagcacagcggggcaatcagagctggagctgggcgtatagacccctgggctaccacctgggggatttaaaagctgaatgtgattcagataagcacctgcagctgggctttggcaagattccagggtctggtgagccgaatgaagggagtgagggctgaggccaggatctgggcagcaggccagagtccaggcagcaggaaacatggcagtgtctagacaggggctgtcagaccccgaggtcagggcactggccacagggacggagctggaagttcctgagcacgggcttctctgcctcccgcctctcagctgcctcaggatggccaaggcatggcctttgactagggaggagagctggaggctaggaaggccctgacaagctaatctttgcactggctgagaaaga

SEQ ID NO: 16841 - DNA, 1153 bp, Homo sapiens
tgaagaagaagcgtggagtatgggagttcagacagtgagtactaatccttgcttgctttcttcccatctttctcattgctggctctctctcctgcctgcatttatttaacaaatgtatatattgagtctactctgtgagaagggtcatgttggatgggggaacagagagatgtaaagggatgaaagatggtctctgcctccagagcagctggcatcctaataggagacgacacctttgtggagacacaagcatgagcagagggcaggcttgaaaggggcggcaaggctctgtgtcacagcgttggtactgtggtgtgtgttgcttttaaattccagcccggtagcgtggcggatggcagagagacctccgggttgtgggggcaggagctggagctggatggagggctgccctgactcccgcaggtttttccctcagtgctatttccctgtcttgcacacttagagcctccatttaatgctggttctcttgtggttcttttccctcccaaagacaagccaaacggctcctgggacagattgtggaccgctgtcgaaatggacctggctttcataatgacatagacagcaacagcacaatccaggagattctcattcccgcatctaaagtgggtctggtcatcggcagaggaggggaaacaatcaagcagttgcaggtgtgtgagcccggagcacggagcacagcggccgctcgcagcaggtcttcagcttcctggcccaggagatctgcttacggctggcattccctggctgggctggctttgtgcagcattgtgctgaggcttccttcctccatttgacagacagcttctgaacatacaccacggccacgtctgatgccaaatatgatgccaagtactagggcaggtgtgccctatcaggggccccagtgaactttgagcagcctttttggcagtgagctctgtgagggctgcttttatcatcataggacagcatctcagataaaagtgcagtatttggagtcagaggctctgacccagcattcttcctcactgattgatcttaaatgtgctcatttactttttgaaggttcagggtctttgtgtgtcaaaaggggcaagtgcaggcttcactgttgtgatggagctaaaataatagccgttcttttcttttt

SEQ ID NO: 16842 - DNA, 1752 bp, Homo sapiens
agacctgagaacctgccatcacagactaattcctcttcccttccgcccacaggagcagtaggacagcgtcctcgtggccaactctcccctcaaaatcattgtcaaagaaaacctatttgtaacagaggtttttacatttgcaaaccttttgatgaagaactgttgttttgttctgtgaaacactatatttagattaacggaatttttctaaaaatcaggaaaattagttactaaaaattgctgatcatttttgtttcattatttttgttatttcaaatgtataagctctgggattctttttggagcaatacctacaaagtcaggcaccagaatgtgcctcagagctgtgacatttcaacatgatggttttggtttggtttggttttgtgtcctttttatttgcagttttttctgttgcaacagaaagtggcttggaagtcttaggtggtatgtaacaaattctttttaaaaattttaaagcagtatttaagtattcttaaatgtgtaaattcatttaatgttttacttctaatttcttgtatcttggctgtctggttttattgcatttttaaaaaaactgaactattatgtattgtaatgaatgatgtgaattctgaactgagacagataattgtattgctgtccaacaggggttgggaggggcattttgtagggtttgtataatttctagagttcgaaaggggtaatataaaaatgtgctcgtgtgtttagcctacgtttttctcatgcctccattaccagttgcaattgtgtatctaagacctccaagcttgtttttaaaacaaaacaaaaaacctttctctattatctcagaaatataaatactgttatttttaatattaagaaattcaatataacttttaacacacactgtggaacattaaaccgtataaaaatgtagttataactatttttaattccaaggtgttgtttgcttttttcttttaaatattttcttaatattttgtcagattaactagatgaataaataaatctagtattaaccgcattatgaattaaataattttgatttaatgaaagggataatatgatttccagtgtttactgtagtgtatcttgtacagataacatgtatttttaaaggaaaaaaaacggaattgaagctattttttcttgcatttctaattgacctgagggacattccgtttgaaatgtactgaagttacagtttctggttttttctccttatttttcttataatgcttgaaatgtctaactattaaaaaagacaattggaaaatgttatgcatggggtttttaagaaaacaaagtgttctttttatttgactgacaattcattttacactctatataataaaatctccacaaggcatcttgtgggcaaagtctttctggcctgtttgctttccattcgccggttcatccctctgcccctgcccgcggccgcccgagagggaaagaggattcctgcgggcctcgcccgtcatcttgcaccgcgtccacccgccttcgttggtgcacagtctagatgtctagctagttcgttaagctaattttatgttaatggctctgtatgatttgacagcttgacttgagagccgtggttgggctcagctccccttccctgtcacagtcaggcatctgtaagtgagaagtcagtatgggagtgtcatcggatggagctgggagatgcattgaagggcgtgcggcgggtcagcagacttctgcgactgactgggcagccccttg

SEQ ID NO: 16843 - DNA, 1168 bp, Homo sapiens
tcataaaaggcgtccttcctaataatcacagtcccctctgaaagagagtactcattgttcctccggggccagcgcccagcagtaatggcctcttcctgggagccgctggcattgcttttacgcaaactcatgggaacaaccagtacatggcttttgttttttagtgtgtgtgtctttttttcctgctttctctttattatcttttcattctccacttaacttgctgtcctctgattcagggatgtttccacaattgtcagaattgtgtatgtggaggtctaaattaagtgtctttgctgttttaaaccctgaagtgttttgaccttcaaatgtgccacaattatcttggtcttcaaattctttgctggtggaaatggcttcccagcaaagcgacggcctgtgcaggacagagcctgatgggctttgctggcgtcttttatacgagatgttctccacaccaccactgtgacctttcctacccaattagctcaagtatgaaacctctacatgagatttcatagcaaggaataagggtagcatgtgtgaaatgctggcggctccttgtaagacagattttctatgctccatgagagcctgatccagatactcctggctttcaggaaagtgaatcctctgatgctgcaaattgagattgcttgacttctggtttgcctggcacggccgggtccgttccttcttcattcaagcgaacttaaaatgctttatcaaaatcctcttaggcacaactcttctgtatttaatttcactcttgttgctgacgatcaggctatctcacgcagccatcacctcaagctgctgccccctctcattccgctcttcccgtttgccttgtgatttcatggttaatgttcatgaaccaaagattagactcctacctccctgggagaatcaggaagtgagaggaagcagattatacaggagagagttttttaggatacatttgggtacacctcaggaagaaagagggaagtaggaaacacagtttgggtaaagaatgccatgggctttgttttattttgtcccatcaagtctgaataggacaagtggagatgcactctgatagaagtttcttgcaatcaaggactgggctcagtgtttgtctccgtgcctggcatagagtagcaataactgcacttactattctcga

SEQ ID NO: 16844 - DNA, 1121 bp, Homo sapiens
ggtggaaaacagggtgctaaagccaaccagcctttgggtcctgggcaggtgggagctgaaaaggatcgaggcatggggcatgtcctttccatctgtccacatccccagagcccagctcttgctctcttgtgacgtgcactgtgaatcctggcaagaaagcttgagtctcaagggtggcaggtcactgtcactgccgacatccctcccccagcagaatggaggcaggggacaagggaggcagtggctagtggggtgaacagctggtgccaaatagccccagactgggcccaggcaggtctgcaagggcccagagtgaaccgtcctttcacacatctgggtgccctgaaagggcccttcccctcccccactcctctaagacaaagtagattcttacaaggccctttcctttggaacaagacagccttcacttttctgagttcttgaagcatttcaaagccctgcctctgtgtagccgccctgagagagaatagagctgccactgggcacctgcgcacaggtgggaggaaagggcctggccagtcctggtcctggctgcactcttgaactgggcgaatgtcttatttaattaccgtgagtgacatagcctcatgttctgtgggggtcatcagggagggttaggaaaaccacaaacggagcccctgaaagcctcacgtatttcacagagcacgcctgccatcttctccccgaggctgccccaggccggagcccagatacgggggctgtgactctgggcagggacccggggtctcctggaccttgacagagcagctaactccgagagcagtgggcaggtggccgcccctgaggcttcacgccgggagaagccaccttcccaccccttcataccgcctcgtgccagcagcctcgcacaggccctagctttacgctcatcacctaaacttgtactttatttttctgatagaaatggtttcctctggatcgttttatgcggttcttacagcacatcacctctttgcccccgacggctgtgacgcagccggagggaggcactagtcaccgacagcggccttgaagacagagcaaagcgcccacccaggtcccccgactgcctgtctccatgaggtactggtcccttcctt

SEQ ID NO: 16845 - DNA, 1247 bp, Homo sapiens
caggcgcccgccaccacgcccggctaattttttgtatttttagtagagacggggtttcaccgtgttagccaggatggtctcaatctcctgacctcgtgatccgcccgcctcggcctcccaacgtgctgggattacaggcgtgagccaccatgcccagcccccaaatcactttatttttaattgaagtatatgtttatccacaatccacataagtacacagctgaattaattatcacagttggaatacacccatgtaaccaaggaaaaggaacattactaggactactttttatcccagcattactattaaagtatatatttatataaactatatgcctttttataatcatgtatgatgtatttataactacaaatttttaatgaacagtgtatgtttagatctgaaaacatgtacttcatttctgtcatctgcctctccaccctgtttctgtctctgagatctgcggagagtctgcactcctgtccttgttgatggaaagttgtgtgaaaagagttttttttaagacaggtggtccagggtgggctgtttgagcaagcagctttttaaagcaaactccccctgggtaagtgggcaggacacttggccctcgtatgcaggggatgctctgaaatatgctaattccagaggaaggatctaacctcaggactagatgcatcagtggctctgacctgggagtaaggctgccccaaattaatacatggagtctcatatttagagcctaaagtgctgtggtttccaaatccactgtgcaccttacctcagattgtgactcaggtagcttagtctttctttggttgctagttgttaatactgttttcctagaaattaaaacagaatattctgaaatgggcttcacagctttctttttgctacacacacagtgcattgtttaaaaatgaaagggccacaaggcttttatcccagttagaaaggtgcatcgtgaacatttcaactggggaattttagttcatcgatcatcaagactttttatgtttttaggaggctgataatgttttctttgactcttaacggttttcctatatatggttctttatcctgagattatatccccattgatttggaaatctgacctttgaaaattccacctgtaatcccagcagtttgggaggctgaggtgggaggatcacttgagcccaaaagttcaagaccaacctgggcaacatagtgagaccccatctctaaaagaaaaaaggaaaatcacacc

SEQ ID NO: 16846 - DNA, 1191 bp, Homo sapiens
actctggctgccctcctttgatttggttttgcttgcccttgagatgaacagccgtggtgtaagtgggttgtgtacctcccctattctgctagccttattttcagtgttatacatggatgtgttaaagtactgagcatttatttttccatcttgagctgtccttgacttggagagggctctgttgaagtttacatgtcagtgtggttggtgtgcagtagactccagccaactcagagtgagaggaattaacagcaggtgggggttgggggggtactccacagatcgcctcggggtgtctacataaatgccctgtaaatgtgaatgaacagcctgtgggtggtgagagcagttttctaaggacagtccaaagccatcttcagatcttcaaggagatccatgattcgtgaaggattcactcctctggatcagaggttctgctgtagtgacactcttttttttttttctctctctttttttttttttcttctctatttcaaaggcagatcgggagcggtgccgagaaaaatttccttactagatgacatttcatcgcaatgtccgatcgtttggggcaaattaccaagggcaaggatgggaaaagcaagtactcgactctcagcctgtttgataagtataaaggaaaatcagtagacgcgattagatcctcaggtaaggcccagggttgaaggccagttcctcaaactttctccgagtgacatatcccagaaacccagagtccctcacctggttagacagatgtggtccgtgcacaccaggcttctgggtgtgcatgtagaatcactctctacttcctacttgaggtatgatttcagagccttgagcatcctgactctttctgtagtggaattttctccatctattaccttattgaagctggggagatatatctatagatatctatagatagatagatagatatctatctatagatatctataggtgtgtgtgtatgtgtgtgtgtgtgtgtgtgtgtgtgtgtgtgtgtatatatatgttttggagacagagtctcactctgtcacccaggctggagttcagtggcatgatctcagctcattgcaacctccaccttctgggctcaagcgagtctcttgcctcagcctcccgagtagcaaggattacagatgtgtgccaccacgcccagctaatttttgtatttttagtagagat

SEQ ID NO: 16847 - DNA, 1147 bp, Homo sapiens
cagttcatgggaaatgtataccacccacctacataccatgacatgcttcctgcttttgtaagtcttcagagtgtactttttttccccccatgaagttggattgtgtccagcagataggtcaagtggttgaatgtcccccttggggtctcctcttggccctgttaccctacttctgaggcttccactcgttttgcattttctctccctgctttttaaatcttcagggcctctgacttctttccctggtgatgtggatatgattttagcctttggttctttagaaacaggagaggcaggttttccctgacataggtccccaagtctacttactggcagcaggaatgaaatgggggagatggtggtaggattaattaggaaaccccatgactttcctgtttctttttcccattttccactttataaaacacattctgatttaagtggaaattgcagtttcagccattaccagcaaatcctgttcattgatgttatgtttcagatgtgttcgccgaagtcatcagaaaaccagggtacagtggaacgaggctcttttccccttcctcagctccgccttgaacctcgagttccttttagacagttccagatgaatgaccaagacgggtgagtccattgcattacagtcacgtgtgtagagatgagtgcggtggtgattctggtcaagatgaggggctgatgaatagaagtgctgtgtctcctggagaccacagagaacttaaccagctcagcgtggcagggtgtgtggggtggtggctgggatttggagctggatgacagattgagtcatgatttcaagtgcctggtagagttgaagttctggcacgtgtgtgttgctgctgccctaggccttagcaaccagcatgtaaaactgcaggacaaggcagaacttctttctgggatgtactcgtttgctcattatatatttcttttaaaggaactgatagaaataattaaatcaaacatgaacctttgcagtgtggaatttatttttggaaaggtatttgattttgcttccgtctgtatactggacatgattccatcatcttttcttttatcagaaaagaaaacaggctgggattgtctcgcccactccgcccactaaggcagctggtggagcgggcaccacggc

SEQ ID NO: 16848 - DNA, 1333 bp, Homo sapiens
aaagcatttggggaggtagaaatctgaagtctttgtcccttaaacctccatgaaagtaagcatgtgagtctgaattcctgggagggggacaattgtttccctgccctggtccaggccagacagacccgccagtctgttcctggtagtaaagcgcatgtgtctatctaatgtgccttttgaggatgtggcccttttgggtctttgttttaaacaatgtctcagttgtatctccctgccctgtatagaaaggcttcatcccctgtcctgagtgttaaggaccaagcctatatctgacaaatgtgcttttcttgcccccttccttggacaggtctttgaaccaggcagggtgcatgtgtgtgtgccttcagaggtcctcaggtcaggaaagattaagagccctatgatgtgtaggtgggtggggtgctgtatccacatgaaagtcagggtaactgttaacttctttgggcctttggttgaccctgagattggagcagggctttctaaatgagatgatgtagatcagtctttgccttcttcaggactgatgaagcccatgatgccccaggagtccctcaatgggacaggctgtcgctctgaggatcagaactgtgtgcccccactccaagaaagaaaagtgacccccatcgactcaccccctgtgtggagcccagagggctacatggcactgcagagcaagggctacccgctcccgcacccgaagtcgagtgacaccttggctatggacatgcgtgtcaggtgagatgaagcctggtcctgctgccttgccactgaaggaggactccaggtcctaattgagagggccctgggatgagctaccatcctaggagacactgcccacgggagacgtgctccttgaagggactcctggttcctctggggaaggagagtgtgaggaggattgcttgaatgctttgtccaagaggctcttttcagatggtgagacgtaaggtgaaggagaagtcccggggtcctcaaatcctgggcacagggcaggcgggtgggggcttcacaaggcaggtggggtccagagcatgggtcttggctcatttctgtggaagtaaacagagttagccctgccacccccatagccccagactcttcacggcctcccaggctccagcttgctcttgctctttgacccggaggattgcctggctcctctgtctccagggggcacaccgtacccagcctgcggccacgacagtcttcactctcaaggactccaggggccaccgaccaattcatggcctggcatttctgagacgtgtttaaagatagaacaaatgttgatgcttatgtttttttttggttg

SEQ ID NO: 16849 - DNA, 1199 bp, Homo sapiens
ccggggccgtggtttcagagagttcacttttcgtggtcggcctgctggcggaaatgggagcggcctctgtggtgggggggtcctgggggcccgcagcatctactgcagcagtcagcgcagcggccgtggccggggcctgcgagagtttgcgcggccagaggactgccccagagccaagccccgacggagagttgccagtgagacccatagcgagggctcagagtatgaagaacttcccaagcgccgccggcagaggggctccgagaacgggaatgaaggctcgctcctggagagggaggagagcaccttgaagaagggcgactgcagagattcttggcggtccaacaaggggtgctctgaggaccacagcggtctagatgccaagagccgaggccctcgggcctttgggcgagccctccctccccggctgagcaattgcgggtatggacggagaaccttcgtctccaaagagtcaccccactggcagagcaaaagtccaggcagctcttggcaggaatatggcccttccgacacatgcggatcccggcgacctacagacagagactatgtcccagattcctacagacaccctgacgcatttggtggccggggctttgaggacagccgcgcggaggacaagagatccttcttccaagatgaacacgtggcagattctgaaaatgcagagaaccggcccttcaggagaaggcgccccccacgccaagataagccccctcgattccggcgcctccggcaagagcgggagtccctgggcctgtggggacccgaggaggagccccacctgctggcaggtcagtggccaggcaggcccaaactgtgttctggggacaagagtggcactgtgggccgcaggtcccctgagctctcctaccagaactcctccgatcacgccaatgaggagtgggagacggcctccgaaagcagcgacttcagcgagcggcgggagcggcgggaaggccctgggtccgagcccgactcccaggtggatggtggcctgtcgggggctagtttgggtgagaagaaggagctggccaagaggagcttctccagtcagagacccgtggttgacagacagagccgaaagctggagccgggagggtttggggagaagcccgttaggccaggtggtggtgacacctcccctcgctatgagagccaacagaatgggacgcctttga

SEQ ID NO: 16850 - DNA, 1111 bp, Homo sapiens
acacctccactctccttagaattcaaggcagagaaactcccagagaaggagccacagggaacaccgactctttcaggtggcatctaatccagctttccaggcgccagaggctgacccttggcttcacctcagttttctgccccaagggccctccggcagggcagtcctggagaggagcagaaatgctggcgtctccattctgagcatattccccttgtctctctcccccctacactctgaacatagcatgtgggagagccctggggagccactttccccaggagcaggcagagccggtgggggcagccttacacgtatgtttgcacacggacatggatgcactgtggccagcctgccgctcctccccacccgaggagtcagctagaggaagtgggcctagatcagggtgccgggcttgtgtgcaggctgtgtgcacgtgcggtgttttccctccttccccagctctggttaacaagatcctctttcccttacagatccccagacgaggccttgcctggaggtcttagtggctgcagcagtgggagtggccactccccctatgccctggagcgggcagcccatgccagtgctgaccttcccgaagcctccagtaaaaaggcagagaaggaggccaagttggctgctccgagggcaggtgaacagggagaggccatgaaacagtttgacctgaactatggaagtaagtcatcctcatatcttcaggggaaagaactcaggcagaaccaggggccatgcagtcctcgggcctcccgagtttgcccttgcactgagtaccttagctttcggaacagctcggccaggccctgggctgggttctggggctgtagaggtgagcagagtaggtaggattcccaccgagtgttgctcacagcccgttgaatccccgtgacaccctgcagcttccgggctttaaagagaggaagcctggggcccagagacgttcggtggtgtgtccgaggtcacacacagctgtaggagcagagctggggtttaagctctttgcgtgttctctcagttgtgcccttgggcctctttggtttggggtaacaatgtgttagatcagaggcggcctgagaaaagtgcggaagtc

SEQ ID NO: 16851 - DNA, 1104 bp, Homo sapiens
gtaggaataggtggtggcatcactgttatgcagtggaagaaaccgagtcttgaagagggtgacttctctagggtgataacagtggaaacttgtccaaggcaagatgcagacctccgtcacctcccagcttctccttcctccccactcctcattcctgagtggaatgagatttgtctccctcaagtcaagtggatcgtgaacgctatactaaaatggagtcagggctggacctgcacacagattacagtccgttggcctttcaggtctttcttggggggtgctttgcttggcatcgcagttctgcttgaggttttgggagacgagcgttccacacatctctggagcattttcaggtggtgtgatttttggtacctgggatacttatcctggggagaatttgtcagtcttggtgcctttggctagactacagcatcctttcttcccctcaggtgcctgtcaaaggtcgaggcctttcctcccgtattcctcctcgatttgcaaaaaagcagaacaacttatgtctggagcaaggtgacgtgaccgtgcctggcagcagcctgggcactgagatctgggagagcagcagccagggtgagagttgggggtgtgaccccagctgtggcacccaaggtcacatcacacactgggtttgcttctggggaggatcctgcttttgagctacgaatatagatggaatacagatggagtacctgtttgctgtgttccgctgctgagctagtcgctgaatgccgtctgagtgatttgctgctgcaacccccaaacggatacacaattttccttgcctaaaattggtagaagagcagagcattcattagtctggtgatctggaaaaggatggccccttgggcttagatcacacagtagtgggaatggccttctttgttggtcgtcgttttctcccactaacttatggaagagaagcaaatgacagatagaccagccgcaagagttcaggagctctcttctgtgctgtgcacccttttcttaacatggggaaggctctggaaacccctccctgaatgctcttctggaaaggcaaactgagaccagaagacggtatacgttacttcttagaacatttgt

SEQ ID NO: 16852 - DNA, 1147 bp, Homo sapiens
cagctgtttggtgcttgtctgctttggggccagtggggcggggaggggtgggagtttgctctgaatcactcttcagtccgttgttaactgtgctctaggagaggcctggggcgagctgatatgtggtgggccgtgttttgcttttccatgtcatcttgcctcctttccttgctccttcctcctcctctccccttgactccctgtctcctccccaccgcgggcttctccgtcagtgtggctgccagtcattgtggctgatgtcctgtgcctcgtacagcctggatgtcttcacttgtttaatccagcagcatcagcgccatctaggagcttgttctcaggccccatcctggaccctctgagtcgcgctctgggggtggggccggggatctgtggtttagcaagctctccggggatctctgaagggtgggaccagatccgcagctggactcatccacctgatcccgaccatctgtctggcttttgcagatctcaggtgtacatgcaccccagcctgtcaccgcccagcaccatgatcctctctgggggcacagccttgaagcctccatactcggcgttcccaggcatgcagcccttggagatggtgaagccgcagtctggctcaccctaccagcccatgagcgggaaccaagccctggtctacgagggccagctcagccaggctgctggcctgggtgcctcccagatgttggactcccagctcccacaggtcaggaattcagtcactctacccaaagccctaggcttctttccttcacgaccttgccttttcttttcacccgcctctcagtgtgtgctggcctatcgtgctgttggttggtagccaccgtgcccattcctcagcgtgcaggaaatcagcctcttctgagtagccccatcacctttttttttttttggacagagtctcgctctgttgcctaggctggagtgcagtggcatgatctcggctcactacaacctctgtctcccacattcaggcgatgctcctgcctcagcctcctgagtagctgggactacaagtgtgtgccactgtgcctggctaatttttgtattagtagagatggggtttcaccatgttggccaggctggtctcgaacccctgacctcaaagtgatctgcccgccttggc

SEQ ID NO: 16853 - DNA, 1063 bp, Homo sapiens
gcactcagggcttatggggagggagcagagacggcactcgcgccactttccttactaggaggggggtttctaagtctggtccttcaaccaagggactgacaacttaggggagctttccctgcaactcaggagcaggaagggagtggtgggaactatgtatccaaacacgtttcagcgtcagggtcactttgtttttcccattcatctgtccaaaggcaaaacaacgagtggatgagaaacccagcctgggagccgtgaagctgcaggaggccccctcggctgcctcccagatgaagcgaaccggagcgatcaagcctcgggctgtcaaagtggaggagagtaaggcctgacagtgcctggctgccacctcgcctctccctactgaggacggtgccgccatgcggcctcgacacagccgacactcgggagcctcaccagatccaccgtccaaatgcgtggcccagactgagagacctccctcctctccactcccgaaagctccgttgtcaaccagcttgcacccgtggatatatggcattgacccgcttgctttgatacgaaacaaaaaagcagacgactccttcatcccatctgctcctaccgtgactgtggagtgacgcctcctgtgcagtgcagatttgccctccctgcctcctccctgtcctgccgcgcagccagggcgccttctcagcagtgcttccggcccagccgcccatccctaggcacagtgatttggcagcagggtcattttactttgaggctttttgttttaaaatgtagccaaggtttttacaaaggggaaaggaaaagaaaacaaaaacgcaagctccatgtgtatagctgaacttttatatgtttcttgccagcccctccgctcccttccatctctagcctctgtcctgtttagtttgatacgtcactgcagtaccttaagaggtgactcttaagaatgcatcccctcctgattcctcagctggttcacccttgaggttatttgcaaaaagaaaaggaggttcttgagggcaccgattgcgagcattctggtgcctggctccccgcctgg

SEQ ID NO: 16854 - DNA, 2883 bp, Homo sapiens
cctacctgagcttcttgtctgcttttccttctcccactgcaagcggctgcttgtggggcctgggatgagccctctctgtccccaccggccctccttgccaagccattcctgggtgagttcaggcctgcgggagccacacattcatctccacctggacacttgagccgcatggccagacccctcccacctgatgcggtggtgcgtgtgatttgtcaaaagaaagccttctggatgctgttaagatgtacccttcaggtgaacctggtatcagacccacagtacttgctgtttgagaaaaaataaaaacaaaaaggtcacctgttctccagcccttttctcttacctggtatttccttcctttctcctcccccaccccaaataaaaaaacaaaaaacactagaatttatttatatgtattgatgttgtaggtctaggtgaaaaaaaaagaagtaaatgtttcactgctctatttatatataatgtctgaattaattctgtgcaggaaaggccaggaaattgcatgtgaagttcggtgcagtcaccacctgtgtgtgacctgagctgcagtctcttcgctgagatgcaggttttaaatgagacttggggggctgagggcaggcctcaggcctcccagcgccccaacccctccttggtctaatgaaatgcagttcttagtgcagagatgttttaaggtgcaatatatctcttcctttcccgtggttttagagccaagctcaaggtagtaggacgtagggtcttattttgttttcaaacccccatcctcagagcgcagatacatgcagaggcttctgccaggataccacggggccttagtgggaacaggtggagaccagcacttccctttcctgctgctgaggtagggattggggggtcagaacccactcacttttgcctgttaaagttgccctcctgacgctggcagctctgccttggtcactggggatgcggctcgttgctcagccaccagtggccttgcggtattgtccaccatccactagagtgggatgaagtccagagtgtgggtatacatctcagatgcccatctacccactggggacttcaatgccagctgcatttggtttggttttcttaactgttggcttctccccacagcgttttttgtttttttttaaacattcatattgttttcaaacttggaattcatagacactctggctctaggttccttaagggggaaaacaaaagatgactttatttcacattcaagaaaatcagttcagttccaaagctgtggtccttccagccacttctagggacactggggaaccttgttaaacgttgacatcagtgctctccagccgtgctgtcaccctcctatcttctggatctgccttcgcgatggtcagtgacagcttctggaagctgagcacacacaggtgcacagccatgctgtggtctggcctgctacggcagcatggcagctctggtggagccttctcccttgccatttggttcccctgtgccaagtagctgcaggctgcccctcaaatcttcatttgtcccttttcacttcctgcagaacaagcctgggttagagggtctgctggaaatggcctttgaagaccaaggataccaggatgtgtgcactctgtcgtgttctgtgatgaatgggaaacgtaggcttccagaaagccagctctcttctgaaatgtgacggacctaagcaggaagtcatccaggacaggagtggctcagtgttggggatggacgctgtcgcccagccatgctccaccagggccaccaatgtgtagttggctggtggtcttcgggcatgtgagacctgctcttcactgtttccaccccacttggtggcctccaggatggtagtggcaccctcagagccccatcttcagcatgttctgaagcctcagagtggaaattcctgctaaggctctgtgtggacgcctttctcccgtgatctaaaggggacactgtactcaagcttttgacctcatgccttgtgtagtaaaaaaggatttgggggttttgtttggttcctgagagggttgtgttttgtttttgtttccttttgtttatgttttggcctttcctctttgtctttccatgtagaccagatatttgaaagggcagacgatggctagaggtgtaatgtgcagcttgtttatacggtattttgggaaacttaccttggatgggaaatcgaatcgtggattcaccaggccggtgctggcacactcaccctcgccctttccctccggttcagtacctattgtttctcctttcaaatatgtgattgtactagctctttccatatgaaagaattctccttatttaaataaaaaaagtttaaaaagataaagctgaacgtgctttctcaggttgtacatccctcgtttcttggtcatttgaccagagagacctacagatcaaagaattctaattttacagagttcacacggaaattaggagtggcacggctgaaatgccttaacagaagctgtgtgggtagagaagggattgaaacccgtggctaagaagcatcttccaaatgcggcagcatcaagcactccaccctcttcccacggatggcatctggttgtgcacagtgcctgcctgtggccccgtcacttgccgtgagaaacgagctggtcagaggaggtaagcatttgatgtggcgtgttgtgttgtcacttctagcggtgcttttgcaggaagtggaggaggattatgctgtgctttggggtggggagggagcaagccaggcctggggtagcgaagggtaaaaggtaagaatgggctgaggcagcagttctcggttttgccattgcctcactgacctggggaaagacgtttcaccacctgagtcagtctccttaatca

SEQ ID NO: 16855 - DNA, 1962 bp, Homo sapiens
tgaaatctcaaatgagtggaggcctcctggggtggcctgtcctgcaggggccctggaatgggggcaagcagctgggtgggcagaatgcagagtagactcgggggaggatcctttcactttccgcttccccttctgatgcatggaggatggtgtgagcttttcagcaggcccggaaaggtacgcaggtgacgccttagcagccccgcagctggtgctctgccccgcggtactggcgccatcagggcctcccttgcccgcctgagagcagcagcagtctctgtcatcccgtcgccccttaccccccaccccaggccactgggcccctcccacaccacctggggagctgagaagaggaggctggagtaagggaggacttgatcatccaagaaatactttttattgctgggagtcttctgaacctcaccaaactgaggccagagctgagctcctgggggagttaattcagaggggagaggccagcacctccctcctccatcgctcgctgtgtgccttaaactccatctcatgtccctccccatcccctggctttccctccctccttgccccatcctgggccagccagcagggctcctcctctggctcttcagacctttcagccagtgctgtcagtgcccctgggagggaagggcatccctgaggcacccgaatggtccctcagggtgcagggaggcagaagcctggccacagaggagcctcctaaggcagcagctgcagcaagcgcaccctctccccactctccccacgccagagcggcttccagagcagatgctgtttccatcctcctcgtcaaaaccattctcgctgctgagcttgacaatctgggcaaggcttgtggggcgcttgacaaacagaatctgccctgtgccgcctggttccgtggcctccagcatgagcctgcaggcagggcgctgcgggaacccagttgtgctgccccagcccatgcctccgggtctgctgtgcatgaatgagtgctcacttgtcccgggtttaggacgtggtcaagtgaacagcagggtctaactgtgcttacttagcccagttcaaacagaacaaaggaaaaatatagaaagcaacatctgttgatcatttaggtttttttttaaaccaccatgtcactttgagtccttcatgggtttttgaacagcatttatcaagaagaaaatgtgggctttttcccctctcccgtgttttgtttgtcctgtagatagagggaggaaagccgtgcagtggcaggcgggaccccctctggtggcgggaccccctcttgcggtggtcttgcggggccagccgggacctgtcactttattatttaaggagtgtgtgtgtagagtcgctggcttattaacagtattgtgtgtgggttgggtttttagtttgttccttctttttgaagtcccttcatttcaatccttgactctctctccccttcccttgcccagctctgttgaatgctgctgtgcgcgtgtgagggccgctctgcacacagggcccttgggttgtgtgaactgaaattctccctgtatttgtgagactcgcaggagtccccatctgtagcacaggcaatgccagtgccatgctgcagcctcagaaaccaggcctctcactccagcagcaggcagaaccgtgtctgtggtcgggtgctgtccacagctctgtctgccttgttcttgggcttgagctggatagaggtggggtctcttcaccttccctgaattcagaacagaccctgtgcctggccccagtgtgcccaggcaattccccaggccctcactgggagcccttggtgttctgagcagcagggcccaggcagcacatgagcagtgcccaggggctccctgcgtgaggacggcaaggtgcgatgtatgtctaacttattgatggcaggcagccccctgtgccccctaagcctggccctggttattgctgagctctgtgctcagt

SEQ ID NO: 16856 - DNA, 1148 bp, Homo sapiens
aaagcattcaaggtggatttcaatgtttaaaagttgcagtgtttgactcttaaggaataaaacctgagagattcatccagaaattcaaaatgagtaattacaatgacattgaatttggccacgaagttcctgagcagacaagacagcgatgggccacgcaggttttattttctgtcccagcagagcatgtggccacttgagccgttctctgtgtcatgctgtttagatagccctgaggacagcgctgttcactctccagtctcagggcccttctcaagggaggaggtgctgggtgtgggtatcacagtggcctgaggactgggggttgcttggcgtgattggtggcccgttagactaagttattgtgaacggcctgtcactgctcagctactgccaatctaattactttttctcttttcttcttgtattctcgtttttgtttgttctccacctggattctgtagtataagtctgtgtttaggtcctactcccaggatttcgtgcctcaccaccaagcttccgttccgcctttccttccgcctacctcctcttcctctccacatttcccacctgcccaccagtctcagagctctgacttagccgtgccaaccatggccggtccacctcccagcaccgtggacgggcctctctcggcttctcaggagagcagctttcatgggaatactgtctgccttccttccgaaacctctttcactgactcggtgagaactcagcgtgcacacacacacacacacacacacacacacccctgcacatggggctgcacgttttttaaaaagcggtttcacgttcctgaaagacactgcctcccctttactagcagttgggggctgccagcgcacacctgctggcagcatggctgagctgacagctactgagggtcacaaggtgcaatgggagcccatgtgtttccagaacagaactgactcttctatacaaagttctatcaaactaggaatctgattttccacaaatggattagtggccatttagagaggaacttatcagacgcataagatacaaaatgctactagctttccatttacttgtctgtttttagggaaaggtacaaagcccttcgcaagtgtggaggtgacagattcaggacaagtgtctgttcggttgca

SEQ ID NO: 16857 - DNA, 1397 bp, Homo sapiens
tacagccaaatataaacaagcaagccctgaagcagaaggaagagcagggctcagtggtggctttggccccctggttcttatgtctgtcactccacacacgcagtagggcttcaggagatactggctgactggtgctctgagccttttaccagaagagcctgattcagctaaatttccttggtaggggtgactgcttagttggaatttggtggctggaactggtggtcaccccctcttaccctacacggaccttttccaggttcagcatttacagatttgtttcccaaccaggaggggcttatcctaaggaatgttctgatctgagatgagattagaacttcccctgctgtcgaagtcaaagggtcccatctgcctgtcacttcccatgtgccctgggctgtgctgggctagtcatcagcccctccccgtctttggcccaagatgtggaaaatcttaatagctcaaccggttccctcagacctttgtcttctgaaacagtgcttctcacactccagcactgcagggccacctgttgaagcccagtgtcctgggtcccttccccagagaccccagttcatcagattcttaggtttgcaccagggctaaagagctggcatccagaccccctcccatgtgacactgatgccgtcatctgatgcccagtcccttttcagctgaacgaaggatgaagacacaatgttgtcctaaaattgattcagtgaaatagcaagtagtgaaaaagtaaaatagaatttaaatctttagatttttgacatattttgtgtacttggttgtaatataaaatacgtttcttaccggggtcaaaaagcttattagcctctgccttagctacttctccctctctgaaatgcccacctgtgcctttgcacctgtgcttggtccttagttccaggctcaggaggggaagctaaccagtgtcttggcaacttttggctatgggctaggtttgcggtcttcaccaccatacatgacccctaacctacagcagcacctattggcccagtgagggggtttctccactccacactccagggagaagggtcttcacatgtttcaagttggttgtgattaagtttcgtgaaacgatattagccttaatacatgcatggcctctgagattttctgtttcatgttttcatctatgacattgattttgggaagtgctaaatgggttggttgtgcatcgtaaacatcaacattgggagtaatccacaaatccacccctcaagtggccaggaccagttcccacaactctccagggcacctgttctcccccagctcaactgccctgcactttccacagccagatcctgcaccgtctgccagtctcggttccagggcctccattcatgaacttttcctgcatctctcacaaa

SEQ ID NO: 16858 - DNA, 1303 bp, Homo sapiens
tctggggaaccggaccaaggtttaagcattcaccttggggaggccacccccacccctctctccagacttggttaggggtctttggcctcacttgtgtagcacttgtcccctgacctcggtagcgatgcttcaggtctgccctccccgcgcctccacagggtttcttgttctctgaggagtaggggacaggacagaggcttttcctcagcaggcagccagctcagattggactttccttctagggatccctcttcaggttgggttggtgggaaggccgtctgaactggagcaggtgggctgtgtcagggaggcggtcaccggactggactctagccagcggttcccacctccacgcgcccaccgcccaagcagccagagctccagccctagccgcccaaaacaatgcagggcaacggttttctcctgagccaagtgtggagacctagatttccttgcacctgagggagagggaccacagtggtggcttctcacgccttggggaaccggaccagggcctgttcataacacagagatctgagctccttctcaagtcaggctgactgctttgggtaagagggcagaattttaaagcaaaaccgtgctctgcagggcgcctatttcagcattttcagactggtcttaacgtagttggttcattgccctcagaaatgaatgttgaaagcggtaagccccatttgaagcacccccgattttaacaagcttcaggacacatagttctgtgctaatatttttgttttgatgaaaaatttaaaaacactgctctcaacccccaccacaaagaacacgaaaatattattataaagaaactagatatatcccaatccctgctctgcagtggtggttcaatttgtaaagcaaaagttagaaccaaaaatgctttcaaaggtggcttcgaacaatgttcataactctctgctcgcatcattctgctttttacagagtttagagacccatttatagattcagtccacggattgtcatgcatttgcaaaaacgtctactagctctccgagttccatatttttattatcaagggacccttagatctgaggacatggggactggcagacaccagctgcagaacggaaccgtcttttaggaaacagaggccacgatgagtacatgatgggccccatctacctagtggaaaatgaagcggcatgtttttcttcacggtcactggtggctcttggcaatttctgactcagcaccattggactttctcctggcccctcctttcctctctgttgggtggggcggccgggggggtgcttttgtagcc

SEQ ID NO: 16859 - DNA, 1060 bp, Homo sapiens
gaattaatggtagaactagatcatcctttctaacagacgagcctgtgtcctgtgacggcctttcacagcggaatgcagttgtacctcacattacttttgaaacttcactcgttccagttggtacaagtatttgccaaagccatttcctatgttcaccgtggcccctcctgatgtggctgtcagcgcagcgttgttgaacagggctattctttttacaaggtgtgaagtgtggctcttcgcttcgtctttgccatggcattaaaagaaagttccctgtcttctttcaatattagttatttcaaatgaatatgtgctacttaaaagcttgttttgtttctttgtatataatttgccttggatttattgtgcacagtttgttgagttgtatgtttttgtgaattatcaggagtaaatttgacaagtacatgtgaataacctcctgtaaatgaattttataacaaaaatgtactgaactattttttaaagttgtgcagattagcaattttttgctatagctttgacttttctatgctgtgaattaatagctgcgatttggcaaacagccctgttgtctttgttaaaccctaaattttaagaggaaatggcagaattaaaagcagaaacaagaagatggacatggattagaggttatgtattatgaagtaaactacaaggtactaacatcatttcgtctgccatttggtttgctttatgctgaaattacttggtggggatttgtgcaattcagatataaaaagtttcattatccagcccggccctccttcctagctccttttggaatcttctctgtacagtaatgaggtgcattgaggccagctgtgctgtttagttacagactgaagtttggtccaacagaaatatgtgctgatcattaggctggaattggggtggaggtgagataggaggaacagatgaacagtgacccgtgaaaggagctgccagaagcactggtggagggacagggtagaattgcccttgccaggggtaattgctgatggttatggaagtggaacacactttataaaacaataaacttcag

SEQ ID NO: 16860 - DNA, 1035 bp, Homo sapiens
ttgaaatgtatatttgtatagcaaataacaaaatccttttaaaatttaatctagtagaccgcttttctttccccctgtttaaaatgttaatcagttttcaacagaacaaactttatattaccaaaaaaaaaaagatgggaggagggcgggtcctttcaaccattgttagagcaagacagataattatttaacagcctagcttggaataagctgagttagtgctggtgggtcaggtgtctctggctctattaaaaaaagcaaaaacccccccaaaaacctggagtctcctaggggacactttgggcagcacggttatgttaggtaaagtcttgctgacatggtgcatttttagatagagtgcattggcccagggtattatatttctgtgatgagttcatttacctgtttcagtatgcacatagttccctagctaaaattcctaatcttcttgagagagaagaatatggagtgaaagaataattcttgagctatcattcaaatgctcccagcatattgtgagccttgtgtgactggtgaggtacagacatttggttgccaaatgctagattagcgctgggtcagctgtggaagaatcgcctcagcttacagattgtcagacagatctaactagttttccagaaagcctgggaagctgtgtgttcaacatttcccaagggattctgatcaccaggcagcttgggaaccactggggcaggccaaatagaatattttgggcgggaaagaagcacccgatttaaaatgaagcgtaaccagaggagttcagaactgggaagagagtggtagacttcctgtgatcttcagaaatcatctacctggtaaaaatacatgctgtttagaatatctgataggtgtttccagctactattagaggtgatagtgcttttgtgggggaaaaaattggtcatggtgaatggagatcgaggaagctcgggacaagggaggggtgggctgcctgattttgtccagttttccaaatatccacgcagtgaactggagtatcctaaacatgagaat

SEQ ID NO: 16861 - DNA, 1146 bp, Homo sapiens
tggcctagcttgtaagtgcaagtgaagcttacacccagatcttcccctggcatacatgctttttccactgtatcacatgtgctaggaaataaatagtcttgggatgttttcactaaggagaaaattgactaaagaaggaaaaaaacagagtagtaaatagaagaaaagttgtggattagtaaatgcaatttattgtgattatctttgtaagaataaaaaataaaagtacagttgtatttgtaagtacttgaagcgttacagacactaattagtaattagtaagtaattagctttctttccagtagtgaacgtgctttttagattaaaggtcactttggtgtccttgtcttgtctgaccataaccaaagcttttgtctcatgcattgaaagaaatttggacaggtctttttcatgttcttcctttcaaattccactacagaaacagcaactcattctcaaaaatgtgttttttatatagattgcgtacttaagagatttcaatgaagatcaaaagaaagcaatagaaactgcatatgctatggtgaaacactcaccatcagttgccaaaatctgcttgattcatggaccacctggaacaggaaaatcaaaaactattgttggcctcctctatcgtctactgacagaggtaggtatgggtgagggcactgatgctgttaactagctgtatcattttactttacttgagttaactgacatgtaaataagtattaacatgccatttcctctttgatttgtatatattttttatattgtgtgtaactgtgtcagagaaaagggtggcagagggagggaaggttatgggaaataaaaagaggaaaaaaccactatcttatgtgaaacaaatcgtaaggactagaatgatggtcttcaggcttcacggtaggtcacgtagaatgctgtgaatgctgggctgcattttggttggattgtggttttttgttttttttttttgagacagtgtctcgctgtcatccaggttagggtacagtggcacgatcttgactcacagcaacctctgcctcccaggtcaagtgattctcctgcctcagcctcccgagtacctccctagtggctgggattacaggcgtacaccaccacccacagctaatttttgtatttttagta

SEQ ID NO: 16862 - DNA, 2243 bp, Homo sapiens
aagcctaagagaaaacgatctgaaaaaccaatggctgaagatcctgtgaggccttcatcttctgtcagaaatgagggccagtctgatactaataagagagatcttgtgggaaatgattttaaaagtattgatagaaggacttcaactcccaattcacgtattcagagagccactacggtttcacaaaagaagtcttcaaagctttgtacttgtacagaacccatcaggaaagttccagtttctaagacccctaagaaaactcattcagatgccaaaaaaggacagaatagaagttcaaattacctaagttgtagaacaactcctgctatagtgccgccaaagaaatttcgtcagtgtcctgagccaacttcaacagctgagaaacttggcctgaaaaagggtcctcgtaaggcatatgagttgtcccagcggtctttggattatgtagctcaattacgtgatcatggcaaaactgttggagtagttgatacccgaaaaaagactaaattaatttctcctcagaacctgtctgtcagaaataataagaaacttctgactagtcaagaacttcagatgcaaaggcagatcagacccaaatcacaaaaaaatagacgaagactttctgattgtgaaagtacagatgttaaaagagcagggtcacatacagcacagaattctgacatatttgtaccagaatctgataggtcagattataattgtacaggaggaactgaggtacttgccaacagtaacagaaaacagttaataaaatgcatgccttctgaaccagaaaccataaaagcaaaacatgggtctccagcaactgatgatgcttgccctttgaaccagtgtgattctgtagtgttaaatggaacagtaccaacaaatgaagtaattgtctccacttcagaagaccctctgggtggaggtgatccaacagcacgtcatatagagatggcagctttgaaagaaggagagcctgactccagcagtgatgcagaggaagataacttatttttaacccaaaatgatcctgaagatatggatttatgttcacaaatggagaatgacaattataaactcattgaactaattcatggaaaagatacagttgaggttgaagaagattctgtaagtcggcctcagttggaatctttgagtggcacaaagtgtaagtacaaagattgtcttgaaaccacaaaaaaccagggtgaatactgcccaaaacactctgaagtgaaagcagcagatgaagatgtatttcgtaaacctggcttgcctcctcctgcatctaaacctttgagacctaccactaagatttttagctcaaagagtacttcacgaattgctggtctttctaaatctttggaaacttcttcagcactttcaccgtctctaaaaaataagtcaaaggggatacagtcgattttgaaagtaccacagccagttcccctcatagctcagaagccagttggtgaaatgaagaattcgtgcaatgttcttcatcctcagtctccgaataattccaacaggcaaggttgcaaagttccatttggtgaaagcaaatattttccatcttcctctccagtaaacattcttttgtcatcacagtctgtctctgacaccttcgttaaagaggtcttaaaatggaaatatgaaatgtttttgaactttggtcagtgtgggccccctgcaagtctttgtcagtccatctcaagacctgtgcctgtcagatttcacaattatggagattattttaatgtttttttccctttgatggtattgaatacttttgaaacagtaagtatgtgtttcatttgtatgcctctccaaacttttcaagttacctctttaccttgctgagtgaaaatgagagtatagttcaaaaaatcagccaggcgtggttgcgggcacctgtaatcccagctactcgggaggctgaggcagagaattgcttaaacccaggaggcggaggttgcagtgagccgaggtcgcgccactgcactccaacctgggcggcagagtgagactctgtctcaaaagaaaaaacaaaaaaaagtatagttaaattaaaattgaccgtttcgatttagatactggttttagatttcatgttgaacagacatttgtgccagccactgttttagatactggcaatacagaggaaacacttttttttttttttttttttaggtggagttttgctcttgctgcccaggctggagtgcaatggtgcgatcttt

SEQ ID NO: 16863 - DNA, 1143 bp, Homo sapiens
acggctcgcagcaacctcgtcttcctgggctccagcgatccttccgcctcatccccccgagtaactgggaccataggcgcgcgtcaccacgcccggctaattaaaaacaaaatgtgttgcagagacagggcctggctgtgtttcccaggctgagctcagctgctccagggatcctccgagccgccgcgcccggccggtcccttcgtttggaggagagtctgtttctcccacttggaggggctggagcttttgctgctggccacaggactttgtccgtcctccccaacttctggggatctaaggatgtgcccagcaatttgcacgacccaagtgaaacgggggtgactgccttgagggaaaagagctccacaaggagaaggccgagtgtggtatttgataagtgacacagctgaggatcctaggattgatgttacctgcgcgggctaataacttgggggatttttggctcggtgcctagctgtccccgtgagtggggacagccccttgtggaactgggagtcagaattgcagttctgctgtttcctggaagtccacagccaagttgtctaacctatctgggcttcctcatcagccagcagtatctgtctgtaataggatcgataccaggctcagatgggatatagagtataaatgccacttaccaatttcgttttttgttttttaatttcagaaatgttcttttggggccagagtctgggcatatatgaatgcaaatccgtgtttgttcacaactaagcccagctgagacgatcacttttctgtaggccatttgtccaggtaataatttttttttttagcaggagttcagagcaccaaggtaagtgcaatgatggaaacatgtgcagagtcctaaagggacagagaagaaggtcatcagagatagactggaagagaggacgggtcggacaggccccccccccagacgtgatgacactcaggaagagcttgcacactggttgttctcaaatccagctttctcttcgaatcttagtggagttctttaaaagggaaacaattttatccataggatcttttctacttttttttttaagttcctgaggtaagtctgatgtgtattcacagttaagtaccgggcagaggtaggagggtgggtttccaagg

SEQ ID NO: 16864 - DNA, 1166 bp, Homo sapiens
tgaaatgaagagccgccgcttcctctcccagccgaccccagccttattaacaggcttcgttttagggacgcctcctccgcctcagctatctgctatgctaacaggtcagctgccattttgtgttaaactccttctcatttattacaataccactttttattgacatggaaataaaacttacaatcaataagatattatgaaatatacatcaaaacaaaagtcactggagcgggcgttttcatctgttctcaggaaggaacaagggtttatggttggggggggggggggcggcggaacactgaacatttttcttccctattacatgatgcgattttcaatgaatctataaagaaaatgaaaacataaatagagtaaccaaacagaatgatccctgcagctgtcaaaacttaaaacagttcagttttcctttgatttctgttttaagttttgaaaagtacatagatcattctctgctttttccttttctctctttctttctttctttttttttttcttttcatagggagcctttttcttaaatctgctcactcagggtctgctggctgtgacccttgacagctaaactgaccaaatgatcaagtggactctgcatttctttcgtaggctgccggcccggcctcggtgggaacctcttattctgtttatgactcctcagcggtgcagaaagttattccttcccttgctggacaccacatcaaaggaggcccacaggtgtttcttccttctgctaaaataatgtcaccctggagaaaaaggggaaaagaggggcccctcccggcttccgcacacctactgcgtgctgggcacccgtggcgcttcacctccatggtctcgtctaaatgttgtcattacgccatggggtggggacggttattccctgtttaatgagtgatgggaaactgagactccgagaggccaagtaacttgctcaaagtcacacagcaaagaaggatcagagtccggttccaatcctgcctgttgacatcgagtgggcgctggcaagggctgccaaggcagcctagttggattctcattttttttttcttaagaacacatggacacaggaaggggaacatcacactctggggactgttgtggggtggggggaggggggagggatagcattaggagatatacctaaggct

SEQ ID NO: 16865 - DNA, 1878 bp, Homo sapiens
tggtttggaactgccttcgggctccagaacttaaattgcttggtccgtggcatctgatgtaccaacagagattaaaagtgtaaagcaacacatgggctgatgttttgttctcagaaaatagctgctggtctgcatccctccattcttgttttttatgcatatggaaaacattttcctaaaactctatattcttaagttgaagccaagactaaaatttaatgtgtcaaatgatctggtgactattataatgaataattgtgacttatttttcattctctcctgggtcatcaggtttcctgacccaactccttaatccgtataaagatgtcaaatactgtagttcacccacgccacagccctgcttcagacttaactgtggtagcctagatgagctatttgtacacagaggaaaaaaagatattttcctcttttagtaataagactttcagtatttttaatgttgacatttccagatgtttcatttagtatccaggggtctgtctggagacttctagagagggacagctcagaagtgagacccttgagctctggtgctgtaagcttgtgcaattaagttgaacagagcctgggaatttctttcctctgcacagtcccttgatatttggaatccaggttctgcccccaacccctacccacccagtggtctgttaagatgtctcagatggggctgggcttggtggctcatgcctgtactctcaacactttgggaagcaaaggcaggcagatcacaaggtcaggagttcagcctaaccaacatggtgaaaccgtgtctctactaaaaatacaaaaattagccaggcgtggtggtgcacacctgtaatcccagcactttgggaggccgaggcagacgggtcacttgaggccaggagttcgagaccagcctgggcaatatggcgagactccgtctctactacaaatacaaaagttagcctggcatggtggcgcatgcctgtaatctcagttactcaggaggctgaggcaggagcatcacttcaacccaggaggcagaagctgcagtcagccgaggtggcaccactgcacttcagcctgggcaagactggagactgcctcaaaaaaaaaagaaaaaaaatgttggtacttagatgataccatgacggcaacctccccacccccaccccgcattgataggtagtgcagaccagcccttggaggcacttctaaacagtctgctcagaaatgttttctgtttcctattcaaattgctgttttgtctcctatgtttaatcatgtatttgctattctgcttatttttctcatttggtggtaatttcaagaagagcgtttatccactattgattttcaagaaagaaaccaagcagcattgaaatcatgagtaacagaattcagaacattgtatggtggaagtcatttgtgtctgcagctgttttttcactttacaataaataagagtaaaaattgagatcatgtcaaaaaattattgcagttttaatcattatggcatagtttcacttcccctccccccattagaatcagtggagatttgttcttactagggaattttggactgctgccatttaaaacttaggtttttatttaaagcagttgtgcatttttgagaaaatgtattgggagtaactagagaggatctcccaaatttttttgtatgtctctctaggagtaaacatggcaacagtttttctagaacgtggactcactgcagggactggacccaatggcattgttaagaccctaaaatctagccaccacctgcctcccccaggtttccacacacccagttggaaggcctttccctgcccttgtccctgtctcacacccatggaggttaagctacagagctggggaaacaggagattt

SEQ ID NO: 16866 - DNA, 1121 bp, Homo sapiens
tagatttcaaggaagggttactaggataatactaccagcttactttccataaagttgtactagtttatatttctgttatcagtatactaaaatgccttctcagtccttcttacattgtcttttcaaaatggatacagcatgtttattttttataagtactaattccagtcttttttttttttttttttcaggaagtagaaatgatgaaagccgcctatcggaaagagctagaaaaaaacagaagccatgttctccagcagactcagaggcttgatacctcccaaaaacggattttggaactggaatctcacctggccaagaaagaccaccttcttttggaacagaagaaatatctagaggatgtcaaactccaggcaaggtaactttcatcaggaaaggcttttgtgtttttattaagtggaacttcctatattctggctggtctgtatctttcagaggacagctgcaggccgcagagagcaggtatgaggctcagaaaaggataacccaggtgtttgaattggagatcttagatttatatggcaggttggagaaagatggcctcctgaaaaaacttgaagaagaaaaagcagaagcagctgaagcagcagaagaaaggtaggaacaaagaactgattcatgaccttgggactaagctgccaattccagcataaggactgtgtcacgtggtgtgggaagcagttactgctgactagacaggctgcaacactcagctcactccgtgtcagagacccactctgacgttcctttcctcaaaacgcccagtgatctcttcgtgttcgtgttcctggccttgagtccctccatatggccacaggaagtgttcacacttaagattgccacctactatccctagttgtgatttaggtttctcttgatgagatctcttgagtccagtattataaaacagagagtgggctagcggagttcagtgtcagtgtgagtgagtgtcagtgtaattccacatcctccgaatgtggacagtccaatcaccagctccttttttcctccccggctttcttacaggcttgactgttgtaatgacgggtgctcagattccatggtagggcacaatgaagaggcatctggccacaacggtg

SEQ ID NO: 16867 - DNA, 2411 bp, Homo sapiens
gctgggcacggtggctcacgcctgtaatcctagcactttgggaggctgaggtaggtggatcacctgaggtcagcagttcgaaaccagcctggccaacatggtgaaaccccatctctcctaaaaataccaaaattatccaggcatgtagcctgtagtcccagctacttgggaggctgaggcaggagaatcgcttgaacttgggaggcagaggctgcagtgagccgagctcgtgccattgcactccagcctgggtggcagagggagactctgtctcaaaataaataaataataataatattttgctttttcgcaacgggtttgccgccagaacacaggtgtcgtgaaaactacccctaaaagccaaaatgggaaaggaaaagactcatatcaacattgtcgtcattggacacgtagattcgggcaagtccaccactactggccatctgatctataaatgcggtggcatcgacaaaagaaccattgaaaaatttgagaaggaggctgctgagatgggaaagggctccttcaagtatgcctgggtcttggataaactgaaagctgagcgtgaacgtggtatcaccattgatatctccttgtggaaatttgagaccagcaagtactatgtgactatcattgatgccccaggacacagagacttcatcaaaaacatgattacagggacatctcaggctgactgtgctgtcctgattgttgctgctggtgttggtgaatttgaagctggtatctccaagaatgggcagacccgagagcatgcccttctggcttacacactgggtgtgaaacaactaattgtcggtgttaacaaaatggattccactgagccaccctacagccagaagagatatgaggaaattgttaaggaagtcagcacttacattaagaaaattggctacaaccccgacacagtagcatttgtgccaatttctggttggaatggtgacaacatgctggagccaagtgctaacatgccttggttcaagggatggaaagtcacccgtaaggatggcaatgccagtggaaccacgctgcttgaggctctggactgcatcctaccaccaactcgcccaactgacaagcccttgcgcctgcctctccaggatgtctacaaaattggtggtattggtactgttcctgttggccgagtggagactggtgttctcaaacccggtatggtggtcacctttgctccagtcaacgttacaacggaagtaaaatctgtcgaaatgcaccatgaagctttgagtgaagctcttcctggggacaatgtgggcttcaaggtcaagaatgtgtctgtcaaggatgttcgtcgtggcaacgttgctggtgacagcaaaaatgacccaccaatggaagcagctggcttcactgctcaggtgattatcctgaaccatccaggccaaataagcgccggctatgcccctgtattggattgccacatggctcacattgcatgcaagtttgctgagctgaaggaaaagattgatcgccgttctggtaaaaagctggaagatggccctaaattcttgaagtctggtgatgctgccattgttgatatggttcctggcaagcccatgtgtgttgagagcttctcagactatccacctttgggtcgctttgctgttcgtgatatgagacagacagttgcggtgggtgtcatcaaagcagtggacaagaaggctgctggagctggcaaggtcaccaagtctgcccagaaagctcagaaggctaaatgaatattatccctaatacctgccaccccactcttaatcagtggtggaagaacggtctcagaactgtttgtttcaattggccatttaagtttagtagtaaaagactggttaatgataacaatgcatcgtaaaaccttcagaaggaaaggagaatgttttgtggaccactttggttttcttttttgcgtgtggcagttttaagttattagtttttaaaatcagtactttttaatggaaacaacttgaccaaaaatttgtcacagaagtttgagacccattaaaaaagttaaatgagaaaaaaaaataataataataataataataataatattttgagaaactgccatactgtttccacagtggctgcaccatttacattcctctttttatgttttacacatctgctgtttggtgaaattttctacagagtagcttttaactctgagcgctgtacttcctttgaccctggacttcacgcccaaacatcagtaaactgtcacagaaggtagtaataatgtgtattcctggaagccatttctacatgggatgatcagtgataactattaaattaaatgactgcaagccacacatgcagtccattcaatccaaactaaatgcattcccaattcaacttcccctcagtcaaattccccaaatgcc

SEQ ID NO: 16868 - DNA, 1207 bp, Homo sapiens
gggttctggagtcagtccctgtttaaacaagagtcatcaggttttgtgaggacctcagcagagtctgtcctcaggcaggagtcattgagaggggtccttggagttctggagctgtattggaggggatctgaggtctgtggctcaagacagtccttgtatgggctctcaagcggtaggggtatcctgcagggcccccaggagcatccctgatcacccctctgcccctccccaccagagctgaagatccctgaaaacgccaacgtcttctatgccatgaactctaccgccaactatgactttgtcctcaagaagcggaccttcaccaagggagtgaaggtcaagcacggagccagctccaccctccctcgcatgaagcagaaaggactcaagattgccaagggcatcttctgagggcatcctcccagggtctggctggctggtagccaagcacttatggaccagagtggcccaggccagctgggcgccttcctcccacctgccagcccagggtaccccagactccagtttcatcctgaacctctcccgctgctgggattgacgcctgccattggtcaggctgacctggcctcccgtggaccactcgctgccttaggtgccttctgctctctggaaccagaggactagctgacttttgccaaggagcagtgccaacgggcatggcatggtgccctgcctgcccccgggcgccacctctgtacacttccctgacaccttcccaggtgtgggtcactgccacctgtgcccatgggcaccccagagcacccactgtgaccactgcagttctctcatgcccacaggcactggcctgtgaccttcgcaggggtcccggcccctcccaccactctagcctttctcaggctgcaccaaagattccatcatcagggccaactgagagtgagggagtctcacccaccgcttaccccagccctcccctgggagcagagagagaaaccctcttcatggaccagactctgcacccggtgagtgaggacagtcccagctgagtcccatcgatgttgaatctcatgccactgcaagtgccattcaccactgcgtcctgggctttacgagaccatgcaagacgggggttagtgaggaaggaggatttggggtgggggtggggtgattgaatatttgtataaaaagcaaaaagaaaaaaaaaatgtttgtttactgattggggagg

SEQ ID NO: 16869 - DNA, 1361 bp, Homo sapiens
aacccatcatcctgacccttgtggggctccgtaagaagctgaaaccttcgaccgtttgagctggaggggccctgagaaatcagagtctacgtatcatttacttagggggaaacttaggctggagacagggaggccttccactctgccccattagcttagaaaatcaagattcagtccagcagatgcagagtccatgtccatcttgtgccttctcctggacaaacctttccttcctggtggtggatttaaaatactcctttctgcccattggccatgctgggagccacagctatccagagccagcatgacctggggcttggtttccctgccctgggctcagtggcactgctgagctgcagcagtcctagagttttccagggggttctgagggaatctttggtccccagtactcattaactcagcagacatgaggcagcatttcctccacactagggtggctgagaggggtcctggggtgtttcagacccttctgggcatctccttccacagctgttcagtttgtcggtctctttgaggcagccaccgtccctgagggcccctgcacagagcagctgtgggcctgtaattcagcctgcctgccttgccttggggcagggagagagggaacctgctcacggccctgcagcagagcagggcgcaaacccaggacatctgtgccaggcttcccatgccctcccccaacagtccctcagcttcacccagcggggcttccaggccagcctgtgtcccctcccgcaggcctcctgtccacaccagcgccccctggggggcctcacacagcccctgtggcagaagcagttgccctcctctgtacattgcctttaagcgaccaggtcctggccgagtttcctctgccccttcttgctggtcccccaaagggcgctccgctccctgccctgccctgccctgccctgttccgcatgagctgcgcctctgtgctcgcctgccccctctctgcttgttagttgctctttctggctctgcctctcctttgctttcctcgggatgccactctgtgcccaggacggttctgagactgaacactgagggcaggagcaagggaggaagccaggggcgaggcaggccgcgggaaagccagggcccctgcctgcaggttagaaagaggcgagcgtggattgtcacagctgcgggcatgggaagggctagctgagctcttcacctgcatcctggctgccgtgaggattccccgtgttagaggtggggacgcctgctggaggccgcctggctgatgtagggctatcgggaagtgccagggcctgtgttcccaactgtcgcccccttcaggctaagtctcaggcagggacagacccagaaagaac

SEQ ID NO: 16870 - DNA, 2427 bp, Homo sapiens
cacctccggagctgactgagagccctggccgggtagtgtccaggaagagctcctggcgccatggagagaggagagaggatgtttctggcctggatggctgggtgggccaagaagcacttgggaatttagttatggattagagattcatcttggtaaatcacagcctgttactagttgggaacttcagtcttccccaaaccttccacatttcaaagctggtgctttattgcctcctgcctccctttggcttttatctccctacttgcaccagcagccgtctcagcagtagctacatcagcctgatggatagagacttcatgacgtgcagcagctggaacttttgtttataaagcatctcttttcctcacatttattttgaatttcttacgtttcaacctatgcagattgtccagaacatcgtgggcacagctctgatgattttagtggccattggttttaaaaccaagctggctgctttgactcttgttgtgtggctctttgccatcaacgtatatttcaacgccttctggaccattccagtctacaagcccatgcatgacttcctgaaatacgacttcttccagaccatgtcggtgattgggggcttgctcctggtggtggccctgggccctgggggtgtctccatggatgagaagaagaaggagtggtaacagtcacagatccctacctgcctggctaagacccgtggccgtcaaggactggttcggggtggattcaacaaaactgccagcttttatgtatcctcttcccttcccctcccttggtaaaggcacagatgttttgagaactttatttgcagagacacctgagaatcgatggctcagtctgctctggagccacagtctggcgtctgacccttcagtgcaggccagcctggcagctggaagcctcccccacgccgaggctttggagtgaacagcccgcttggctgtggcatctcagtcctatttttgagtttttttgtgggggtacaggagggggccttcaagctgtactgtgagcagacgcattggtattatcattcaaagcagtctccctcttatttgtaagtttacatttttagcggaaactactaaattattttgggtggttcagccaaacctcaaaacagttaatctccctggtttaaaatcacaccagtggctttgatgttgtttctgccccgcattgtattttataggaatagtgaaaacatttagggacacccaaagaatgatgcagtattaaaggggtggtagaagctgctgtttatgataaaagtcatcggtcagaaaatcagcttggattggtgccaagtgttttattgggtaacaccctgggagttttagtagcttgaggcaaggtggaggggcaagaagtccttggggaagctgctggtctgggtgctgctggcctccaagctggcagtgggaagggctagtgagaccacacaggggtagccccagcagcagcaccctgcaagccagcctggccagctgctcagaccagcttgcagagccgcagccgctgtgggcagggggtgtggcaggagctcccagcactggagacccacggactcaacccagttacctcacatggggccttttctgagcaaggtctcgaaagcgcaggccgccctggctgagcagcaccgccctttcccagctgcactcgccctgtggacagccccgacacaccactttcctgaggctgtcgctcactcagattgtccgtttgctatgccgaatgcagccaaaattcctttttacaatttgtgatgccttaccgatttgatcttaatcctgtatttaaagttttctaacactgccttatactgtgtttctctttttgggggagcttaactgcttgttgctccctgtcgtctgcaccatagtaaatgccacaagggtagtcgaacacctctctggcccctagacctatctggggacaggctggctcagcctgtctccagggctgctgcggcccagccccgagcctgcctccctcttggcctctcatccattggctctgcagggcaggggtgaggcaggtttctgctcataagtgcttttggaagtcacctacctttttaacacagccgaactagtcccaacgcgtttgcaaatattcccctggtagcctacttccttacccccgaatattggtaagatcgagcaatggcttcaggacatgggttctcttctcctgtgatcattcaagtgctcactgcatgaagactggcttgtctcagtgtttcaacctcaccagggctgtctcttggtccacacctcgctccctgttagtgccgtatgacagcccccatcaaatgaccttggccaagtcacggtttctctgtggtcaaggttggttggctgattggtggaaagtagggtggaccaaaggaggccacgtgagcagtcagcacca

SEQ ID NO: 16871 - DNA, 1099 bp, Homo sapiens
gtgatcagcctgttatctttgccttttagggaagacatctggtttgacgacgtggacccagcggatatcgaagctgccataggtccagaggcggccaagatagcgaggaaacagttgggtcagagcgagggcagcgtcagcctcagcctcgtgaaagagcaggccttcggcgggtacgctggtctcagggagtggggtctgctggggatgcttagccgtggagggcggggcttcttcaaggaagaggatgctttcctctccctgaggtgaatgaggcaagcacctcccagggtcctgctaagaaccaggaccacacagagcttgtcacgtgggtgcaaatgagtgaggggcagagagcttttctctgctgacacttagtccatggatccctggggctctgacctggagccctgtggcctgccgtgtttattaaactacagcctttggttacccttcagcctgacaagagccttagccttggactgtgagatggtgggcgtgggccctaagggggaggagagcatggccgcccgtgtgtccatcgtgaaccagtatgggaagtgcgtttatgacaagtacgtcaaaccaactgagcccgtgacggactataggacagcggtcagtgggattcggcctgagaacctcaagcagggtatgtcatccacagctcaggaacttagaagggaaagtagtaactggattcgttttctcccttttgttcccttttctgtctgagaccactcactgcagctggttttgatgcgtcttgtctccttttggggcgatgggttttaaaatacaaaaggcatccttagacggctttacacccatttatgccttgcacttcattgcctcctgtccgctgacttcaagaccaggccagtagctgggcacggtggctcatgcctgtagtcccagctactcaggaggctgaggagggaggattgcttgaacccaggagttcaagtccagcctggacaacatagcgagacctcatttctaaaaaaaattattatttttttttgagatggagttttgctcttgttgcccaggctgaagtgcaatggcacaatctgggctcactgcaacctccgcctcc

SEQ ID NO: 16872 - DNA, 2356 bp, Homo sapiens
gggtctcacagcccccaaactgactgttaagagcaggtttctctgcttgtcctcgaagggtctcgactgagttttgttccccgccataaccggggggtctcccccgagggatggtggccctttgtggaggcagcagggcctccagtttgccttcccggggagcctggctgggtagctgttagggctggaagactgagccatggccctgctgctgggggctcccctcgcctccccggagctggcctgagaggtcccgaggcggccggcgagccgtctggacttgggaatgagctctgactggtcaaggccagttcactccccaagttgtttgaaagctgggcgtcctgcaggtaaacttcagcaggtggctgcgttgcctgtgaggttgtgtgggggatcctggccctggatcctgcaggctctctttctcgagacccccatccatgcctggtgagagtgggtgctccctggagcccgctgctgtccctggttctgaaggtctcagacctctttgagaaaacgcatgtgaaaggacatggagtgtccacagaacctgccaggctggggaacagcgctgcctatgtcccgctctgcacagtgtcctcatgcccagcgctggtcccgctggtctcgagctgtccagtccatccaggcaggggctgggggcaaggggcagttcctgcttcctgccagggtcctctgagataaaacagctgctccatgtccttccctgtcatgtctggagctctctgaacagccccagtggaaggtaatagagatggtgacttccccaaaggaagaagaagccagaggatggcagatgccatttcctgagcctgggtagggggctgctatgggagctctggcccatgagccatcgccctgcccagctgggcagcacgaggggccgtgatgtggctttgggtctgttggctggttgtggggtggcgttcctgatgtcccaggcccagcttgccaggacagtgtgggccctgctaaccggcgctgtttctggttctttctccacgcttgcagattagatacatgcaggtgagtggcccggaaggggaggctggggacgtcctgcctgcgccgtcttcttgacctttcagggaggtctcagacctctctgagaaaactcgggaccctgcccccaggaagacatggtcaggcacacatgacttcaggcatcagagaccctcggcacccccgtggtcctgtacccacagccccatcttgcacgttgccttagagacctgcagcctggcagacccaagcggacccttggggatttcttggaggatgatgatggtcttagggccgacacgagcgctgtgggtcacagcaccatttctccagagccttctgacaggtggggtttacccagcctaacagaaccttaaagacagtgttgggaaaatccatcactgccccacagtgaccccacctgtcacctcaccctggaccatgggccaggcaatctctaatcctgtcccggccacattccaccagaggtgggggcaggccctgctctggaggaggctccagggaccctgctggcggtggggggtcatctcaggccccctggctagaaaccagtggacactcaggggaagagtccagcctgcaggtggctgtactgacatgtgcaatggtggatgtggtctgcatggagccgagcacacagtctgccacgtagagaggacttatgcacacagtaggtgttttagcaagtcactcctgctcctgtgctggagggggtagcttctgaggccctcaccccagtctggtgaagaatcgagattcagaatcagaggagtaggagcctgggattctagaaggctctgcctccaagccttccttggcactgtccccacgtcacatcccctccccgtgcgtcagtttcttcatctgcaaaatgaatgggaaggggttggccctctctgtcacccatctggctgcagcactgcacactcagtgacctcgtggccaaacccaaggagtcctcttttgtggaggtgtccgggtgtcgcggtgcagatgtgcaggtggcaggtggccgggcccatggggtcctgctgactcccccttccctcctctagaaaatgggcatgactgaagatgacaagaggaactgctgcctgctggagatccaggagaccgaggccaagtactaccgcaccctggaggacattgagaaggtgagggcagatggcggccactggaaaatggcagcggccactgtggtcactgcagggccacctatctcctgggagtgcattccggaggcagggccatagggcctctctgacaggcgaaggagacttggtggccctcccagctctgcctccaggta

SEQ ID NO: 16873 - DNA, 2876 bp, Homo sapiens
ggtgtgcgagcgcatctccctgcccatgtctccacagagaagcccggctcagcaccctcagggggcccgtccaggctcagcagcagcagctcctccgagtctgggagcagcagctccagcgggtccagctctgacagcagtgactcagaatgaactggcttcggacagaacaggacagatggatgtcgcacacgccgagactctgccgtacccctctgtggttcatattactacttctgttccatggtgtgcaggtctgcttcttaattcagtgttatgatatcttccagtttttgctttcataggtcagagatctatcttgtgtgtgcgttagacttgatgagaaggtgtgaactctgcagaaagtctcttcttcatcactgaattcagtcacttggagatgacaacttcaaatgctaacccgatgaccccagaaaaccgtgtgagattcgtaccgaagaaccttgtggaatccctttgcttaggcccaacctggtcgatagctcgagaaagaattttttccaaggaaatgtctcggatatgggtactgtatttgaaagctgttagctttgtcaacacgcattgtccttgtcatttgggccccgagctctgaccctcgtgtctgacgcggccacctctttctggaggggctgaggacagatgtgcctgcttgtggagaccaggctgggcctaagcgaagggtcatcgcagccccagcccggagcgtggagcccttggggggtggtcgggtgggatgtgcgttctccgctcgtggtgatgtcaggagctcctcggagggaacagagcggctgtgtatgcagcctgcaggtttccatacactgaagcttttacctcaactttaaaaaaaaaaaaagaagaaaagatttaaaaaaaaaaaaaaaggagactttttttgtaaggttcggcaattttctacggaagtccagcccgctgtgagtccccgcctggctagcgctgcccctgctgctgctgccgcgccacccttgggaaccacttcccgagcttatgtgtatataaatagttatttattaacatcattggtcatttttaaaaaaaagaaaataagaaaaaaccgcagaagaaatgcattcacacagtcgcagagatgcaggccttgccagtggtgtgccgggcgcgggtcctgtctggcggcggcctgtcgtctccaggtgctaactcctgccaccgcgcggtgctcacccacgtctgttcgcgcgctcgcccctgggtttgttgggttttttggtttttttctttgtggtttttttttttttttttttttgtatgaaacttggaggcttacaggtatagacagctttcagctacagcacattctaattttttattttgtttagttcttttgtattcacttctggtctctttaagactgttttaaaagaaatcaatttagggaaccccagttatataatataaactttgtaatctgagagaaaaaatgtatagtaaatctaagtcttgatttttaactttctattgtaaaaaataataatatacagagtttaatagaaggtgatgttttggttttgttttcccagaggctgccatatggtctttgagtacggggatgtcccaaactggcccaccaatgagcatggcggctccggccaggaatgccagagttagcctcccaggcttgcgggtggacatgcctgctccctgccagcctccagtggcctggccaggccctcccgagcctgtctgccctccccaggggtggaggagtctctgggccccaggaggattccctcccggagactcgcacggtgctccctgctcacgcgttgtcacagttagtccggaaatgactgaaaccaggcattctcccggacctcagcgtgggggagcctccaggcagacgctgggtatggagctgtggtgtggtctgtcctgtatggtggccagtgctttctgccagcatttctggatggatatagggactatcattagtatcctaatacacggtgattttaaaacaaccataaaattgattcagagtccactgacccttacagatgtaggtatacccttactggagagggaactctgatgaggagatgctggtaaattatcattttttaaattgctggtgagtctgacacttggtgagttttcagccagtttgttaaacttttaattaagttttgtttataataaaaatataaatggatttgaaagtttccattttttaaagttaccctcgttttcaaaggtattttctaaacagatctttaatggactatttaaaccgaatttaaggaattcacacacgacagttgacaggtcttcacgcaggctggttggtaacgtgctgccagcacagggctgggtgatacgtacaccctaagccgggggtgcctggggctggggggcgctccttgcaatgcccctccagccacagggcagtgaggtgctgcctgtgtgagccgtcgggggagcggccggctgtgggggcagcgcagcaggagcatcgtggggcctttccttctcggctggttctctgtgacggtggcgtcggctcgcctctgctcctttcatctagaaagaagccactgaccctgacagcccacggcgggtacactgagcagctgcattggtgctgtcacttttttaaggctttctgtccagacttcaacactggtttcttttcagagtttcgaaggattaatgacttcctcagcgcccttgctggcgggctgagggtgacagtcacgtccgtttcttctgtattagaaggctgcggtgattcaattagattgtcccactgctgagacctgtagggcagcttctaacatgcttttttcaaggggagaggagtagtgacaagtcgtgtgtcg

SEQ ID NO: 16874 - DNA, 1265 bp, Homo sapiens
ggactctggatgactagacaattgtgtcctgctcttagcctcagatccttttgttttctttcagctgctgataaacttattaaaatttggggcgcgtatgatgggaaatttgagaaaaccatatctggtcacaagctggtaggtttcagccctgtgcggtgaagttgactgttgaacagggtggctctagtgatcaaggggtcagggctgcttcgagagctgtgggttcaggttttaagttttccccgttttttaatttttttatagttatttgcatcttgaacttttaacccaaataacatttgacttccatggaggagtgtctgtgaggctggcagagctgcagaaagcctgctgtttttctcctgggccgtgtgtcttttgtaaggttaacactagtgagaagatttcctgagggcaatggggatgtttgggattttgaccttttgccgatggtcctattttgtcctgtcaagttactgaccctgttttttctccccaagggaatatccgatgtagcctggtcgtcagattctaaccttcttgtttctgcctcagatgacaaaaccttgaagatatgggacgtgagctcggtaagtgacactcagtgcttctctccaggggagaccggctgcagggcacggggcaggtgcgggggactgagttgactgctcagtaagcaacactcagcgctcctctccagggaagactggctgcaggggcatggggcgggggtgggtgggggaggccgagttgacttcggggaacagcaagtcactggcggggcatcaggcatgctttgggatgtcagacattgatgaatgtgacctgactcttacgtttggggaaataagcactggaataatcctaataatactctgttatagggcaagtgtctgaaaaccctgaagggacacagtaattatgtcttttgctgcaacttcaatccccagtccaaccttattgtctcaggatccgtaagtgtggctggggtgtcttccctgggggaggtggtgtcggatgtgggaaggctgttgaatttgcttgtagccactgtggagaaggcaggtgggccctgagtcctttctgtgctgtttgtggggaggatgggctgatagcaggtcttaggttctggggaggtttgtcccctctccttcctgtaaaatcactgtcatctcttttgtgttcagtttgacgaaagcgtgaggatatgggatgtgaaaacagggaagtgcctcaagactttgccagctcactcggatcca

SEQ ID NO: 16875 - DNA, 1146 bp, Homo sapiens
aacaaaagtttttaattttttattacagaagggtgaagttcaatttaacatgcgttgtgttttttcagtaaacgttctgtatctttttgatattccatgacccagtgcacgctgtggcctgtcaccgccaccgtggccccgccagctggcctcccctttggcccacgccggccgcccccattctctgctgcgtagatgccctggcccagggccctgactcctccattcccgccagtagctgttcctagtgtattttcgtctttctggaaaacagcattgagtggttgttttctgtgtaaagagccgtttgtgtcttgggagtttgtggcccacatgccgatagcacggtcatcgcacatgactctcccgtttgtctcagtgtccctgcaacaagcagcaccgcagactgtaataaaaggtggggttttgtgaatggttgtggcaagtgcgtccttgtgaagctcgtctccatgtggctttcttggagaaaggctcccctggggcaagagggtggaaggtttctttggacaggaggtgctgaggctggctgcacctgctctctgaagacgccttcctctctaggttcattgttcagtgttgctgggggcggggaacgggggtggggaggttcttagttgcgaaggagccaagctcctgatggacttgcgttgggatgtgggggacacctgtggcatggtaaggctccctgagtcccttactccaggtcagatgccagtgggactcatgcgccctatgagggctgcagggccagtgctgcccctcggactcctcgaggggttgggtgctaagcgcgagcctcgccgtccctgctggagccctcgcctgcctgcccctctgcctgtgctcctggcagtgtggcttcccggtgctcacctgcacagcagttaacagcagaggccgagcgggagcctctggggagcgaggctgaaacctgaacctgcccatggagacagttgtggtgagggttgccacacacagtgagggcggagcagggtggctgagggcacaggtgcctgggtctgtcccacggggcagggctttggggctgtgatgctctgggaagccagcttgggtcctgggtctacagagggccctggccccggagcccagccagctctgcctctc

SEQ ID NO: 16876 - DNA, 1097 bp, Homo sapiens
caccacagggtcctgaacacccgcagttcccggggcagggccgcgtccggaagtccgtggaacggatcttccgatccttgttctctgattcgttaccaaccttccacttccgtagacagttcttcccgccttccgccgtctgctaggcgtgtcgccgcaggaggtgcgcgcccgccctgttttgtttccgggggaatctacttctctgaaggacgctcgggacttccgtttgttcccctcagcttctaattggctacttttatgaatatattagggcacgaaaagtggtagatttttttcttacacgttcaaattttaaaaaagacgattaattgaatgcgaacatttgtggtttcccactgaaccgtgacatttttataaatgtacctccatggatagcgaacaagaagtcaccctcaccgaaaggcgagtggagctttcgtccttaaataaagtgcgcagggaagccgaggcgtgttgtatgaaaggagagaaggttagcactccccttgacaaggatggaagaggccctcgggcctgacaacacgcatacggttaaggcattgccacctacttcgtggcatctaaccatcgtttttttttttttggtgttttgttttttatttttcttcagacggagtcttattctgtcgcccagactggagtgcaatggcgcgatctcggctcactacaacctgcaccccctggattcaagcgattttcctgcctcagcctcccgagtagctgggattacaggcgcgcgccaccacgcccgactaatttttttgtaattttagtagagacgaggtttcgctatgttggccaggctggtcttgaactcctgacctcaggtgatccgcccgcttcggcctcccaaagtgcggggattacaggcgtgagtcaccgcaaagccccggggcatttttcgttttatcttttatcttctttccttgggacacgggcgcgggtcgcacttgtgcacgggcgcgccgttccgccgctgcttggggcttttccgttcatcttcaccgcccgttcttggcattgggtcgtgttcgcgtctcgacacccgacagggcccgtctcccgagggcgcc

SEQ ID NO: 16877 - DNA, 1091 bp, Homo sapiens
ccttccaaacctgggccaccccaacctcggagaggctccccactgagcacccaaagcacctgtgaccccataccctgccggtgccctccccccacccatgcagccccatgcccgcccttctccccgtggacctgccaccccgacacctggacagaagccggctctggtccctcatctccttctctccttggccttgtggttcaggcccttgtgtcctgtcccctccctgctctgtgagtgtctggtcactgtggcagccatagggtagcacctagaatctgtgttggacaccggtgcgtcacctgttgcttcccgggcaggggaagcacctggcctgtgttccccccctctgccctccaccccttgcccacaggaggtgctgcaaagcctgcgtggcgttggcggggtgctggggtctggaggagcccagccagtcggttgtgttggcaagagacgggcctgaacaagagccaagtggcttctgcgtcagcttttaaaaccaccaaaaggagctcacttgtcatgctgtggtccaaatattttggccatttagatgcaaccttctgtgcctctgaaattaggtgtattattaatctcatccagcccagtgacagagtgggcagatcagacaaggatccttgcagcgggatgaagggtgagcatgttcttatcggtgcaaagctgacacggggtgtttccagaatgacactgatggagtgcagcctgcctgggggaggggtggctgggaacccccggtgatgaggagggcatgggcacagggcttgcttagggaggagaagagagggctccagagacacggttgctggcttccagggtgtcacatggggtgacgtggcagggggtttctgcaggggtgcttctgagatagggcgatagggccagctggggttggctgcaggctccaggagttaggttccagatggatttcagatgggactttcttgctaaccctactttttttctgattataaaagtaataaagactccttgtagagaaggaggcaaaatacaaagaagagtgtgaagcccccatcactccattaatgttcaccagtcggggggtgggaggt

SEQ ID NO: 16878 - DNA, 1222 bp, Homo sapiens
gagcagctctgaccacagggtgcctgtgacctgtccccttgctccttgctctcagaatggtggtggagaatagtgtgtgtgcggggggtggtcttctcacctcctcttttctggcttgcagggggagatcggcccacccggtcccaggggagaagatggccctgaaggcccaaagggtcgcggaggtcccaatggtgaccccggtcctctgggaccccctggggagaaggtttgtgatgtgggacgttcagccactttcttgggagggatctgacaggcccttccccatggcctcgggctcccgttggctgtggctgccctaggcatggggtgggggtgattcctgagcgggctcctgtctccaccctgggttctctctgctgttcctatgaagctgttggttgaatgatgaccctttccttgtcccgggttcgccctttcccagccctccaccatcgccttggaaggctccttcctcccggtggctacaaagcctgcgttctgagccccaacattccaggaccccgtccttgtcacattcccgcctccacagctgggtaataacggtgtccccaccatggcctgaaggtgtggcagcctggcaggaaggaaggccggggtccttggagcaggctctgggcatgcagccatcaataggcctgcagtttccagctgtgggaggctcctgggccagccacacaccctggctccaccctgtttccaccctgggctcaggcaggaatggtgcatgcagtggtccagacttcctgccctatcctgctacgtggacccatacaaaagggctcagaggtgccccaggatgaacacgctgagttgaggcatttgcctctaatcgctttgctccacagtggcaagacctctcctccaggggccttcgcttcttcctcggtgcagggaccatcgggtaccccctggatttcatgggtgctggcagtcaccctccacctagggcaggcagggcttctgcataatgacgtgtgcccccgcctctggaaaccacaccctcctccaggcccctgccagaacgcatgtcctttctctctgctccggggaaacggatggagcaataccgtgctggccattaatgcaactctttcttcccccagggaaaactcggagtcccagggttaccagggtatccaggaagacaaggaccaaaggtaacttctggccgtgttaggtgtcccgggacaggcggagg

SEQ ID NO: 16879 - DNA, 1653 bp, Homo sapiens
tcccaccatcaccaaagcctccgtttttaacaacctccaacacgatccatttagaggccaaatgtcattctgcaggtgccttcccgatggattaaaggtgcttatgtttttgtgagttttaagtaaatatttgtattgtattgttataaatgttaagtgtgcctggctttcaatcatgcacggaaacccagtctcagtcccacggacagaatgggcgaggcatggattctgggttgcagtaccgttctgattagaaataggaagtctccccacccccgccctggccaagaacgtgcaataaattggaagtttgccccggggcagcaagaatttatgctgccattgaaaagcaggtaccagtgccccttttcagacagtttttgattcgctctagactttttttttttttaatagggaaaaaatttgataattttcttttttctacatgcacttaagactaaaacacaggtttggattaattttatttgcttcctttttccgcttttcttcccgcagagcctgatgggagaatgtccagggcagggaaaccacattttttgtaggtgataactcaatgaaaattggtgcttattttttacacttctctcttgtggctctcttgtggtgctatctatctgttttaaggtctccttgaaggcgcactggggaccctggccatgcctcgttctccctgctttctttatcctgttattgcctccacagtctgttgccaaggactctaagatcaatgcacgtcactttcctttccactgggcaggatagccaagcacactccctcctgcgctctcccgccccggtgcgtccactcccgagggctgttatgaggactgggttgtgcctacttgatttgaaaacacacacaagcaataaaaagcctcttcctgcattgtctgtggtgtgaccatagcagattatatttggttcctgaatgtttgtggtgctaatttctgtgtttgttccaagccgttcagtcatgccatgcgctgcctcggtagatggagtaatgtacaatgaactccatgagtctctccagggctgcctgcagcacgtcttttccaagtagcctatttggattcccatctcaaatgtcctggatgcgagcgtcagcggctccagagctcggggcgggtgaggtcccctttggggaaccctttcctggccatcgaggtcggggggctgccgtctgtgggcaggaggacccgaggggcagccaggaaaggcgatctcttcactgtgaaaagttgcccgggtgcagcgccttttccttctaccatgggaaatgcaggctgggcccttggggtgagcctgcggggctctggtgctgtccccgacccccaccaccaccagaatgcagttccagcttaggaagccacaaacaagccacccaggaggaacaaaacaccgccagcgtggattttccaaatttccctggaaagtaagtctcgctcttgccaaagaaaagtctggcttggagagtctctggagcccaggatgccagcatgtgccaatgactgtcaccttcatctcttcaaaagaaaagccatagccgaggactgtcccgcgacccccgtggactgcgtctaggtcatgtgattctgttttcatttctcatcccatccaatttgtcctttt

SEQ ID NO: 16880 - DNA, 1456 bp, Homo sapiens
gttgtagctccctcctcctggaagccaagggcccacgtcctcaccacaaagggactcctgtgaaactgctgccaaaaagataccaataacactaacaataccgatcttgaaaaatcatcagcagtgcggattctgacatcgagggatggcattacctccgtgtttctccctttcgagccggcgggccacagacgtcggaagaaactcccgtatttgcagctggaactgcagcccacggcgccccggttttcctccccgccctgtccctctctggtcaaacaacatactaaagaggcgaggcaatgactgttggccagttctcaccggggaaaaacccactgttaggatggcatgaacatttccttagatcgtggtcagctccgaggaatgtggcgtccaggctctttgagagccatgggctgcacccggccgtaggctagtgtaactcgcatcccattgcagtgccgtttcttgactgtgttgctgtctcttagattaaccgtgctgaggctccacatagctcctggacctgtgtctagtacatactgaagcgatggtcagagtgtgtagagtgaagttgctgtgcccacattgtttgaactcgcgtaccccgtagatacattgtgcaacgttcttctgttattcccttgaggtggtaacttcgtatgttcagtttatgcgatgattgttgtaaatgcaatgccgtagtttggattaataagtggatggtttttgtttctaaaaagaaaaaaaaaatcagtgttcacccttatagagacatagtcaagttcatgttgataataatcaaaggaattactctcttcttgttaaattagctaaatcatgtaaccgcagataggaagggctcgcctggggaaactctggtttccgatgggacaggaaagtcatacgggcaacagtatgcggaaagtacgttttttaagtaaaaaacaaaggcaaactttgtactatccagttatctaaggaacaataaaaacattaggagatctttttgcttcacttgtcatttctgagagttttaaaaatgaccgagacttccaggtccttgcagacggattcctgggtttgagtggccctttgagaaagggaaataaatcctttctttcggaagagggcaaggacaggtccctgttggatctccaacctcccatccccccaacctggagaagcagcttagaatctacccgccacctcttaggtgactctggggcgctactccaacttggggctgtgcaccagggactccacccacaccccatctccaccctgctgtccctccatagacaccactggagggggcctggggcggcacccactttagtcagcactggcatggtgggcagagaccctgctgaggaaaagttcactcatctagggctgcagcaggcactggagataagtgacagccctctctgggacccgtatctccccaggc

SEQ ID NO: 16881 - DNA, 1221 bp, Homo sapiens
tgggaaaagagcaaaacagctgtgaggggcaggtgtcaggccgtcccatcccgcaggtgtggacacaggagctggcaccaaatgacctgccgccgtgtgcgaaaggcctgaagcagagctggtctcctggccggagctgccctggtcgcccccaagtcctagcctgtgcccccgccaccctggcagcagctgtgctcacactgtgggaactccaaagcccccactgcagagggaccagcatggcccccacctggctggccagcagcctccccgacttttcccttctcagggaccagggcagggctaccccaaggggagaggacgggcagagaggagggaatggcagcagccagggtggaggctccctggggtcccccgtcctgggtcacctttgttctctgtccttggagtcctggaacaggaatccaggagcttcccgtagacaccatcagatggataaactgaggccacagaccctttccagccagtgaacccagggccactgctgggatggtggcctctccctccctgtgcttggcagggctaccctgccggccccatggagactgtgagatgatgggggggctgtctctccaggaccgttctcaccctgtgggacacatgcccacgcccaccccatgagccggacgccaggctgtctcccatgaggggcagaggccatgttctcggagggatgagctgcggggtgggggtgctctgggctgatgccactcaggacttcagtctgaagcaaagggctgagcacagcgagtgggaatggcctgtccaggcccggggacagcggcagctgcagggccctgagggagggacagggctgagcagcctctggaggcgggggtgggggtgtgtggatgtggaggacggcatgcaggtgtgtatatgagtgagtgtgcaggggtctgtggataccataggcatgggttgctatgaagatctgtgcagacacacaaatgtgtgtggaatacagaggtgaatctgcaggtgtgtgcaggtgtagatgaaggcatgcatgcatgtgaggtgaacagacacgtcccggtgtctgcaggctgacgtacgtggcaggtgtgcgctggtgtgtgcaggtgtgctcagtgcctctgctcagggccacccctttgctgcgatgccacctagcaccagaggtgggtgcgggtcagagctggctcccagctgccctcctggctgtcccctgccctg

SEQ ID NO: 16882 - DNA, 2204 bp, Homo sapiens
gaaaatgatcgacaaactgtataaatacagctcagaccgaaaacagtttaacttgatcccagccaaaaccatgtctgtcagtgtggacgcactcacaatccacaaccacctgtggcagcccaagcggcctgcagtgccaaagaaggcccagactcgtaaatgaccccggtgcagctggcgtccaaagggtgacccagactcgtaaatgatgcccttgtggctggcatccagagggtgccacggggtccttatttattgttttcatctatttgggtacgaagtgtgcaaagtcacagaccttttgcaaagaggtttctagacagcagaagaaaacccctctctcagcgctcatctcacgcagaggatgccaggcagggtgaggatgggggagtagatgccgcttttgcagtggctcgcactgctgtggccactgctgaccactgaggctcccagcggagggtgttcacagccaggtcccgggccacggagctcccttacttgaagttctccttcagcatagattagacgtgatccactttgctttcttgcttctcacctcgcccccttgcacattgcctgacaccctcatattggccagctgtaatctcgtgactatgggactgaggctcaatcttggcttggggtgtttgaatgtctatagcaaaggaattcataatgggaaatctttttcatttgagaaattgtatgatatttattggttgtgtctactgccaacatttatatccaattctaagatttctgaaaaaaaattcttatcccttgctgctcagaaaaagtttacggaaaacaccagttcactaaaagcaccgaaatctgcaaagcctgtcttccgctagaacaacgtctacaaatgtgaagatgatgacttctggcacgcggtcatgagggtggggaatggcactaggagctgatgtttgcctcatttaaagtaggcaagccgagccaactgcagccatcattcattaagttttgggtagtgctctaatggtttgttcactttaataaagacagattttggtaaagtagaatatttttcattctgagcatgtttgtcccaaaaggtgatgcacttaagctgacagtcccttcagtggttttgttaggtcacggcttgtcctgtctggattctgcatctggaagcgctgcatgctctcagaggagcgtgccgtttcccctgtagatggatacttttgttttgttgcctatttaaaaacaattaagtggttatttgcagttatttcagaactccaagtaagtggatggctttgggttctttctgccttggtcccaatggtgttgatgcttctgtggagcgcggacattcccaggagcaggtgcgtgccagccatggctgccagacactgctgcaactgaccagctgccggaagattctggagccactaacattagttttgcacatattttcttgggagtgttacttgaatctatctcaaactgcagaaaaaatcaaaagatcaataattgggagaaaaagagacaaatttaactgttacataattttagatagacaaaaaacatgagtgagtcgtgtacataaggagggaacatggtacagaaggctagaaggaattataggtcttattcccctttcctcagtcctttgaagagaagtacagtctcttgcgattttgtatatatcgtgttcgacacagccgctctctgtcctgtaaatagggaactaaaggctgtatgatttctcaagtgctgagttacacagtcctgagtgagctttctgttaccatactttcacacgtgggctttatttctcactgtatgtttgatatgatattactgtatttattttaagaaagcactaagatgtaataaagtgatgaactaatttgctttacattgaatcgtatgtgtgaggttgctgtggctcatttcgctgaccaggcgacaccaactccttgctttataggagtttcacattgttctttaccatggccctatcgaagtcagtggaattggattctttttaatgaagagctagaaaatatctggcatagagctggaaaattgcattcccatgggacgtctgaatcaattctggattttctccatggaatgagtcagtgtgtggaacatcctgaaacttgtccttaagcgtgtagttttcactgttcgttgcgagtaagcactaatgtggcatggacattcct

SEQ ID NO: 16883 - DNA, 1169 bp, Homo sapiens
gttgatggtcagcctcgaggagcagcaatagcctggccagaaaaaaaaaccaggtgagtctgtgtttcagcagtgtttctgtttggaatgttttttatactaaacagcagttcttaagatgtcaccccaaccccctgaggatcaccgagacccttttatagggagtgcctgaaatcagaattatttttataacaacactaggaagttactgcctctctgcagcctcactcttgcgagtgtgccgtgggatttttcagaggctgcataccatgtggtgtggcagcaggtggagtcaggtatgagggtccagccagatcccagaactatacaggtgtcaaatagtgcctgcccttaacactaggaacttcttccgttctggcgaatatagtcatttgtcatggagtgggctaattactgtaattttaatcagtgtttagaaaatgtctgagctttaatttgtaggatgataaatagagattaatactgataaatagaaacaaaagctctttgaggtcctcagtaattttgaagggtatcaagaggtcctgggactagagtgtttgagaatcacaaagctgaaattatctctgattttcttctgctctgtggaagagtgagtttaaatctcctgcatatgagaggcgtattctctttgtgtggccggcattctcaccccctggtccatgttgggggtctttggtgtataccgcagcgcacccagtgggccttccctgtgtttcaggcctgcgtcccagccaacaccttttgctctacatcacgctgcgagttgtgaagtggatcccagctctggcgacagcatcagcttggcccgctccatcagcaaagacagtttggcatccaacattgttaatctgaccccacagaaccagccacaccccacggccacgaagagccacgggaagagcctcctgagcaatgtcagtattgaggatgaggaagaggagcttgtggctattgttagagcagacgtggttccccagcaggctgacccggagttccccagggcctcaccccgggccttaggccttacagcaaatgcccggtctccccaaggacagctggacacctcggaaagtaagcctgacagttttttcttggagcctttgatgccagcagttcttaagccagcgaaagagaagcaggtgatc

SEQ ID NO: 16884 - DNA, 1239 bp, Homo sapiens
catgattctgctggatgaaccctacgtgcctactgaagtagcacgatggctgggctgcaccttccagccattagcctttttcttcctctgacgttattttctcttttgcaagcacatgtgtgactgaattcactcagttcagtgcacacaagatgcagcccgaccatctataaggtctcgcctttgaagggcagtgtgctgccttcccctgttccttcttccccctccagtggcaccagcccctggccatgcatttgttagctgggtgggtgggtgagtcaggccgcctggtatgcctccctcatctggatcttaagcattgagcttcctccctgttcctcagatggtcatgtttaacacatgggtacagactaagcactagacccttcccgcgtcagagctgacttcttgccttttggtacccagcccataccaagtttccgaagttttctttgctactgcaaagaatagtgttgtggaggtgactcgtgatcttccactttaatcatctgctaatacaacatgactatggccacgtacacttagaagactttgcttaccagaggctctcccgcctctgccgtgtaaacgccgtggggaagtgtgtgttacctcgtccacacgtggacctgctctgctgatgctcctctcctgccttccttctctcgcttcctgagcagtctccctccaagtggtattggaagttagtgcctgtaagtgaaccccaagccgccagctgccatctacagagccatcctgtcgcgatcacttgcttccattaaaaactgctcgcacccaaaactgtttttttgttgttgttgtttaaatgtcccaccttggagttatttatatagtacaagaattggcctgattctgagccgaataggccttgtaatatggcactttggaactcttaagttacatttcgcccagtttcctagttacttctttaagtgatcaacgtgcacgtaatgagagggcatttttgtgatagatacagagggaatgagaagtggtctagttgcccaagttactctgtatattttgttctttctgatgttaccttgcctgactgtggtatgtaatgtgacatctgttaggagccatcagctgggtggtccaggtatgcgggtgatgcacctggtggactagggctggagggctgcagagaggggctctcaccagcatgtcagattcctctgttctcctcctcgggtgttgcagccattcctgctgcct

SEQ ID NO: 16885 - DNA, 1232 bp, Homo sapiens
gattttcatgtcagaaagaggatgctgggctccctccccgggctgatgccagccctgcccacatgctgtctccgctggtgtccccaggcactacatggtcctagcctgtgctggtttcccctcagccccattaacacactcagggctcccatgtctaccttcttactgctgttaagttaggacagtcatcctttgaggtcacggtggaggtcacgaaatgatttcagttgtctgtgttcacagagtagtctgagatgctacagttagttgcctttgtaagtacagaagacagtagaattattgaaaagcctagagccttttcacgttgttagttgctcatttaatcaatcaatcaattattttttttgacacttggtctccctgtgttgcccaggctggagtacagtggcacagtcatagttcactgcagccttgaactccttcctttgggtcttgtgtgtggcactcacctggtcatcccctccctgtcttagataacatccctgaggacctcagagaccctttctacgttgaccagtatgagcaggagcacattaagccgcctgttatcaagcttctcctgtccagcgagctgtactgccgtgtctgcagcctcatcctgaaaggggaccaggtggccgccttacagggacaccagtctgtcatccaggccctgtcccggaaagggatctatgtgatggagagtgatgacacccccgtgacagagtccgacctcagtcgcgcacccataaaaatggtgagtggtctgcggtggccgcccccaggggccatcctctggagccgtgggctctcgtgtggcgcacctggtgcatggatggtgtgaacacggtgtgcggcgaggtggtggagacccgtgcttttgcacactggcgttccttaggaaactgcatatcttttaaagcacatgactgttgtggagaatggggaaaagagagctttcattgagctctttttctcattgggaatgctctgtgaatgctgagattggagtgaggcctgttaataaaaatacttgaagcagactttttacagatgagaaatgtaattgttgcacccattctgttaggttgtttcatgcatactttgtgctaaaataactcagtctgcctttttctcccccaagtatcccacccccatctttctctgaagccttgctactggtgtgccttttccagagcgttctgggtcagggccattctcggtgcctcctg

SEQ ID NO: 16886 - DNA, 1280 bp, Homo sapiens
ggagttgttggggaagatgatttttgagccctggcggctgccagacagctgccgagagtgggggtgccatgagcacgcacaggcacactgcccacctgccagaattgagtgcatgactctctgtgatcagatctgatttgatgggtgcatccgatggagttgggtgggtttcagcctgagagtgcacacttagcagtgagctctgtgtggcctttgtattggagacgcaccctcttcattaggaagctgccgaagaggaaagtcacgcctgtgcctgtgggctgagtgggggcgtgggcactcaggctggctctgttttccctgcagcatttgaagacatgctggagaacccactgaacagcacccagtggatgaatgatccagaaacggggcctgtcatgctgcagatctctagaatcttccagacactaaatcgcacgtaggtggcgttgttccactcggctatcaggccacagcagccccctggtgcggcccgagaccgggcagagtggacctcacctggaaactcaccttcagcgcctcagccctggactgttagaggtgctgcagctgctcctgctctctgatcttattgcttataaactttggtgacggtagtgtgtaaggccgtatttttagcatctgacaggtgtttacaaaaaagtggttgtcgcactgggaagtggagtgatggcctcgtctccagtgctcctctgggctcttgagttgctgcttgaattgccgtgtagacatttgcttggagagtccacttgttatttgacggaggtaggtttcaacccagagttaatgtcaagcatgctaatttaactagtcactcacagatgacttttctttaataaagtcccttttcctatttcctgtcttcgtcttttcttggtgccgcacaagaaacccgtgcgtccccgagaggccacatccccgcggctccgtgccggctgctctgacccggggcgggcaccggggccaccgcagcatgtgggaggccttgtggccatgtttggttggcaaagcctcgtgttgtattgggtttaagggactggagctgagcccgtattcctgggacacaggtcctgagcccaagcacggctgcctccgcctacctctggcctcttcctccttttttttcattttaaaaaacatgaccggtgtcttaaaatgagaaaatgaatttattttgttttttgtgaactctgctcattattgttgctggaagcagtcagttccgagctgtttgttttgaacttctcttctgaaccagc

SEQ ID NO: 16887 - DNA, 1155 bp, Homo sapiens
cactggcttcagtcccacctgcagggaggctcttggccctgccaatcccctgccttgccctcagctgatcctgctgtcttgcaagaaagcaatgtcatctcaactctcagaatcaagagttctaggacaggggagcaagtcatagatccaagtaggtttggtggacatttagagaattgatctccttttttttcaccacagttccagacagaactccggaagatactggtgtctctcatcgaggtggcgcagaagctgttagcgctgaacccagatgcagtggaattgtttaagaaggcgaatggtatgagtcaaccccgatgctgcattccagggcggttcactgccggccttggggagcgtctgcagctccacgcactgaccactgaccggaacctcagtgctttatggaagcgctgatgagggcctggggcctgcctcaccggcaactcctgttgatgtgcctgagggcgggcaggtggagctcagacagataattgctgcaaatgtttgtgctcagataaggcccctgaacctgaggctggagccctcatggccctgtcgtctccctgcagcaatgctggacgaggacgaggatgagcgtgtggacgaggctgccctgcggcagctcacggagatgggctttccggagaacagagccaccaaggcccttcagctgaaccagtgcgtggggggccacctccttcccttgccggagacacctggggcctggttttgtggggctcccaccgtgggtgacgtcctcctaccctaaactctttgactgaatcatttctaacgtggggttttgaagaggtaccttaaatatgtgcctccaaagtgtttttggggtgaatgtgacagaacagtcgttgtgtaaattctctttgggccgttgtatgagaactcaaggtgaatcccgttcgtagcagggacacggcctctaacagtcttctcaggattcccgtgtgagttacttgccctgcttctgtgttcagatctaaaatgaataatccgagatccaggggcagccgggggcagttccccctgtggtccctatctaagccctcagcagatatctctgggtccgcttgcctctccttagacatgggcttctgattctgcccagggtctcaaggtagtctgaggcaagga

SEQ ID NO: 16888 - DNA, 1513 bp, Homo sapiens
aagtttattcacctgaaatactcctgtgtatttagttccttaggttgctgatttttggaactagttctcgagtctctaaaggactcagtaaggtcagctaagaagcctgtctgtgtgtcagactgacctcctgtctatacctgacatgatctgagggcttggcagaatttaggttgaaggaggctgcaattttctagtggcgactccatgtgataagttacgacgtatctgtgttgacaggttgagtgcgttacacttgagctgagtgtggtctctaaggataaacttcagttcttaccatagtagctgctcgcatacagtactttcgagttgcttttgtgagcatggttctgtggagttctggaactgtcagaggcaagcttggcaagcccccttctggaacgcactggctgtgaataactgggaggtgctggcctcaggattcacaccaaggagggggctgagcctcctgcgttcaagggccggtatgttttggctgctttcttgcttttcttctgccccagtctgcatgattttgccgtctgaacaaccatcggggcatcactaagctccagcgccggtaactccgtgggcatccaggctgtttgagccaggtggtgttgcttgtctagttgtgtgtattttaaaaaacttctctgggccgggcacggtaactcacacttgtaatcccagcactttgggaggccgaggtgggcggattatgaggtcaggagattgaggccatcttggccaacatggtgaaaccccgtctcaactaaaatacaaaaaattagcggggcgtggtggtgtgtgcctgtaatcccagctacttgggaggctgaggcagggtaatcgcttgaacccgggaggcggaggttgcagtgagatgagatcgcgccactgcactccagcctggcgacagagcaagactccgtctcaaaaaaaaaaaaaaaaaaaaaccagacaaaaaaccctagaaacttctctgaggtgctgctgtgtcctccctgagccagtacagaagctcctcaggggttcggtttatatccacaagtccagggccgggcttagagtggcaccaaaacaaacttgtgggttaatggaatagacaaaaatatcctgtggaccccacactgcatcgacatgggatgtcccctgcgttggcacggcatttactttaactcactcggtgcgatgtgcatggccatcatgatactcttttatgaaaggaaataggaaatgagagctgtttgatccacagatacctactcatgaatttcaggagcacggagggtcagttaggcagccagttccgatgcaatgctaattattatactcctgatatatattattccatttggtgttgagatgtatcatttgggatgttttgtcattattctactttaaattgagattgtatcccactctgcggtttccacaggtgtggaggatctgagtagcaggggattttcacaccgcaagagccgacatacatttcaggactccagagctg

SEQ ID NO: 16889 - DNA, 1182 bp, Homo sapiens
tagtaaaaactttttcagagtaaattttttattgtaaaaatatttggagatgtgcacagatcacatgtacccacccgatgaatttttacaaatgatcccacccagccgagcatcgcccagagtgtgatcagaccccgcaggccacaccctggggggctctgcctgtgagggacccggtggagctgcctggcctgctcctcgccgcgccctgggggggctctgcctgtgagtgacccagtggagccgcctggcctgctcctcgcagtgccgtgtcttgccatctgcctctgttgcctgtccctgtggcccacccatgcttgtgtcattgctgtgtggtctccagttgtgtgaatccagcgctgtctgtaccacgcctgtgggtggcattgggcacacccattgggattgcacatgttgctgccacctgcaccctgctgtctttgggccccaggctgggacggggctgctgtccctgggtgtatgcctgccccacgaggacagccgcacacacagctctgaccctggtgtgcttccggcaggacctgaccgagagctgcgaacagtcagacagacgatgattgacttcctgcagaaccacacggaaggaagccggccccctgcctgcccgcgcctagaccccattcagtgagtagctccatgaagaaggcggccgttagactcgtgttgaactgtgcaagaaacgtaataggtttctattaagtgatgtggccactgggatgtggtggccaactcgctgctgttgacggcactaaaagcctctttttttcctcttgaaaggcccagtgatgttctttcccttcttgacaaccgtggcagccattacgtggctattgtctttgaaagcaacagctcctaccttggacgggaggtacggcctctgcgtgggctccaggtgtcacacgtggtgtgattggggttggcggtggatctgtgatgagatttgcaggtgccggtcactgtgtcggcatctcgtgtcctgtctgtggctttaggtcttgttcattatcagaagcttagttaatgttactcagcaaagtcactggtgtctggagaagactgttaggatgaatgagcttggcggtgggaggggttcagaaggtggcctaaccctaggtttgaaactaagagggggctttgcagaagatctcatttttatgacac

SEQ ID NO: 16890 - DNA, 1241 bp, Homo sapiens
gctctgtgcacttctgactgtgcagtgcctcatgccgggaacagatgttacagtgagacaagctccatacgagccagccattgctgtcccccaagccagccaaggccgggcatgtttccacactcaccagtgggttcgttcagtcaacaggaggctgggatgaaacacttcaccttttgagagagagtatagttacaaaaatctgtatcagaagtggctccattttgactcaagctgtgtgtagctgtgagtcctgcctaccaagcattcacactgtaagacaggaaaagagaaaggggaaaagtgtctgctgttccccgatgaagggtaggaggtgtcccctggcacgcaaagcccaagcgtccctgaaatgtctgctgggccccaacaaaaggtaggtgcccctggcatgcaaagcccaagtgtcccctggctgttgagcagagtgtgagctcagggcctggcattgtccacctggcacgcaaagcccgagcgtcccctggctgttaagcagagtgtgagttcagggcctggcattatgggcttgtgttttcttccagagacaccaccatgtatgctgtgtctgctgatagcaaaggcttggacacggtggttgccttactggctgatgtggttctgcagccccggctaacaggtgtggatcccagccgctggcgtttgaggtgggcttggacatagggaagaccggaaaggtttgcagaagccctgtagccatgagggagagcaccatgtaattggagctttaggccaacacaaagtgacagcgagatctcataagaaatagcgctggggctgggcatggtggctcacacctggaatcccaggactttgggaggctcaggcaggcaaatcgcttgagcccaggagtttgagaccagcctgggcaacatggtgaaaccctgtctctacaaaaaagatacaagaattagctggctgtggttgcttacacttagagtcctagctactcgggaggctgaggtaggaagatcgtttgagcctgggaggttgaggctgcagtgagccatgattgtgccactgccctccagcctgggcaacagagtgaggctttgtctcaaaaaaagaaagaaaggaaaaagaaatagtgctagtagccaggcgtgctggctcacgcctgtaatcccggcatttagggatgtagagatgggaggatcacttcagcccaggagttcgagaccagtctgagcaacatagcaagactc

SEQ ID NO: 16891 - DNA, 1882 bp, Homo sapiens
ccccgcgtcccatgcagtaggccaggcctggccaccacttgtccctggactctggacagccaggctggctctgcagagcagctccaggtctcatggccctgatgaaaccacggcacctcctggccaccctcacagtaaacattgatggttaaggatacagtgctttcaagggagcccaggacttggcactgacttgtcggtttccagaggcttttggaaacaaaaacgaagccttcagcttgtcagcgccaatggcccgtgtggttcattatgtggaccagcccctgccacgctgcagccgagcactgctcaccctgggggcaggcatgcagaggtcatgctgttgatttcattccaggcctgcgccacctccgggagctcaaggctagggaggattggccagaggaagcacctggtgctgaactaggcttgccctgctgtgaacttgcacttggagccctgacgctgctgttctccccgaagaacccgaccgacctccgcgatctccgtcccgcccccagggagacacagcagtgactcagagctggtcgcacactgtgcctccctcctcaccgcccatcgtaatgaattattttgaaaattaattccaccatcctttcagattctggatggaaagactgaatctttgactcagaattgtttgccgaaaagaatgatgtgactttcttagtcatttaggatgatttaaggatatagtattcctggtcatttaagaatgttcattcattgaagccggagctgtctctgccacaggagagccacatggtcggtagtaaccagggcctctccaagcccagctgtgagtcactgcccagtgagtcccgcgcttcctttaaggtgctgggagcaaagagagggtgactgaggcagaccccaacccctgctctgcaccatctgggccctcgccgtgtttgaacctggctgaatgagtggagggcgctgtgttctcaatcagcgcctccgaggagccgtggggttccttcggcattagttcacggtttttgagagaggccttagttactgcagtgaatttctttcctgttgcaaagacgcttccagcctcactttactttctgtggcctgatgaggaccatgggtgattttgtgtacccaaagcgctggggactgcccaccgtgtggcccagtcactgggaaggagccccagagagccggctgtctgacatgatggctcagggtggtcatccaggttgaaaactgaccgtgtgatgtttgatttgggcttcatttcgtgtgtaggagcacggttagactcactgttaaggaagctggatgcacttctctaaaaggctgcactttccgtgagcacttttcgtggtacaatccacatgacccactttctcccctgggggacgttggttcagaggttggtagcacttggggagagtatcttaacacagtttcttgacagcagctctggaacttagtatttctgccccgagttttgccacactgagactttgagtagctcctggtggactcaaccctgttcaactcagagacgggcctcctctcactgatgcaaagctttaaggcttctctgactgttctgaaactcttcgtattcttgtcaagtctaaagagactgaagaaaagatttaaatactaataaaaatcagtagataatttctgtaggttctgctggaggaatacaaactgtttggtgttttaaatttaagtgtagaaattgtagaatgtggaattagcacagatccttcctggctttctgtttcacttgatcatttagcccagaccacccaggatgttttccaaaatgttccacaggcgtgtcccgctggatccatttgtccttgtcacttggagaaaggccagtccctgtgac

SEQ ID NO: 16892 - DNA, 1181 bp, Homo sapiens
tcctctgacgcagtgagcgcagagcatttggaagctggaggccacctggcgcgttcacctcaatttgcttccctcccctttgcagcaggaaccagagctcgctacgttgacgtcctgaacccaagcgggacccagcggagcgagccggctctcgctcctgcggactttgtcgctccactcgcgccactcccaattccttctaacttgttcgtgccaaccccaggtaggtagcacgagcaccagcccctccaggtcagcccccagtctcctgacctttgatcctctttctatgagtctctcctaaatctcccgttaaaagaatgacctggccagcatgcagagagcctggggttggtttgtggttttttttttgatttgcctgtttctgcatgagtgtgccgcgtgtgcagtgtgaaactctcttcctctcggagtgtcttcagtgagaccccagggacgttcgggacggaatgatggcctcctcgctctctcatccccagatgcagaagaaccacagcttccagacgggactggcagggaagggcctgcagcagctaggggcctggccaatccagagcctgccccagagcccaaggtgagcgggtacggtgggaaaggggaaaggtacccagtgaggaggcacctccccatcctgccagacagggccttgccttctgcaagtcagtatccaatgtgtacgtagagtgttccgccttaaacgcctcacacttatgtatggtagagacggaaggtagaatgcagggtgccgggcgggacagagctgtttgggaagacggagatctggggatagtggcggtgatggttgctcagcacggtgaatgtgcttaaaacttaaaaatgattaaagtggcaaattttacagtatgtatattttacaatttttaaaattggaaaaagtaaaattaattactctaagttacagagaaattacctaccgataataaaagttaagtatattttcatccaaaaaaaaaaaacaaaaaacaaatgactcccatgtgaagtagaacagctcagaccagtcgggagtggtggatgatgcctgtaatcccagctctttgggaggctgagctgggcgggtcacctgaggtcaggagttcgagaccagcctggccaacatggtgaaaccccatctctactaaaaaaaaaacaaaatttac

SEQ ID NO: 16893 - DNA, 1564 bp, Homo sapiens
ttcctacgtaggatgaaaagattcttctgtgtttataaaatataaacaaagattcatgatttataaatgccatttatttattgattccttttttcaaaatccaaaaagaaatgatgttggagaagggaagttgaacgagcatagtccaaaaagctcctggggcgtccaggccgcgccctttccccgacgcccacccaaccccaagccagcccggccgctccaccagcatcacctgcctgttaggagaagctgcatccagaggcaaacggaggcaaagctggctcaccttccgcacgcggattaatttgcatctgaaataggaaacaagtgaaagcatatgggttagatgttgccatgtgttttagatggtttcttgcaagcatgcttgtgaaaatgtgttctcggagtgtgtatgccaagagtgcacccatggtaccaatcatgaatctttgtttcaggttcagtattatgtagttgttcgttggttatacaagttcttggtccctccagaaccaccccggccccctgcccgttcttgaaatgtaggcatcatgcatgtcaaacatgagatgtgtggactgtggcacttgcctgggtcacacacggaggcatcctacccttttctggggaaagacactgcctgggctgaccccggtggcggccccagcacctcagcctgcacagtgtcccccaggttccgaagaagatgctccagcaacacagcctgggccccagctcgcgggacccgaccccccgtgggctcccgtgttttgtaggagacttgccagagccgggcacattgagctgtgcaacgccgtgggctgcgtcctttggtcctgtccccgcagccctggcagggggcatgcggtcgggcaggggctggagggaggcgggggctgcccttgggccacccctcctagtttgggaggagcagatttttgcaataccaagtatagcctatggcagaaaaaatgtctgtaaatatgtttttaaaggtggattttgtttaaaaaatcttaatgaatgagtctgttgtgtgtcatgccagtgagggacgtcagacttggctcagctcggggagccttagccgcccatgcactggggacgctccgctgccgtgccgcctgcactcctcagggcagcctcccccggctctacgggggccgcgtggtgccatccccagggggcatgaccagatgcgtcccaagatgttgatttttactgtgttttataaaatagagtgtagtttacagaaaaagactttaaaagtgatctacatgaggaactgtagatgatgtatttttttcatcttttttgttaactgatttgcaataaaaatgatactgatggtgatctggcttccactcccctctgctctggcctttggctccctttctgggagggaggcagggctgctatgctctgagggagccaggagtcgagggccccttctgctgggagagtgacggtgaggctgcctagtcctggcccacgggggtgtggggaccacgctgcctccagggactccatggtgtctgcagcctgcctggtccaggccctttgt

SEQ ID NO: 16894 - DNA, 1130 bp, Homo sapiens
tgggtgggtttcagaagatgtatcaaagccttaacatttaacaagagtcaggctaggtggttgcaggacgctggggtggggtcctgaggagcagcctgcctgcccccaccccgcggaggaggttgtactgctgcttcctctggtgatggaaccttggggagggtccccacgcctggcctggcccccctcaccggcccccgccctcatcccccaggaggagacacccctgtttctggccgcccgggagggcagctacgagaccgccaaggtgctgctggaccactttgccaaccgggacatcacggatcatatggaccgcctgccgcgcgacatcgcacaggagcgcatgcatcacgacatcgtgaggctgctggacgagtacaacctggtgcgcagcccgcagctgcacggagccccgctggggggcacgcccaccctgtcgcccccgctctgctcgcccaacggctacctgggcagcctcaagcccggcgtgcagggcaagaaggtccgcaagcccagcagcaaaggcctggcctgtggaagcaaggaggccaaggacctcaaggcacggaggaagaagtcccaggacggcaagggctgcctgctggacagctccggcatgctctcgcccgtggactccctggagtcaccccatggctacctgtcagacgtggcctcgccgccactgctgccctccccgttccagcagtctccgtccgtgcccctcaaccacctgcctgggatgcccgacacccacctgggcatcgggcacctgaacgtggcggccaagcccgagatggcggcgctgggtgggggcggccggctggcctttgagactggcccacctcgtctctcccacctgcctgtggcctctggcaccagcaccgtcctgggctccagcagcggaggggccctgaatttcactgtgggcgggtccaccagtttgaatggtcaatgcgagtggctgtcccggctgcagagcggcatggtgccgaaccaatacaaccctctgcgggggagtgtggcaccaggccccctgagcacacaggccccctccctgcagcatggcatggtaggcccgctgcacagtagccttgctgccagcgccctgtcccagatgatgagctacc

SEQ ID NO: 16895 - DNA, 1653 bp, Homo sapiens
acagcgggcaagtggtggggggcttttcgcagcaccctactgccctgcacttggcatggtcccctcgctaatgaaccaaacccctgccgcagtcttgggtatgggaagcgctgcggcccccacttttttctttattttgagacagagccttgctctgttgtccaggctggagtgcaatggcatgatctcagctcactgcaacctccacccctcaggttcaagtgattcccctgcctcagcctcccgagtagctgagattacaggcatgtgccaccacacctggctaatttttgtatttttagtatatatggggtgggggagtttcgccatgttggccaggctgatcttgaactcctggcctcaagtgactcagccacccccgcctcccaaagtgctgggattacaggtgtgagccacagcgcccagcctgcccccactaaaggactctgcgagtctgagtggatgggcacctccgccagcccatagggcattgcagacccgggagtgcccaggccccggccgtgctgctcgggcctccctcgacctgcagtgtggtcccccttgcaggtacaagtgcgactgtgaccctgggtggagtgggaccaactgtgacatcaacaacaatgagtgtgaatccaacccttgtgtcaacggcggcacctgcaaagacatgaccagtggctacgtgtgcacctgccgggagggcttcagcggtgagtgggctgcgcgtttctcagtgcagagggccgccctcgagtctggggagctggagacacaggatcgggacccaggtccagccagcaccatgcatggtgtctccctcccgtggcaaagccttagctccaggcctctggctcttggagatgaggaggggcctggggtggggagcaggcccagggctgctgttgtggggccctgccaaggtgcctgggagtgctggacatgccgagtgctgtccccttccctccaggtcccaactgccagaccaacatcaacgagtgtgcgtccaacccatgtctgaaccagggcacgtgtattgacgacgttgccgggtacaagtgcaactgcctgctgccctacacaggtgaggggtgggtggggcctgtgctggagggggcggggcctatgtgggaggggcgggacctgtgctggagagggcggagcctgtgctggagagggtggggccaggggtgggggcggcctgggaagccgtgactggagggtaaagtggtggctttcttggggcggggccttccagaaggttctgcgcctcactgagtgccttaggcccctgcagtatgtgggccttctcccgggggtggggttggcagattagcaaagatacaggatgcctgggagaaaattttcatgcaagcatgtgttttacctggcaagcctgccgcaagacacaggtaagatgcaggtgaatccttagcagggccgggcctgggtcactgggctccgtgctcccggcgcccaccctgctggggtctctgggggccgggcttccccacccccgccagccggacctgagggattcctttgatggcgggctctctttgtgtgagcggaacaaggagccctctgtttgggctgagcggggagggggatgttcccccaactgtccagcccctgctatgaacccagccaagg

SEQ ID NO: 16896 - DNA, 1117 bp, Homo sapiens
ctcggagccctcctcaggttggcacaggtgaccccaggtctggtcatgggtgtcccgggggccgccagtcctaagtcttcctgtgcccgcccctcccacggtccagggtacacggggacgcactgcgaggtggacatcgatgagtgcgaccccgacccctgccactacggctcctgcaaggacggcgtcgccaccttcacctgcctctgccgcccaggctacacgggccaccactgcgagaccaacatcaacgagtgctccagccagccctgccgccacgggggcacctgccaggaccgcgacaacgcctacctctgcttctgcctgaaggggaccacaggtggccggccaggcgggtggccggcggggggccagtgggcagggcgggcctgaggactgaccgacacgtgccaccccttcaggacccaactgcgagatcaacctggatgactgtgccagcagcccctgcgactcgggcacctgtctggacaagatcgatggctacgagtgtgcctgtgagccgggctacacaggtgagcggccctgcacgtgggggctgactgcactgtgctcagaggtcaaggtcagccactctgccctggggctgctgaggggttgggtgagggctttggtgctgcccacctgggcagaccgtggtctgcagcagagattgcagcgggaccagggctataactggcagcacgatgggtccccccgacccctcttgtctccggtcagagctgtcccaggccgtgttggcagagtggcccagcaggccaagagggagcagccagccctgaggccaggcttaagtaccttctgcctctgtggctcaccagcacctttgagcaggtccctctgcctctctgggcctcagattctcatcagtcagggctgcagtagcccctgcccctggggcccctgggaggatgacttgagtgggcactggtgcccggggaggctggcacatggcacattgtgatccaagatggtttctgacacctggaaggatgtggccagaagggtgatcgccccggctcaacagacagggaaatcgaggttgacgtgggtgggaccccctgggcgctgggcctcggagtctgacccgccctgccct

SEQ ID NO: 16897 - DNA, 1232 bp, Homo sapiens
ccatggctctccgcgggtgtagacccagacccctgcccgggctgtggagtccaagctgggttctgctggaacatcctagtctctagcttgttccccaagttagcagtcatttgtcttcttctttctttctttttttgagtcttgctctgtcacccaggctggagtgcagtggcgtgatctcggctcactgcaacctctgcctcctgggttcaagtgattctcctgcttcagcctcattcagtggcattcagtacattcccaaagttgtgcaatcgcggcatgtgtctggttccagaacattttatcagccctaagggaaccccgctaagcagccgttgtgcccgtgcccggggtgtggggggaggcggctgtgcccatgacaggttcccggtgctgagtggcgggggcgctggggaagcaggtgggaactaactgccctggcacatctgccaacagctgtggcggggccttcgtgggcccgcgatgccaggaccccaacccgtgcctcagcaccccctgcaagaacgccgggacatgccacgtggtggaccgcagaggcgtggcagactatgcctgcagctgtgccctgggcttctctgggcccctctgcctgacacccctggacaatgcctgcctcaccaacccctgccgcaacgggggcacctgcgacctgctcacgctgacggagtacaagtgccgctgcccgcccggctggtcaggtgagggaggacccacagcctgaggggtgggcagacccaggcccgccgccagctgcccaggcaacttgaggtacttggcgggatccaggcccgggtctctgacccggaagtaattgggagcccctgccccagggtccctgcccccctcccagacctggaatcgcctcgttttcagctgcttgctctggcccaactcttgctgtccccgcttctgcgagacaaggggagcctctgtgtccaggccgcccctgcccccttcctcctgccgtgcactggccctcacctgttagggtgaagggtgtctggaggtgtcagctctgggaagagacggcccaggctcaggcctcttgggagctgtggtccttcatctgccaaaggcgaccggtctcacggcaggtcctgaggatcaaatgtgatagcacctaaggtggagcccaggctggcacctccaggtggcctgaagggagggaaggcccggcctcggggagcagtgaggccagcacgaccctcttg

SEQ ID NO: 16898 - DNA, 1196 bp, Homo sapiens
atgtttgatagtctcacactcctgttttgtggacaggcatctgttttccttcgctggtatctgggagagagggtgggccctgtgagtgggctttctaactctcgcgctgggctaggctggcctctaggggtctgaagggatagtgggaaggtggagggtgccttcaccaggagcagccttcatgagtgagttttaagaacctgtgaggatcggtcaggtcaggtgaggtacgcgctggatcatgccgtacaccgtgtcaggatcacgcaggacaggactggggaagggtttgctggcgtctcggttaatagcagtaacggcagccgcttgtgttcttgattctttgccaagcattcttgttatttaacacgggaaggaggtgacttcgcctgtgatggacttccagtgtgagcactggccagagtgaccaggctgaccagcaccagccctgatccaggtaagaggtgaggcggaggcttgccctccttccctgcctgccgggtgcgtgtgagcggctgccctgcggatgctgtcctggacctgttggcaccacagacagttgctctgctgtgcctgtggcctcggggcaaagagaaagtggcgatttctacactcagtgctcgggaaccagtgggcactgagaatggtttatggcctgacattacttgcaaccaaagccaggcagcatttggattttcgcttttggaaaccaccttacctggtttgctccatgagggaggggcagcaacatcgctgggaaccctgaggtgtagatatgtataaatgagctgtgtgtgtatctgaagctcgggcacttgtggggttaccaggagtgtgcgtctcactcccaggcctcgttctggaaacgattctgtaggtctgtctgggaggccttaggcaagtttgattaagaacagtcgagctggataaacaggctgttccttgtccagcactagtcatcccaggggggcgggggcggggctgcaactcctgtgcacaaaggaagggccctgggtaggggtcaggagctgccttgcccagagatgtgtctgggtcactttggaaacaggaatcctctccccaaaatgggtagcaatgggggtacagaggccaaagacgcagctgcatgtcctgcagtgcctgggacgccccgtagtgaagagtgatgtggcccaaatgtcagcagtgccagtgtc

SEQ ID NO: 16899 - DNA, 1196 bp, Homo sapiens; identical to SEQ ID NO: 16898

SEQ ID NO: 16900 - DNA, 1196 bp, Homo sapiens; identical to SEQ ID NO: 16898

SEQ ID NO: 16901 - DNA, 1169 bp, Homo sapiens
gaccctctgcttgtccacaaaggtcctccataccagcttcgaagccacggagggggacagctcccacgaggaccgcagcacccccctggccaggcggtgtctctgttcgcacaggtccggagaagcgcagcagcaccaggccccctgctgagatggagccggggaagggtgagcaggcctcctcgtcggagagtgaccccgagggacccattgctgcacaaatgctgtccttcgtcatggatgaccccgactttgagagcgagggatcagacacacagcgcagggcggtaagacgagtcctcccggggcagaggtcagccaggtggccagggtccctcccacaggcctgatctgggtgggtgcagtgggaggaggcttctggaagaggcatctcatgtccccacacttgggccttgccggcctggtttgagatcccacaacccctgggggtgtgggagggatgatggcctgaccagttgctctccctgctccaggatgactttcccgtgcgagatgacccctccgatgtgactgacgaggatgagggccctgccgagccgcccccaccccccaagctccctctccccgccttcagactgaagaatgactcggacctcttcgggctggggctggaggaggccggacccaaggagagcagtgaggaaggtgggtgggggcaccagagtgcggtcagcctgctggagtttgggtagaacgtgggcctcctcccagctgctggccgctggccggggtcctctcctgagtccaggatgctgtgccatgctcctggcagccccctgcaggagctgatgtttgcagtgtggtcctgtccatcagcagggcctcctggagggctggggctcgctgctttgtgagtttctagagaagtcctgtcacccagcttggggtccccgttggcctgagtttgagccactgtctgtcctgtctgtgcaggtaaggagggcaaaaccccctctaaggagaagaagaagaagaagaaaaaaggcaaagaggtactggctactccccttcctggcaggccaggactgggtggcatgcggtcctgggaccagggctgtggcttcctgtgactccatggcgccccatccttgtgctcctcaggaagaagaaaaagctgccaagaagaagagcaaacacaagaagagcaa

SEQ ID NO: 16902 - DNA, 1210 bp, Homo sapiens
gctttgcttctccaggtagtacagactgagggatggtggggtctctgcaggcctcaggaaacccctaagagcaagtggagtccgagtcccttccccttgccagttcccgtcagcctgtgctgttggcgatggttctctgagcctgagcacagcgggtccgggccctgtcagcatggggccggaagccagttccacagaggaccccggctccggttcttccggagaggggtgttcatgctctgctgtctaaggtgatcagactcatcctcttcaaaattagatgtgggaaccaggagtgctcgtgtgctgagagcccagtgaggcacgggagcggcgtggccccccttccctgggaagatgttgaagaggggcagcgttggggggaggagggagctggtgctgcagtggccagtggctgtggctcatttcaggcctcaagctccggggaaaggacattggaaagcccatcgagaaggggcctagggcgaaatgaacacaaagcctcgaaatcagtgcgctccagctgatctcgttccgccggttccccttggccgccagttccgttctcctcacgggccgaacggaacaaggggtccagcttgcgggggaccctccccagcccattcctgctgtcaaacaaacaaaaccttgcaaagcgctgggttctgctggctgtttttctccctacatcgcgttcctcagatcagggtgcagaactccaccttcctgtcctggggtgtctgcccagtagcggttgtggctcagaggcctcggggagctctgagcaccaccttatacaagggtgaggggtggaggcctgaggcgtggaaggaagaggagcggtgtcactgggcgctgctttctttgatgcagctctgaagagaagctgggaaaagttcctgcccttggcgctggggccagattgtccggtcctgctctcagctcccaggcccctagttgtggggaaagctggtgaattttcatgactgatgcccgggagtgggctgccggggggagctctgaaggtctctgcagggccatttcctcttcgcccatctgcgtggacagttggtgggcactggtcagccccacggcacctgaagacgagggacggcggtagccgtgcccaactgccgccctccgctgggacttagtccccagggcggatgggagcctagcggctggcaagggtgctgtgctgtgccctcca

SEQ ID NO: 16903 - DNA, 1207 bp, Homo sapiens
tcaactcagtggtcttcagtccccaggagcaggagctgctgctcacggccagcgacgacgccaccatcaaagcctggcgctccccacgcaccatgcgcgtcctccaggcacctcgcccacggcctcgcaccttcttctcctggcttgccagccagaggcgctgaggtgtgctgggtgcactggagccaccgggaccccttgaggacatcgccaggctctgtggctttttcccgagcgggagaggtggagatgcttatagcagttacgccttaggaaggggacaaccaggccccgccacacgctcacacacaaacctgctcacgcagctgtgatgcttggcacggggtggccagtgcagatggagcccaaggccccctcggcctcctgggcaacttggggtacacaggatactgggggtgccgctcctcactcaaccccaggctaggggtacacctgacccagctggcctcggcccggggcaccttcggctggtcctgtggggccctggacggtggcccagtggtggcaggggctgctcctggctgtggttgtgcgcccggggcttgggagcggccggtcacgctgctgtgggcccgagtgtgttgcatgtccacgcaccacccgttcagggccctgaataaacagttggcaacagcacattgttgtccagtctctgtctgcagggagggagactgtgggcactgctggcacagtggagtggacctcatggtcactgctgacgggtgacgctgttattgctggcacagtggtcctactggagtgaatgttgcagtcactgctgacaggtgacatgtgcgtctgaggtcatgtgctggtgccagactttgtcacactgccctgtcctccatgacctccagggagatgcctggcacatgtgccggggctggcagcatgcagggcctgccgtctgggtccagggtcagtaggccacgtcactcccagtgccagggcagcccccccagtcagtcccgtccttgagggagttcctcagctgctgggtccagagtcggcaggctgcgtcgctcccagtgccagggcagcccccacagtcagtcccatccttaagggagttcctcggctgctgggtccagagttggcaggctgcgtcactcccagtgccagggcggccccccacagtcccgtccttgagggagtccctcggctgctgggtccagagtcggcaggc

SEQ ID NO: 16904 - DNA, 1231 bp, Homo sapiens
taacttcttacgattagagttaggaagcttccggtttgtgtgtgaagacgatggaagggcggggctccaggatgtatccgcagagccacggagggaacctggactcggctggacttggagccggggcgggggcgggagggggcgaggttcgagtggggctgctcgcgggcgcgagggccagagcccgggatcgcgccgtggagcccacgaccggcgaggccagcgctgggggcagggcctctggatccctgacccaggacgccctgctccggcccgccccgcgcactaaactcggcctctagtcgcctgaagcccgcgcgggtaccgggtccgcgcggcccggcctgtgcctttagccccgccccgaatccccccaccctcataaccccgcccctaaccccgcctccacacacagaccccgcccccaaccagactccgccccgcgcaagctccctaagcccgcgactggcctgcacccggctccggaagtcgttcttccgcgcaggagccctgagcccgcacagccccgcccctcccggcgcccaagccccgccccgccgggttcccgctcgcccggcgccatggatccgctgtcgccgccgctctgcacgctgccgccgggccccgagccgccccgcttcgtgtgctactgcgaaggggaggaaagcggggagggggaccgcggcggcttcaacctctagtgagtgggggtccgcggggaggtaggggtgcagggagctccgcgggcggccccgcctgacaggccttctcccccagcgtgaccgacgccgcggagctttggagcacctgcttcacgccggacagcctggcggccctcgtgggtaactgggcgggtctgggagccgccacacccctccttgcagtgcagatcgtctatggggcgacagacatctgggattccccagaaggctctgacaccctctgcccgccctgtagctgtagtcctcccattggctagggctctggggtcgggcaggtttcgggtgcccccagtgggcctcgggttccaggcagctcgtgacaagcccctgtgctctctagaaagcccgttttggcctgagtgcggctgaggacatcaccccccggttcaggtgagacccaagcagggaggaaggacgggtggggaggaggagggtctgccacagctctccgcacctctcctctcccagggcagcctgtgagcagcaagctgtggctctgactctgcagg

SEQ ID NO: 16905 - DNA, 1204 bp, Homo sapiens
ggaggggggagcggcctcaggtgggaccggggctgcctggtgaccactgcccgccacctgcccgcaggtggtccatcacgcccatcatgtacccggcctccttctggttcgaggtccccagctccgcctacgtgttcctcattgtcatcaatctcttcatcggcatcaccgccaccgtggccaccttcctgctacagctcttcgagcacgacaaggtggggcggtgacgacatggtgggggtggcggaccctgcggaggctgtgcccctcaccccggccacccctgtgcccctgaccccggccaccccgcaggacctgaaggttgtcaacagttacctgaaaagctgcttcctcattttccccaactacaacctgggccacgggctcatggagatggcctacaacgagtacatcaacgagtactacgccaagattggtgagggggcccgtggggcggggaaggcggtgggggccccgcaaggcccagagcacaggccctgagctgtctccccgcaggccagtttgacaagatgaagtccccgttcgagtgggacattgtcacccgcggactggtggccatggcggttgagggcgtcgtgggcttcctcctgaccatcatgtgccagtacaacttcctgcggcggccacagtgagtggggggcggggtggggcgggggcggggcgggagcagggatgggttcgggggtggggcagggtaggggcgggggtgggggcagggatggggcaggagggggtgaggcaggggacagcagaggggcctgcccacccttcttacatgccacagccagaggatgcgaggctggtggcagggaggggcagtgggggtggcgagctgctggacactgtccaccctgtcccccaaggcgcatgcctgtgtctaccaagcctgtggaggatgatgtggacgtggccagtgagcggcagcgagtgctccggggagacgccgacaatgacatggtcaagattgagaacctgaccaaggtgggctctgggcatgtagggtggggcctgggtggggtaggccagggccaggggggtggggccccagcagtggaggtggagcctgggtgggcagggccctgagctctgggggtggggcctgcatggggtggggctgtggggcacgtggccccctgggctctggaggtggggcagggtctgggtggggtggggccagaggggc

SEQ ID NO: 16906 - DNA, 1098 bp, Homo sapiens
ggaagtacagtcagctctggacatctctctccctacctgggcttgactcccctggagggatggcccagggtcaggcagagggaggtcaagaggtcgtttagggcagctatggtggctgcccagcccgcctcacgaggttgctgctgcaagccagtctggcttcccagctgtgtgctcaccacaggcagacttcgggagggtgggctcagctgaagggtccgtcacccctcccccagggaagcctgagtggaggggctaagaaaggccaagacccctcagcaggaggaacggggctcctgctccaaatgggcctatggggctcacacatgcaggtgtcagcagaagcgtgcgtccgtgggtgtttgcaaacgtgtacacgtgctgctgcatttgtgtctgtggctctggtgcccacccacaggtgagctcatgcatgtgtggacgtgtgcgtgctcactggggccaggcattccatgtaaatgcacgtattgcagctgaagcagatgaaggagctggagcaggagaaggaggtgctgctgcagggtttggagatgatggcgcggggccgcgactggtaccagcagcagctgcaacgagtgcaggagcgccagcgccgcctgggccagagcagagccagcgccgtgagtgccacagccctgtccccagatccccacacatggggaccccagctcaccccaggcacccttgggcattgtggctgcccctattcccggacacagtggctgtcgattccacccaggatgctgagacatccctttctccgcctgtggctgccccactcctagggcctaaggtgtcttgggcagacctcccacctcagcaatgcccctgggaccctctaggctctctgcagcatcaggaggcaggagagccacctgtgggaacccctatcaaggcaccttgctggccccggctggacctcctctctgaccgcttgtcctctgctttcttcccaggactttggggctgcagggagcccccgcccactggggcggctactgcccaaggtacaagaggtggcccggtgcctgggggagctgctggctgcagcctgtgccagccgggtgagtgtacccc

SEQ ID NO: 16907 - DNA, 1184 bp, Homo sapiens
cgccggagccacgagccgcgctgctggcggagctggcgctgctggagcccgaggcgctgcgcgagcactgccggcgggcggcggaggcctgcgcgcgcccccacggcccgccgcccgacttggccgcgcgcctgcggcccctgcccccagagcgcgtgggcagggccagccgcagcgaccccgagacacggcggcgctgggaggaggaaggtaagcggggtgggaggccctgggggccggcagggggtcgtgcccacggagcgggtgggaaccgaggccgcgctcggggaactgtagttctcctcgctactttgagacgtgtctcgcctcacgcgttccggcccccgagtcctggcgccccagccccagagttggtttcccctaaagcggaagggtgggcgggtcccgggcgtcccttcacggcgcccgtacccccaggtttccgtcagatttctctgaacaaggtggccgtcctgctgctggctggggggcagggcactcgcctgggcgtgacctaccccaagggtatgtaccgtgtggggctgcccagccggaagaccctgtaccagctgcaggcggagcggattcggcgggtggagcagctggccggtgagcgccacgggacccgctgcaccgtcccctggtgtgtcctgcctgccctacctcggcccggaggtacccttccccacgcccccccacatccccgctccagacgcgagccccaaccccggcacagaccgggacattgcccagaaccggcccaaaatggggcctggccccagccccaactggacactggaccccgaaccccgatgccggctctggtccgagccccgtctgcctgcagggccaggcgtactcgcggccggctcaccgcgcctcccttgcaggtacgtcatgaccagcgagttcactctggggcccacggccgagttcttcagggagcacaacttcttccacctggaccccgccaacgtggtcatgtttgagcagcgcctgctgcctgctgtgacctttgatggcaaggttatcctggagcggaaagacaaagttgccatggccccaggtgtggcccgttcctgagacggggagggaccgcccagactagaactgggagcgtagttgggggtccacgcgcccgggttcgcggctgccccgaggctgtgtggtcctgggttaggcgc

SEQ ID NO: 16908 - DNA, 1496 bp, Homo sapiens
tgtggggacttcgggtgggcagaggcaccttgctgggtctgtggcattttccaagggcccacgtagcaccggcaaccgccaagtggcccaggctctgaactggctctgggctcctcctcgtctctgctttaatcaggacaccgtgaggacaagtgaggccgtcagtcttggtgtgatgcggggtgggctgggccgctggagcctccgcctgcttcctccagaagacacgaatcatgactcacgattgctgaagcctgagcaggtctctgtgggccgaccagaggggggcttcgaggtggtccctggtactggggtgaccgagtggacagcccagggtgcagctctgcccgggctcgtgaagcctcagatgtccccaatccaagggtctggaggggctgccgtgactccagaggcctgaggctccagggctggctctggtgtttacaagctggactcagggatcctcctggccgccccgcagggggcttggagggctggacggcaagtccgtctagctcacgggcccctccagtggaatgggtcttttcggtggagataaaagttgatttgctctaaccgcgatgtcgcctgtgtctttagggatctccatgactggaaagtctgggcggacgttggggagaaggtattcttcaagtcacgtctcagaattcggtttgctgagactggactctagctgtcccctgctggtgggcagggagaggccacggggaagctccgtgtccctggccccacggggcagatgcttggcgggaggcatccttgcgcctgcgtttcacacagggcctgtttccctgcagggctggcactgaggcgcacagctgagggatacacgggccctcaggtcaggcagctcccagcagcctggcatggctatggccccgagccctgggctgtggtggcagagttgtcctcatcatcactctactgctgtccctatcccagggctgaccctgggccttggctgggttccccccgaccctgaaccaggtgacctcttaggaccacgccccctcgctctcccctgtgaaaaatccatcaccttcacttccggaagactccccttccctgggaagccagagccggtggcggcacagggcagggctacccggacccagcccaggattgccagctccgcccctcgggacgtccgggccccgagtgtgggcctcggctctgcctgtccccacaacccccaacatcccacagcagccacctgtgtccctctggggacagtgggcaccctggggcttcgtctcccacttcatgctgggccctgatcctgcactccaccctctgtgcctggaaaggtgagaacatcggctgtcatgtgaccctggcgcctgccccttgtcacggtgggcccagcacggccctagcctgccccttgtcagtaccaccctagcccgccccttgtcacggtgggcccagtgctgccctcctggaccaggtgccccatggccggctgaacgggcagg

SEQ ID NO: 16909 - DNA, 2896 bp, Homo sapiens
tatataagcgttggcggagcgtcggttgtagcactctgcgcgcccgctcttctgctgctgtttgtctacttcctcctgcttccccgccgccgccgccgccatcatgagggaaatcgtgcacttgcaggccgggcagtgcggcaaccaaatcggcgccaaggtaagttgccggggcgctggggccaggcgggcctgccgggcggtgtgggcgggcggccggggaagatggcggcagcagcggccgggcggcgcccccgcattgcggccgccgggccccctccgcggggaattggccgagccgggcgaccgaagcccccaggaacccggcggccagggcgcgcggggcgggggaggggcggggagggccgggctgccgcgcccgtccggggcggggctgcctccctgcgcaccggccgcggtgactcagccccggcccgcccgggcccgcccgcgtcccttgtagttttgggaggtgatcagcgatgagcacggcatcgaccccacgggcacctaccacggggacagcgacctgcagctggaacgcatcaacgtgtactacaatgaggccaccggtgaggccccggccccttccccgaccgccctccggggaccccgcggcccctgccttggctgacgccctcccgtccccgcaggcggcaagtacgtgccccgcgccgtgctcgtggatctggagcccggcaccatggactccgtgcgctcggggcccttcgggcagatcttccggccggacaacttcgttttcggtgagccgtggctggggactgggcggcggctcaaaggtcaaggggctgctccaagggcaccgccgtgggaactgcgcagccggggcccctggacgccctcctcttctctgagccactcaatcccctctactaaatcggctttgggagcaaggtccagctgtctgccgaggcgaggagccgccacacacgtaatctccctgcagggagctgagctggggcagtggctgttcctctgtccttgggaattggcagtggcccccccggggaggggtttgttaagctgtcaggtttggcccctgacttaattcgtagcagggcaggctgccgtcttttggctttgaagggtccgtttgctctacctccagggtgaattctgtggtcagctcacaccatgtcactcggcttttttcgcatggcggtgaccagtagtgctgtctacctggctgacaaatgattagctgtgttctctcacaggtcagagtggtgctgggaacaactgggccaaggggcactacacagaaggcgcggagctggtggactcggtgctggatgttgtgagaaaggaggctgagagctgtgactgcctgcagggtttccagctgacccactccctgggtggggggactgggtctgggatgggtaccctcctcatcagcaagatccgggaggagtacccagacaggatcatgaacacgtttagtgtggtgccttcgcccaaagtgtcagacacagtggtggagccctacaacgccaccctctcagtccaccagctcgtagaaaacacagacgagacctactgcattgataacgaagctctctacgacatttgcttcagaaccctaaagctgaccacgcccacctatggtgacctgaaccacctggtgtctgctaccatgagtggggtcaccacctgcctgcgcttcccaggccagctcaatgctgacctgcggaagctggctgtgaacatggtcccgtttccccggctgcacttcttcatgcccggctttgccccactgaccagccggggcagccagcagtaccgggcgctgaccgtgcccgagctcacccagcagatgtttgatgccaagaacatgatggctgcctgcgacccccgccatggccgctacctgacggttgccgccgtgttcaggggccgcatgtccatgaaggaggtggatgagcaaatgcttaatgtccaaaacaaaaacagcagctattttgttgagtggatccccaacaatgtgaaaacggctgtctgtgacatcccacctcgggggctaaaaatgtccgccaccttcattggcaacagcacggccatccaggagctgttcaagcgcatctccgagcagttcacggccatgttccggcgcaaggccttcctgcactggtacacgggcgagggcatggacgagatggagttcaccgaggccgagagcaacatgaatgacctggtgtccgagtaccagcagtaccaggatgccacagccgaggaggagggcgagttcgaggaggaggctgaggaggaggtggcctagagccttcagtcactggggaaagcagggaagcagtgtgaactctttattcactcccagcctgtcctgtggcctgtcccactgtgtgcacttgctgttttccctgtccacatccatgctgtacagacaccaccattaaagcattttcatagtgtgtggtttcgctttgcccattccttccagtaggccctccgggtgctgttgccgaatgtcagggcgtagttgtcctgcatggctgcggggagccaggctgcagctgagctgggcttatgtgcccaggaccagcatgggctggacacccaggcttcagagaagtgtggggctgccctgggccctgggtatctgcttggtggggaacttgcttgttgaaggcaggcctgtcctgttccaggtacccaaccttggggctcggcctgtgtctgggacttaggtgggtccagtgaccccccttccaaaaggggtagggaggatggcagacaatcctaccccaaccaaggtgggaccctggtaatggtcagacaggtggtcctgaaccagcaatgaagggtgagcaggtagagccgtccctccccacattggccggggtgtgtccatgtgacc

SEQ ID NO: 16910 - DNA, 2162 bp, Homo sapiens
tagaatcatttgctgtaatccttaaatggcaaacggtcaggccacgtgactaaaaactgtcctgttgtcgaagcttctcccctgggccgccgggagccccgtggagcgcggcctgcacgggagttgtgtccacaaaggcaaagtaaaggggtggaatcatctggcctctcggacattctctgctccgcctccctcttgtgctgcttagggtgaggtcattttgagtggagccgagtccttgtgggtgaggcaggaggacccttgttcctggtgggcccttctgaggagcgggtgagctcagaccttcctgagtccagcagggagtatgagtgagactctgtccttgtcttgcggcaggagtggtggggttgctaagtcagctgcccgctgttttatggggagtaggatgctctcgcccctgacattggttagttcttgcctgatttatgcatgaagtggctgggagctcagcagtgagcttctgcccagaagaatccacagggcatgttcagcaggcctgctgcagatggtggagggggctggccagccagggtgaggtgagggtctcacttctccgtccgtctgcagggctgtggtttccaggatagccctccctctccttggggagccccaggtgtctggggctggtcagcatcttgtacccatagagctgccccagggaaacatgccaggctgtgtggctgggatcctgcctgtctccaggtgcgcccagccagaggccttgcttcttgggagctggaagcctggccagtccgactctgacctgtctggtctggtccggtccgaccctgtgttggtcccacaggttgctgctacactttcccttcttgaagctccactgccatgttccaggacaccctgtgtgttctcattgctgcccctggctgggctggcttttgtctgtaagcaaaacttccagtaccttttctggcagtaccctgggggctcctgaagaacaggactgctgaaaatgggtgatatcaacaaactccgcaggatttcctggagcttagagaactgcatgtgcccacatcaggccctgagaagcccccttagctgctgcaaaggttggggacattttttgctgagtaggtgaaagctgccagggagggggacatatgtgtccctagagatggcgggtcagcaggttggggtttggggcagtcttcaggcctggagccccgagtgccctcaggcagcctgctttcagatagagtctgaggatgagcacggagtgcaggggtcccctttacctgcatccaggggtgtggccatgttgcccctgaccagcagggctgctttgtttggcagtcattcatcagaaaagtgcactgaaagaagcgcccagggcctcccacctgtgagacaccacgctggggaagggggcggtgcaggttctaggtttgcatgtggcagctcctccaggcctcaccccagcaggtggcaccgtgagggtgggacgggccccaccactgcttccctctcacctgatacccaatcctctggtcatctttcccgttccgtggccccgacttcttggtcttcgtagccaggtatctaagacgtcctgtgaggacatccagatggctgcaatgtggggctgcttctaaagcttgtttggagtgtggtgtgttgggatgcgcacctggtcactctccctcccccgcagaggtgtgtggttgaggcccttttggaatgccctgctgccttcctggccagccttttctgcgcctctgtctctgtggtggtctgagctgttggctctctgccatgtctttagccacagccctgcttgaagccctgaggctgaatacccaggcacccgtatatttcagtcaagtccgccttagcttcctggagctgccgcaacaaagcagcgcgagctgtgcagcctgaagcagcgggaattcacagtctaggctctggaggccggagtctcagatgaaggcgcaggcaagggccctcaggtgcggacgcctcctccctgccaggtgccttgcctgcctccctgtgctctgcacagcaatggccctgcaagtcttctgcatcagctttctcttctgcggactcctgctcctctgggtcagggcccacgcctgctgcttctgagagcccctgtttgttaaggatgctctctgagg

SEQ ID NO: 16911 - DNA, 1172 bp, Homo sapiens
gcttgctcactggccttcccaggaccctgcccaggtggtgctgcttggccccaggtcgaattcctgtgctggcagcaagcaggggcctgggccgtcggctggctggggctcatgcagccatcccctttgcagccatccgggtgacctgcataggttcctgcggggtctccaacaaggctaatgacacagcgtgggtagtggaggagggttacttcaacagttccctgtcgctggcagacaagggtaagtttgggagccagttcccgagtggtgacccctgggggcagcccttggagtggggcctgtctgtcctgtcctccccctttcctagatctgcctcttggatctggcactggcccatcttgtcccagggttgtgggccctgatggctttctcataggcgctgggtggctgaaggggccacctcccccttgtgctggatttgggtgggctctgacccctggcacagctgtttcacccttgccccattcccaaaccactctcctgttcaagccaagctcttatcctcagtccttcacccaagccacagccctgtgctgctgtggcgctggtgactgagacagggagacccagtgtgagctggtcagctgcagtgcccactcttatcctggccctgtggccacctcaggccacctcagggggggactgccccccacctccctcctgtctctgcagggagcctgcccgctggagagcacagcttccccttccagttcctgcttcctggtgagagcccagcctggacaggcctggtgatgaccaactggtcctgggaggtgggctctgcagggtggaaggcagccaggtaccagtgcctgctctctccccagccactgcacccacgtcctttgagggtcctttcgggaagatcgtgcaccaggtgagggccgccatccacacgccacggttttccaaggatcacaagtgcagcctcgtgttctatatcttgagccccttgaacctgaacagcatcccagacattgaggtgaggatggcacagtgacctccttggtgggtccccaccctcatggaggctggggaagagctgggcaggcactgcttcatcccagcgtcctgtccccagctgaggtgaggggggccagggtctggaggcagtggcctctttgccctgagctgactgctgatgtcca

SEQ ID NO: 16912 - DNA, 1327 bp, Homo sapiens
agatcactgagactgagtaaaataccattttaacacacaacatagttacctactgtgggataaatgccatttggggatgttgcaaactgtagccatggtaaactgggaaagcaggttttgagaggttttgatgctgcccattttgggtattttttagcttagtaagtgtattatctaagtcaggggttggaacatttttttctgcaaagaaccagctagaaaatgtttcaggttttgtggaccacatgtggtcactgttcctcctccctcctgctcattcctccttctggcctttagccctgtaaatgctgttcttagcttgggccatggtttgtagatgctgacctaacccatctgaggggcaactaggcacacgtgaggacagctgtgctgtttccgcttgcagactttctcctctctccattgtatctcatctttcggttgtggggaattatcggggagaagaactgtgattttggttgcatgttatttcagtgaccacctgcttatgcagttatagttattcactgtctttgttttgaagcatgcagccagtaaagatcccagagaagttcgagaagctagagatcataaggaaccaaaagaggagatcaacaaaaacatttctgactttggacgacagcagcttttaccccccttcccatcccttcatcagtcgctacctcagaaccagtgctacatggccaccacaaaatcacagacaggtaaagaggacccggcaactgtctctgctctttgaatgtatgtttcgagcctgccccttgccaggtgagagttctgtttggctgtaagtgcctgtgctgctcttgatgaatgactgttgacgtcagctggccctcctgtgctcgcctgtatgcctgaggaggcacacctgacctctgctctaagccttgtctcatgccagcattgatttcctagcttgttaacattctcaagatgaagactgttttctttactagtatgtgactcacttggtctatgtggggagaagaccctggagttggaagctttcctggtttgtaggtggagtgcctttggaaatgctggggtgtgctggggaagtctgtggcccagggtgaggaccaccgcccgctccagctgctctgccaccagccacctcgctccaggcgtgctcctcactctcctgggctggctgcttctatggccagttccgggagtggatgaacgtttgattccttaccggggaccttttgtgggaggtgctgggagggcaccgggacctcagagtgagcgctgcgtcagggctccctgggctttcaaacctcctcagcttctgggatgggat

SEQ ID NO: 16913 - DNA, 1203 bp, Homo sapiens
tttttttttttttttagcttgcttgccttttgttttagcagctgcagtatctcggaagaaaaaacgaagaatgggaacctatagcctggttcctaagaaaaagaccaaagtattaaaacagaggacggtgattgagatgtttaagagcataactcattccactgtgggttccaaggtaagagacgcatttgagtgagttgccacgtgtgcgtggaaatgcgtttctgtgttcagggcctcgttatcagtaatttgggtgacctcagtccccgggaaggtgccagtgccatgaagctcctctgccataggggcagagtgttcgtgtccaagatcattgtgggggactccaccccgtcctccctgccctcctcaccacagcccacctgtctgccgggctcttctccaggtggcaggggcacctcttcgtgtgtccccgcctccccacaggcccttgcacctcccagtcacccaagactcctcagtgaaagcaagtttgttcatgatgcgcactgatcctgccttggggtatacacctgcccgtgttctagggggagaaggacctgggcgccagcagcctgcacgtgaatggggagagcctggagatggactcggatgaggacgactcagaggagctcgaggaggacgacggccatggtgcagagcaggcggccgcgttccccacagaggacagcaggacttccaaggagagcatgtcggaggctgatcgcgcccagaaggtatgtgttgctgtcttgggtgacagcacaaggaaagagcatcacaaagttggccgtggttctgaaaattaacagtctggtcacttctagaccctgataaaatcccctgtttacaattggcttagatttttgtattttatttttcttgatttattagattattttcattcaagaagtatttatgtttctgtacatcattcattgaagtaaacctcttttttttttctgtgttttctttctttcttttttttgagacagggtcttgttttcacccacgctgcagtgcagtggcacgatcatagctcactgcactcaacctcctgggctcaatgatcctcccatcccagccccccgagcagctgggaccacaggctcacgccaccatgcctggctaatttttaaatttttttgtggagacggggactcgctttgctgcccaggctggtcttgagctcctttgctcaag

SEQ ID NO: 16914 - DNA, 1176 bp, Homo sapiens
tttaaagtcgagggcttcttaagtttcagaccaagaaaaatttacctgccagttaattggtctttcaagtttctccgtttgtttggaaaaatggaaactgttccggaatgcatgctactggaaatcaggattttccacttattttggcgagtactaaatcagtgagaggatgctgtgtggcctggcagggtgaaccggcacctccctcctgcctcctctctgctgaggggcccctccctcccccttctttgtctgctttagaaggttgtcactgtcctcctcatttctaaaggtgttgtcacactcctgagctataaacatttactatcaaattaccttagaagtggaatgaaatctagcagaaatattctgcttagactaaaggtttgataataatagaataattatgtctttgaatacgtgtttagaaaactcagacattgttggtcactgaaacagtgcagctctctttttttgagtgtggaagcttgtaagtcacttctccccaggcggtggctaccgtcacagccctcccatacacctgaactgttgtttcactaggcgggcgctaatattgacacctgctcagaagaccagaggaccccgttgatggaagcagccgaaaacaaccatctggaagcagtgaagtacctcatcaaggctggggccctggtggatcccaaggtatgttcccctgtcagaatcaacgtcctagtgtgtgtgtagacgtttctcagaaagctgagcaagggacatccttactgacatctccaggacttggggccttcacacactgacccagttgtccagaaatagttccttcatctcactttggttacctggtttattattaaaaactactagtgagtgctcactctctacagagcctgacaacagacaggtgagcgaatgacgggtttgctgtgcagaaggtgttcgccttacagtacatcgtctcaccctgtcttcagcccagagcaattaggcaagaaaaagaaatcaaaggcgttcacattggaaaggaagaagtaaaactgcctctgttcacagatgacatgtttttatatgtagaaaatcctaaagaatatgcaaaaatattgtaagctaacaaaaccaattcagcaaaacaggataaaaaattaacacaaaaaaatcagttgcatttctatatacttt

SEQ ID NO: 16915 - DNA, 1216 bp, Homo sapiens
gccccccccgtctcctcccttctcaccccccccggctcctccccccctctcgccccccccatctcctcccctctcaccccccccatctcctcccctctcacccccccatctcctcccctctcaccccccccatctcctcccctctcaccccccccatctcctcccctctcaccccccccatctcctcccctctcacccccccggctcctcccctctcacccccccggctcctcccctctcacccccccggctcctcccctctcaccccccccagctcctcccctctcacccccccccggctcctcccctctcacccccccccggctcctcccctctcacccccccccggctcctcccctctcaccccctccggctcctcccttctcaccccccccggctcctcccctctcaccccccccggctcctcccctctcaccccccccggctcctcccctctcaccccccccccggctcctcccctctcacccccccccggctcctcccctctcacccccccccggctcctcccctctcacccccccggctcctcccctctcacccccccggctcctcccctctcatccccccccggctcctcccctctcaccccccccggctcctcccctctcacccccccccggctcctcccctctcaccccccccggctcctcccctctcacccccccggctcctcccctctcacccccccccggctcctcccctcacccctgttccccccacaccatctccccagctcctcccacccacccccgtgccctctaaggcaaaggggagccccaccgtccacgccgcctggcttccttctgcatctcagaatccagctctgggactttcactttggaaatggctctgaggcccgggcaccgccctgcagccctgccccccccggccatggggcgcctcctgctgctcagtgtccccgggacaccctctggcctctgcctgcacggggagctccgttctctgtaatttcagatccagcagcgcccctgctggccgcgcctccctgcgctagtcccagtccacgcatccttggggcaccggtggcccctagtcgcctccgcatcacggcctcccacgcctcagtccccacccagaaccaggacactcgcgtgtccgcctttcacgtcaaacacgtggcgtgagagcccggagcttcgtgccgcgtccttaagcacgtgtgacaggacgcgcg

SEQ ID NO: 16916 - DNA, 2424 bp, Homo sapiens
aaaaagaaaagaattctaatgaccagccgtgaatgtgtagggttgcagctctattctccaaaactgtaggaacttgacttgcgttagagtgtactctgaaaccaactcgtctctggccgcaggagtctatatgttttcgtaatcttcatcaagaagtttttaaaaggcaagcaaaaacagaagcaaatcatatcaaacggggatagaatggtttccactgaggacattcagcctgggaaggaggaagtcaccagctcgaggcgtgtggattggtttccacccggaacaggctctgtgatggctgaatggaaagaaacgtaaaaagctgtgccaaaaaaaaagcaaaatgctgtgataaaccaaacagggaagggggaaaaaccctcctccttgggattttttttttttgttttccctaacaatttggacactacaattgctctcacaaaggaggttcaaagaccagtttgtaccgatgaaacgcgcaactttgtaatcccaacactttctattttctagaatcttctttgttcattgggtggtttttcagtcggctggaattctatcttctgggggccttccgtctgagatggaagctgtcttgggcttgttgtctcttccttctgttgctccctgcccctccccctgcctttccactctgtctggtgagctctgctttttcagtgcaccatcaagagatgcagccccgtggacatgaagacacaatctcccacggacagctttcccccttccgccctctcccaccctctcctccccttgcgctcgcgctcgcgctcgctttctcactggcgtgctctctttctctctctctctccctctgtacctttctcatagttgcttcagatcttaggtctcaagggcactttggcgcgtagtaagtgctttatgtaagaaggcagggcaggggggctttttacaggagaaaaaaaaatgacttataagagaaagagcctggagtatttttggaaaaaaaaataatatttttatgttaaaacaattttaaaatcttaaaatggccatcagacatagagagctttgtgtgattcatgttttaaaaagaaccgaagaagccacaggcagggcctgagggagcccctggctttcccctcagcctcaggaaaggtggtcaggaaaactctggctggacaagggtcagtcttcggggtcagcagcgagattgctctgcagccagtgagggaggtccccgccatgccggctggaagaagaacctcgcatcttttggtgtgtatgcaccttggcagccagcaggaaagcagcgaagagccgcgcgccctctggcctcaagggagcattggcagaaccataaggtactgcagaagccgtcgaaaccgactgctcggctggattaggcgtgttggctacatctttcccacaaccgtataacgaccgatggtcatttctccaagagcaggcttggcgagtccttgcagagctgacatagaggcgcccgcatgtcacttagtctaacgctgacagaaatgaatgcagaaggaagattttcagtcctgaacgtgaattatagaggtagaacgtcgctaataatttctgccatctttataatttctttgtctcacagaagactaggagaaagatcttttttaaataatctttttgctgtttttaaaaaattaaacaaggctttgtgttcctagaagagcttcatttcagtgaatctggtgacctccatctgcttgctgtcataacccgacacggacttatttttgtcattagcaagggggaaaaggccaaaggacaagggcctcttctcccattggttttcctgtgggcagaagggctgaggaagatggcccagcccgtgggggctgctgggtcaccagcagtgggtagggtgcaatctggtgtgtgttccagcagtgagacggtgttattgtgaaggtggcattcatctgcggagccaaaacccagccatcggggaagggtcagggcttctgtggaacttggaacgtgccaggaccacctgcaaaagccagggtgcgttgatcattctcagatcattgattggcctccacttgggtatgtgaattattcatgtcccagaagaccaaaaagtgctctggttctgagatgagtattttattcgtgttctgtttccgaaacacttagcaaagaaggtcacagtgatgtggagtcgccgcacccatctttgaagatagccagtgtccctggatgaggtgatgatttcccgtcccaaggactctgtgaagtttagagtacagtttgttggggtccaaaagacaccatctctaccccacccaaataaaaatgcactcatctctgtagaacatctgctgtcaaaggccagcctgtcgttagggcatggcttatgcttgacaaaccagtaacaactgtgggatggcgatg

SEQ ID NO: 16917 - DNA, 1320 bp, Homo sapiens
agccagggtctctcccgagggatggctttagtcttgatgaatgtgaaccatgtcggaattgttaggtagaaacctgggctgggaggcctcggaccccaggctccatccctggcttccccagcctgcggccgcaagcaaaaccaagcgcgagatgcagctagcacccttcatatccatccccgttctcagcgggacaacaccatggacagccgttttcagagcctccagcatttgcacaccactactcaccctctctgctgctggcatgttggtagagtcatccctgtaatcaagaaatggcctgtggaatgttattgttcaacgttgtttacagctcttaaaacatggtgaggaatgcctaagtcttagtgaccaaacgtgaccttgaaagcagacatagcatgacagaccttcctagagtgtttggtcgggttcacagtgaccgagagtcaggtccagcacacacctgggaaagggatgctgccccaagggggaccaaaagggccggacgttacagggtgaaaccctctgacccctcgcgacaccgtaggacttgacttttgtttagtctttctaagaaatagatcatggagccaagtgaagtgcactttgtcaaatgtaagggtctgctttgttcttgttgcttttctgttttttaaccttttgttccgccatttaaaaaaagaaaaaaaaaaagcttatgtttcttgtcaaatgcagaaatgttccttccgccactcactgaagttttgcattctggcttgtgcagtttttattgtctgtgtcagacgtacagccagacatgttctctattggcatttttccgattctgttcagatgacagcgaccgccttttcattccccccgccacctgtactcaccctcacgctctttgaagaaaaaaaaaaaaatcaccttgtgtgttgtagctcatttgtttcaagagagaatcaacagatcatattcagtgtcttgaataaattgctctattttgatattagagaacttggtgggtgtgctttcttcctctcgctctggaactcttgggcccacgttgactgaatgactgaagacagagctctgtattttctccagaaggaagtaccttgagcctctgtttaggattgctgtgtgagatagggagctgggagcagaacgcagtgacatggcagtcacagcagccgcctgctgttctgaaaggtggttctgtccagggatcatgttttttagtgtgtttccttttcattctttatttcaggctggctgttggagaaagacaaagcaaatgaatgttctctcatcagcggattggttgaccgg

SEQ ID NO: 16918 - DNA, 1205 bp, Homo sapiens
ctctccatggttttttaaacatgatttgaatagtggttcacggataaactcccctccctgtagtgacagctgctacacgtcttattttgtaggctcattttatctttgtatgtgtggggaccaggggaccaggcagccaggataggattgcgatgggccactttcacaaagcggtggcatcttgtttcacaggcatgggcaacgtggaccttgtggtcgttgagaagctggtgctgggaaagcgatgcgggaggagacaggcggatcactatctccgcagacaaatgagggccagcgcttcctctcgcccagggcagtgggagctggagacaaagaacttgtaacaatcagccctaccaagtgcatgtatgttcttccttgtgaggtccaggtggcatccacggcccgagatgtcaggggaggggtgctgcccaggagtcagatctgtcggttaggtcaggaggagaggctgaggctggcagttttgcttttctctttcttcccaggcggtttgttgttctgtctctacttggcaggggagtgctccttgcaggaaagttcagggcagacatgtagccttttattatgtgtatgtgtgtgtccagtttttttccactgcactgttttcctaggtgcccaggcccacccctggagagtcctgggcaggtcttgaatggatctgggctctggaatcttcacacagagccacaggctatttcgctgggcattagcagcggatctaccgcttgctggccttaagcacaagttcttgggaaggttaaggccagaaaccgggtgaccctttggcattttcctcattaacttagcccagttgggttagtgcaaaagggaggtctgcctgatgccctcaagctgctccggaggagaggaagcagggttgggagggtggggaaggaccgagaaggggacggcagctcctagcttagctgggctcatcctatccactcggtgccagggaccgtggctgttgcctgttgctgtcttctctctgaaatctgcgttaacagctctagggacagagtcatccatttttctcccttcagaggcaaatggctgttaagttcagcttctaaaaagcacctgtaatttcaaacaccctagggaaaatttcttttaaatatcacatcataaattattttctaaagctttgcaattacccttttggctttttccccaaatatgca

SEQ ID NO: 16919 - DNA, 1197 bp, Homo sapiens
aatccagatgtgctgagctgcaacctcagcctcagcaacatcaccgtgggaaattactgtttggcattttggtatttccacagagggtcagctgcgtccaccgccttgccctttgccattgctgttgctaaagcacaccatgccttgtccttcttctcattcttgcagttcttcctcccacgacctgtccagttcctgggagcagacgaacctacagcgcaccttagatcacttcagctccttggggagcgttgacagcctggaccacccctccagtcgcctctcggtggccaagtccaacagcagcatcgaccacctgggcagccacagcaagcgcgactcggcctacggctccttctccaccagctctagcactcctgaccacaccttgtccaaagccgacacgtcctccgcagagaacatcctctacactgtgggcctctgggaggctcccaggcagggtggccggcaggcccaggccgcaggcgaccctcagggctcggaggagaagctcagttgtttcccgcccagggtccccggtgacagcggcaaaggccccaggccagagtacaatgccgagcccaagctggctgcccctgggaggtccaattttgggccagtctggtatgttcccgataagaagaaagcaccatcatccccacctcctccccctccccctctccgcagtgacagctttgctgccaccaagagccacgagaaggcccagggccctgtgttctcagaggcggctgcggcacagcactttacggccctggcccaggctcagcctcgtggtgaccggagaccagagctcaccgatcggccttggaggtcagcacacccggggagcctcgggaagggatcgggaggcccgggctgcccacaggaggcccacgcagacggcagctggccgccctccaaggatggagcttccagtaggctgcaggcctctctgtccagctcagatgtgcgcttccctcagtctcctcatagcggccgacaccctcccctatacagcgaccacagccccctctgtgctgacagccttgggcaggagccaggggctgccagcttccagaacgacagccctcctcaggtgagggggctcagcagctgtgaccagaagctggggagcggctggcagggtccccggccctgtgtgcagggagacctgcaagcagcacagctctgggcggg

SEQ ID NO: 16920 - DNA, 1233 bp, Homo sapiens
cgtctttgacattttggccaactatctgagcgaggagagcctcgcggactatgagcacttcgtgaagatgaagtcggccctcatcatcgagcagcgggagctggaagataaaatccaccttggtgaagagcagctgaagtgcttattggacagccttcagcccgaaaggggcaaataagagaccagtccccggtggaggaggggcacggggcctccgagctccagctccgttcccaaggatactcgtgaagaccccatctgtgttcatggcctggaaagagacttctcccatagcaaagaggctgttataaaagcaataacttttgtgtttgtgtgggatgatttatttaattttttagtttcccctttgattgctgagagccattttcctttacacataactacacctgacaccaggctctgctggatgtgagtttccactgcatgggctgtgggctgggcctgtggtgcctgccgagtggtcactgtcagtgggaaacccgttgttcctcccgtcttcagatgctgagccaactgcttggacagcagccagcgcgtcatgacgtgcatgagagggggaccctggtgctcatcttctcttgtcattcatccaggcatgggctgccaggttttgtccctgctcgttcaacagtgtgagcatttgtctctgttatctaatgatgttctctgacccagcagaaatcatcatcatgatgatgataatttattaactttttggaagggtgaatagtttcctaatggttaaaaaccaactgtgaaaggaaccacctgtgtggttgggttcactcattctcagattaaattgccacttaaagaaataacgtgcatgctttaaaaaacacagtcacgcaccaagcaggcaaatagctttagtccttctcacctcacatcacagttgttctgcaaagtaaaattttttggttaagagcgtgtccagtagtaatgtgcttgttagctgtttctcaagaccaacagaagattttttcagttactttccccccatgtattttgtatgcatatgattgtccgtgataattggctacttttccattgtttcctccttaaatcgtttagcatggcatgagggccacattccatggacgggaagaccccttcctcttcagaggtcccgtggactacacagctcctgagcttgatctttttctgccatgaagtttaaagattctatgcccatttccttgattgaaatgg

SEQ ID NO: 16921 - DNA, 1424 bp, Homo sapiens
ttaccaaagcagacgcgtgcgcgtgcacagatgcacacacacagatgtcttaaaagactagaatccacacttcctgagccagaggggccgtgttgacggtaatgcattctctatagagccaagtccaaactggcaagctcaatgatgcaggcaataaaccgcctttttggcagcctaccaatgccaaaaggataaatgtctttccaaaagtgtgtattcctgttaaattaagctcttgctaacttgaaaaatccctgttctgccagcgaagcttcctcctcctctccagctggtagtcacttgcgtgaatgctggtcagtctgaaaaggtgaagctggctgtgcacttacccccatctttctccctcggggagacgacccaaggaatttcagagtattttgtttggcagagcttttacctgttattctttgccctcaaatacagtattgtggtcattttgatgatatgtgtgtaaaatgtgaataatccaattggtgtctgtactcagccttttgatgtctttttaggactttctcttctacacagcaatacgtcgtgctcgagtatccttgtagcaaagcacatagagccagctgtcctgtcagttcccctgtttgcctctgaaacgtctggttagtggggacccaaagattctagtgagtcaacatccataactctgtatctagttgtattattcatagaaaatcaatctggtgctaatggttggccctggtgttgttgggtggcagctgctccttcgccctcttgtagtgtggctgtggagggctctgcctatggggggtggcctgtggcttgtatccttcagtccaccacagcaaatgtgtgtagatttcatgctcgacacttaccactcacctatcaacagatcatcctgcttgactgtaacaaaataaatagtgtctcttcaagtgaatggagatgtctttgatttacctactttacagcttttgtaaaaaaagaatgtcctcaccatacgtcagattcttaagccatctgagtaaaccgtgggattgattatatgtgtgtaatttatttacactagtcggtttgtggtgaggaaacagggaccaggtcgcatcacttagctggtgccccagtaatgctgtgtaacaaactgtaaaatgtcagcaataatctgtgcaacaaagtattgacttagctcatgaatttgtagatgagctaattcgggctgggctctgtgctgtgtgcctctcctcttcctcatgggaccagccgtgtggctggatgtgttcatggcaggggcacaagacaacacaccctgtcacaaaggggcttctcctggctttgtcctgtcatacctgctaaccttcttctggcaaagcacatctcctggccaaccccggcaccaaagggtgtggaacaggctccaccttttagtggag

SEQ ID NO: 16922 - DNA, 1148 bp, Homo sapiens
ctttgggttacagcccaaatctgaccctctacctatatttgtaaataaagttttattggaacctggccatgcccacatgtataagttgtgactgttttcatgctacaatggcagagttgactagttgcaacagagactgtatggcccacaaagctggaaacatttaccatcaaggcctttactgaaaaagttagccaacctcccaaagtgaatgcagctatgaaactttatcttgtttactttttatttgacaagttttccttcatgcacaagaaagtattatttgtttaacctcccaaacatattctcatgatctcatgataaacacagaaagtccatactggctgactctagtcacactccttattaaaaacaaaagcaataaccagccaatcagatattctttagattggggtcaccatctctaggatagtagtcctgatggacctattgagaaggacctgcttaactgtcaaacatctcctctgaaatggtatcccagttgtgtgtgcttttccactgataagcattcttgacccccacagctcccaaccctcccacaattagagaagagctctgcacagcttcatatgacaccatcactgtgcattggacctccgatgatgagttcagcgtggtctcctacgagctccagtacaccatattcaccggacaagccaacgtcgttagtgagtatctcatggcctatttatttctgtctttggtggctttcttcagattgattgcattcctgaatttaaacttcaaaggaagacaaggaaggaaagaacacacaatatttattgacttgtctttcttgaacaaaaaagtgatagcactcacttgtactacattagtaaaaacagctggctaaatattgatgaaaattaatgacctctagcaaaccacatggatgttaagggaaagaagccagaaacaaatatatagagagaaacaaatatatagagagatacatagagagagaaacaaatatatatatatagtattaatccacatataggttcataacttaaagatcaaaataaactattttgcttaaagaaacattcataggtgttaaaactataaaccctgggcaacctggtgaaaccccatctctacaaaaaatacaaaaaaaatacaaaaat

SEQ ID NO: 16923 - DNA, 1253 bp, Homo sapiens
tatgcactgttcacttttgacttgtgttgtaccttgcagtttatagcagatcattttgttttcttcctacttagcttaagtgggaagcagtctctcagtttttcctttacctgcagtattgtctgtatatttcatctcgaaaagcctgaacaacctctgaaaaagagcttttaaaaagtgatgaaagttgcttttttttcttactattttctcaggaatactccagagatgtaaagcctgagagtccatggtgatgctcaagagctttcatctggccaaatattttaactaaagctgttcattataaataagaggtgattataccttttttaaaaaaagttaccattatttctaaagcccctatggtatgattgtgacctttaacaaaatgcaaaggtatacactggaaaggtactcagcaaaattctctccaaattctgatttatatgaatttcttggactggatagagtactttcaactataccttcctttggaacataccttttaaaaaatgttccctttaaatcctgttattctaatatgtaactctgctcccaacaaacaggtctcctcattgtccttggcatttgacaagttatcccaacttcgaatctcatttcttcctttgctggcagcctccacccttccccacatcagtcggcctaatccaaaccttgaaagcctggcttaagtcccagtatcagtgatggtccccctctaaaacatgattttatatttggctgagtgttaaaattcacaagatgagcatttttttcccagatggagaacgcttcaactcagtctagattttttttgtttgttttaaggaagctctaagtttgccattgaaactttttgtaccagtaatccataaactggttgttctatttatagcagcatgttacaaatgactgctttttttttttaactgtctatactattaaatcctttaatttatcctgaatgctgtagtgttaaattagtggatgaaattggcagtctgtgggtgattaatttggtatggatttgtcagttttgtgtggagtttaagaaatagaacagccttaaactctacatttcaaaatacttgtatattttaaaataaagctgattagttcacaggttttgaaaattttttggaataattttacacttaacgattgtttcttcagacgtattatctttataaaaccaatgctttatgatagaatgatttataacccagcacacatatgtttattgcagcactgtt

SEQ ID NO: 16924 - DNA, 1284 bp, Homo sapiens
gggagcttacattttgcaagggtacccaccatttcccagtaaggatggctcactgcataaactcttaaacaattgataaacaatgtggttcatgctgaatgcctgtgagtctgacattttggtacgtgctaggcagagggtgcttatatgaccagcccacaatacaaaccctgggacttgagtctctaagcagcttccctggtagagagcccttcacacgtgttgtcacagctcactactggggcattaagctctacctctgactcccctcagggaggagtcttggaagcttgcaccctgtttcccccaacttcaccccatgcacctttttccctttgctgagtttgctctgtgtcctttctctgcaataaattacagccatgagtgcaactattaggctgagtcctataagtcatcctggtgatcatcaaacctaggggtggtctcagggacgcccaagatgcaaatatgcttcgatattaaccgatggcagttttcttttcctagcgtggagattggtgaaagcgtgagaggggaagatgtctacatcatccagagcggctgcggggaaattaacgacaacctgatggaactcctcatcatgatcaatgcctgcaagattgcgtcatcatccagagtaactgccgtgatcccgtgtttcccatacgcccgacaagataaaaaggacaaggtaggagaggtgtgtgccctagaaacctgctgtgggccactgtcaatgttgtttttcctcatttatccccttgattagaattatctggaaaatgttggctttttcctttgatgatcaagtaaatatgctttcttattttgtttgttgaagatttggctttgaacctaccctgacattaatattcaaagaaacaggtaatgcatatttttgcaggtattaaaataccattattgtccttgttataatgaaattattgtatgtctttgtggtggtggatagaactaaatacacacacatacatgcacaagagtacaagtcaaactagagcacatctgaatcagatcactggattgtatcaatttcagggtcctggctgtgatactgtgttatagtttcacaagacgttaccacagggaactaggtaaaaggttcacaggatctctgcgttgtttcatacaactgcatgtctatctacaattcccccgaaataaaaagtttaattaaaaaaaaaacccatgatctctttttaaccttttaaaaagaacagaaatagtatcattgaattatgtttttcacaacattagcatcagagg

SEQ ID NO: 16925 - DNA, 2227 bp, Homo sapiens
tgacccctgagttagatgatcacagttgtgctcttaaatgacgcagtcaccgccttttcagaaacagaaagaaaaaccttccgtataatgattaaacttaatttaaaacaacaaatgcccctggaaaaggatgtctctggttaacagtatccctgaaaagccttctgtctctgcattgaaaatctcccttccaggatcccatatgggtctggttcaacgggttgtaatttgaagacataccccaaagctgtctgtcctctcaaaagtgtcggaagttttgatagcaacacatcatgtatgctgcagaaattgtttctcagctttccagcttttcaatgtttaaagaactctaactaagatgtcctgcttcccttctccctttgtttttctcattggcatttaggtcattgacatttccatgatcttggccgaagcaatccgaaggacacacaatggggaatccgtgtcctacctgttcagccatgtcccgctataaatccagaatgggaagtgtccagcaagcctactctgacttctgacttgtttttgttttctggatttttagctgtaggtattcagcaatgataggttaatcactggcaaaagcatcagatctttgtatatgctaagatttattgtttccccttctaaagctcaagatcatttctttccagtttttggggaaatggtggtggttatttggtctttaagtgaactgtcttaaatgagaaacgtttttgtcattttgacttttaacaggtacaggtgatctcttcctttgttctttcagtactttgaggcgacaactttcaagtatataatttcattgtggaagtcatagtttatatatttcgaggttgccaaaggtgacttcagattaaagccttctgtgtaaatatatactgataatgcctatggacatttgggtaaaaccctgtatagaattaattatccttttactttggagtgaaccttggaaaatttataattataataccatggattttgaattttccttttttttttttttttggataactcagtttcagataaaccatcttggttactgtgcttaatttggaccaaattttatttagcttaatatggacactgacacattttggggggtatacattagacatatcagagcagtgtatttctggatcattttttaaatgacctcttctaaaacataactgtcacttacctgaaatgctgcatcctaaaattccaaaattatattgagcaatcgccaaggcctaaagccaactgacttaaaggtaatcatttcagctaagattaaatttaaagcctaagaatgtatagagctagttttaaaataatgatctcagatttttaaaaaggatataggaacctgcattgtcattctctgaattaagaactgatggtttctatcattatttagccccacctttgtattttaaaatccttcagaatacatttatgaaccaatgcgactggacttagccacacacaatggaaattcagaccttgactatttggtgtttccagttcacaaaggtgatgaagactgtcttgggagcagcttaatcccaaaatttgtacatttcttgctgctcctggcgtggaaacttaagtgagaccaccaaatacattggtcctgtccaattctactgaatgggggtggacctggcatttatctggccaaaaacaggagccagagaaatatgaatataccaaagttgtttgtttagcctccaacttaaattacattagtcaacttatagatactcatatgatcacttttctttttagatactacatcaactagattcaggagtatatcatttgcagtgcttgtattggtttaaaatgtaagattttaagatcctctaacactgtactaaaacatttcaataaaatcattctgactgcgttcatagtttgtatgtatcattgtggagtaatatgttttgacggagtgatgtgttgcagtacctgaaaatgtttgctactttacgattataggccagcatacaaaattacagaaaagccagaagttaattgatgtcagctgttttccattttgaaggtgtttcttcctgaagaacttaccagcaatcgcctttcctcaaagcgtaacagctgtgccacataaggtgtccacgttgttaattccacatgtttcctataaaattaaagatggtacagtgtgttcacgcatcagagtagtgatgttcaatat

SEQ ID NO: 16926 - DNA, 1381 bp, Homo sapiens
ggctgagatcgagaaattcgataagtcgaaactgaagaagacagagacgcaagagaaaaatccactgccttccaaagaaagtgagctccgacccacccccatctttagaaaggctgggtgggagcggccggtgggagggcgggaggctgggagcggccgcgggaagaattcgggaggggggagtgcgggggaagagccgacagttgatgaatgtggcttgcaaaggttaattaaaaatggttttgcagccaacaaacacggggctttagtaatttagtaatggaatatttaatatgccatattaatatacaaacatttatccattaaaatgtatttctatttagtatattcaatatacatattttattccattgtggaataccgtgtagaatgtttatgatttgaaaagatgctttaaatgaaagccctttagtctgtactgaatcctttaatcatctccctccatcttttttttttttttttttctggtcacagcgattgaacaggagaagcaagcaggcgaatcgtaatgaggcgtgcgccgccaatatgcactgtacattccacaagcattgccttcttattttacttcttttagctgtttaactttgtaagatgcaaagaggttggatcaagtttaaatgactgtgctgcccctttcacatcaaagaactactgacaacgaaggccgcgcctgcctttcccatctgtctatctatctggctggcagggaaggaaagaacttgcatgttggtgaaggaagaagtggggtggaagaagtggggtgggacgacagtgaaatctagagtaaaaccaagctggcccaaggtgtcctgcaggctgtaatgcagtttaatcagagtgccatttttttttttgttcaaatgattttaattattggaatgcacaatttttttaatatgcaaataaaaagtttaaaaacttagctggtgtgtctgtttggtttctggaaggatcgcggatgaaacctttgcaaagaggcctacctcttggtccattggggagggacaagcatctggtgactggataaattcccttatggcatagaaatgggtttcacccaggtatgcaaaataccttgtctatactaggagatcattttctcaggctgattgaattcctagtatgaattgtgtgagagctttaataaaaatatctttgcagttcttacgggttttgataagctgacattgcacgtgctcaagaaaatgaaggtgataatttacagcacagtatcttatttcagggtatcaaattgaacttggttatttaaccaagtgctagcattaacatagatgagtaaaaattacatttttagcagctgcgttaagaaggaatttaggacttgagcttactcatt

SEQ ID NO: 16927 - DNA, 1561 bp, Homo sapiens
aacacttttccttcccagctgggtgcggaattcaaacccagatgaacaaatgatgacttacgtaatttgtaacgaatgtggggagcagtggtaccatagcaagtgggtgtgctggtaactgtaaatcagtgttctcttaacagataaccggagtgataccttttatttgtacaacccttttgtgcttttaaaaatcttatacacactactctctaaaacagaaaaaggaggaaagaaagtcgttagctgaagctgccaccaccatccctaaaagttacagtttggggagagggagtggatgactatttatattgtgccttgtggccatttagtaccttactgtagacagagtgtgggtgagaacagcccagcataaactgggagactgtgggaaatgcattcccaggcctcacaccattgaatccgaatctgcattttgacaggatccccaggtaatcttccaggataggatagtttgagaagtgctactttagcaataggcctgtggctctcagcagtggctgcatattaaaatcatctgggaagctttgaaaacccactggtgctgagaccccaccctagaacaattcagttggaacctatgagatgggacccaggcatcaacatttcttttttcattcctcaagttattttaagatgcagtcagagttgagaactactcagaaataggctctcatttgatcctttttacagctctaagacaagaatgttattccaggcacttcacgaatgaggaaacaggtccacagaggtgtggtgacatgtccaagtgacacaaccataaatagtaccaattctgacagatcccagattttctccctcctgactcactgagactggctcaatatcgacttctgagaaatgtattcctggaggtcggggacaaaatgaagaatgtgtttaaactccaacattgggtgactagatcttcattcttttcccctctcttttctcatttataggtctcccttcaaccacaaaagtcaccctggaactcatcccgcagttagaattttgtttggagccctcttgcttagttgaaggagtttcgtagttgttttttgtttttgtttttgtttttgttttttccccctgtgaacaggtttttcgggggtatgtaaactctaggatgtttagtttctgatgtcaggagtcttcatgttctcaaggacaagtgtccttgagatggacattaatggtcattagtctgtcagaggaagcccatcactttagcctttgaatgtagtaacagacgtttatctaataaatgaattgaagataaaattacctctttgaggcctttgcaaacagtgtttaaccagtttatataattgtttgactacaacacgccttctatgtgattatggctgattttttttccttaaaaaactcatggaatgttcaccgttttatagttttaaaaagtttactttggcggtctctacaaacctaccatttcactttctcaccagttcttttctcctaactctcttcctttgttggagctctgaaggcctaactgtgtgtacactttacctgc

SEQ ID NO: 16928 - DNA, 1146 bp, Homo sapiens
aagctgggattataggtgcgggccaccacacttggctaaagctgattggttattaaatgacaaaaacacatattgtaccttgaatatgtatggactaattaattaaatcccacagttagaaacagcattatagaagatttaagcacataagtacacttatttgttactttgtaactaataatatcattatttcatcccaggattgattttggctatttatcacctataaccattgtttgagtgtttattttcagtgagaaaccacttccctcttgagactctcccactcccctcagcccaaagcacagtcaattctgctagtttcaatatgctgtaactaggtcagttcataaaatacactgaggacttctggctctttccttctacttcccagtagtgatatcatgtagcagttttagtctgtggaactagacacatgtgattttttcctaaatttgttagctcagctatggtagtttatttactttttatatttttgttaatttcaggaaccagaagctccaggaagaaaaacataaaagcataactgaggcacttaggagacaggagcagaatataaagagttttgaggagacctatgaccgaaagctcaagaatgaacttctaaagtaattgtttagcatttttaaataactaatatgtttaaattaaattggtagaaacataacaaaaactgacaaagtagtctgtaacttaggcaaactttagtgtttgaaaaaaaaaaaacatagttttatcgatacagtcaatcctttcctgcatttgagttaggatagtttttaaaagataagggccgggtgtggtggctcatgcctataatcccagcactctgggaggctgaggtgggcggatcacctgaggtcaggagtgcaagaccagcctagccaacatggtgaaaccccatctctactaaaaatacaaaaattagctgggtgtggtggtgggcacttgtaatcccagctactggggaggctgaggcaggagaatcacttgaacccgggaggcagacgttgcagtgaactgaagttgtgctactgcactctactagcctgcgtgacagtgacaatccatctcaaaaattaacaacaataaaaaaatacagagaagcacatcctctgcgcttct

SEQ ID NO: 16929 - DNA, 2371 bp, Homo sapiens
ggaggggaacacatacatgtcttgaaaataaactgctagaataaagaaatgctggagaaattgattataagagactatagctatttagtaaagtaagtaaaggcatatccattgtgtaaattaatagtttaaatataatttattttttccttttgatctgaatacttttaaagcttaagttttatcgtgtaaatacattagctaaactgaaaagtataagtaacatgctttgttgcagccaaaaaatgtaatctgcttttttatgacagaattattatagctgagctgacttactagcttttctatactatgtatatagaagaacatgtatattgagaaagaaaacatacttatatagaggaatttatgtaaccatgactttgtaattttgagaattcctcccagtgatggtcagtattcttttggaatgtaaaccgatttaatgccaaaccaccttaacctttgtttctcagtgttccttaacagcctgccttttattaatctcaggcttttttatgaacactctcatttcagtagaatttggaaaactaagcgtggttggaatttctttgaattctgttagtaatgcccaaaagaaaagtctcaagcagtccccctatccagtcatttttatggagtttcatgttgtccactatagctggacactgaaccttttgcctaatttattataaaggcctgaccctctattgtcccatcttcacccccattccagagcagaggagtctctgtggaccatgaattgcactgtctccctcctcatttctaaatgaaaggtattagatataaatttttttgaaaggttagttgtttgagatgctaagcaggataataaatttagattttaaaatgttccctgtaaaagtcagcccatgacaaggaaatttacaaaatactagagtatctagaagggtgaaaacaaaaaaaaataaaaagaaacacagacgcccaggtgtcagctctccgtttaaagaatgaaaaatgtaactcatgatgatctgtgaaaccttcaaactaggaccaattgacttacttgatattctgcctttgatatggtagtacccacccggtattcctaaaatcctaaaaagatacaccttgcagtagcagaggcaatgacatgagtttgttttctcattaatatgaccagtttgggtctatgttggttcacatgtacatctactttatatgaaagaaaaaacagttgtctgcctgtaaaatgttgagtttcgattgagccatgtttggagattttattactattctgaagggtagtgttgttggttttcatcttcaagaagttgattccaaaactgagttatgaagaatgatataacagttccttcaaaattggcctaggaaataaaaccttaaaaggacactggtgtgctactttgtcttaatttgggcttttctgtttcagtttgccacctccagctgtgaaatggactgcagtccaccctaagtactgtgcacagtatctccctgtgtgtgtgcacagtggcttccccttacatggtagatttttggccttaatataatctaatcccaaagtagttgtgtatgttttctgttccttggcaaataaatgaagaaataattagccaagattgaaaatgtattgtcctaacggtgtccctttaatgtttcatatgaaaaattatgttgacccactaaaatatccttgctcaatgtctggtcagttgaatttaataacatatcttgttaatgtttgtgtgtctattaaatgtgactaagcaggattactgaaaattcactataaaatcaaaggcatctaaacgtttgtacttgtcttgattaatcatatatttacacttgatttttttctgtcttcatttgtttttatttaatcataattgcatgatttttttggtactctaatcagtaattttatttttaatcatgtcattacctattcatgaccaaattaccaaggaaccaacatttagatttagatatttgttttcacttaggaatggaaattaatagattttccatgaaagcattagtgaaatatcattaccttgatctgcaagtagcctaaaaatgcgattgctggtaaacctggcctcaaatttcatactaccataactgtttttatatattgccactaattttgactggatttaatagcactttattgtacaactacaaaaaaaaatatattcctagaattgttgccagtgtaatttctctaatgttctggtgcttttcatatattttcagtatttttattactatattggtattttctttgtataaattgattgattaaaagaacatgttttctattttaatatgttttagaaaaataattacatttatgaaataa

SEQ ID NO: 16930 - DNA, 2159 bp, Homo sapiens
tcaccagatgtttacaagttttctttaggggaactacaacaattatatgaactgttttatatcatgttcatatacatttattaggaatctaaatcatgtctttgaacatttattaggttcactcagtaggtgttacatgtaattaacaggttccttgagtaagatagtccatcagttaccagcacattttgaacccctgctctgtgtagaatgttgaactagatgcttcccgccattaaggaccaggggtgcattcactctttgtttaccattcaaatggcttacttcatcataattgtggttgatatgagatcaatatccaacatgccaaaaatgctcatgccagttaatgccaggaaaaaaatcaccgacacactactagtactttgttcctgttgtatgcattctcctaggtagagcctccatcttcagttgtgtttgtgaaggtattttttgctttttaaatactggggaccgatatcactgttgatagtgcagagaaaccctccacatttttcagtgcataattgagttttctataaatgccttcgtgttttctgagcagaatgtacgaggtgtgccatcccaaaaccagctgctaccctgtccttttaatgtaagtcactccccttcactgtggcctcgctgatgtctgataagtattgtcagtgtgcaaaaggctttacttcagaatggtttatttatagcaaactaagttgaaaattttagaaacagtctttgtgggtggatgttattaactgtcattgttgttgcccagagccatgggttttttaaccccaaattatccacatggtgtgtattatgaattctttgaactcttaaggtttttgtgagaaaaggactgtgaattcaaaacaataaggcacttgtgggtgcactacatagattctgacagtgttgtgattctgtataggatttttaaaaatgacaacattcacaaaatttattactttttaaaaaataacatgcctattaactggttgcactgatataaaagaaatatatttgtgttttgtttgtactaaaatgcaaaagcaagagtgcaatttttaaaatctagaagttaggggttttgttggagaaaaatggactgatctttaaactattcagtcttactgggatttttatgcatagaaactcacatataaacatgaaataaacagtgccagtattcataggaaagtgagaaactgtaatatttggccattattctattcaacaggttttagaggcatgccaccattttttccttatatttttgcttaatttttttaaattgtcatttaattcttaaactgtcatttatttgagatggaaataagatctaaagttagttgcctttgcctgtaaaacatgtgatttgcaaattattatttttcttttttttaacaaatggaagtaaatttgtttcacgtaaatcttaattttcaacctttctggataccttaattgtaactgtcagtttgcactggtcggtatatggaaacacattgctctaccctgctacttagttgattttaaagtgaatttacagtgatgagaaatttgtgaaaaatatattgtatttcttttgatgtttcaaaaggttgcctatgaaaaactgatttgttaaaacatgctacatgtccaaaaataaagaccagaatgacattttgataattttctgagtttgtcttattttatgaacagactattatttactagtggaacaggctatccctgcccccgacacattctttttcagtgcaatttggatgtgttgcttggtctattagtaaaacaagaaataccctttgggcgatgaattactctgtcattttttgtttctagaatatcttctctctctcactcatggaatagcgagttcaattgtgcctttgtttccttacccaaataagcccttgtttttcattgccctagcattatcacgtgagacaaggaaaatatctacaaactatactgtgtatgtgagctacataattatgctttctactttgcccaacacaaatttgtaaactttcttaaaacattatgagacttgtgattttctttctttctttctttcttttttttttagctcatcagctattagggtattttcatttatttatttatatatttttgagacggagtttcgc

SEQ ID NO: 16931 - DNA, 2701 bp, Homo sapiens
aaatatttaggaattctttgaggattaaaatgtaactggcttttgtcctcagatacgtttgtaattaatggttgtgtaagtttagggatttgttagatatttttcttggaacagtttacatgattttgtagttcaacatttcaaagtttcaacttgaataaatattaaaatgaggatactttaaagacactcaaataagcaattttaaacttgctttctggtggggatataatccctttgagagtctgaaggatgatgggctgtcaccccaggaaaatttgcacatcattttgtttctaatttcagggaactctcagagcccctagaagtccttctgtagacactcaaatctggagagttcgttaaaatctgtcttgaggatttttaaaaaagtaatatcctcagtctcagtcaaattctttggattttttgcttttgtaggtataagtaaacggttaaaaaccttcattgctacttaaaataccagatgagtgactacttttccagtttttattgggaaagatttttctctaggttctttagtttatgtaatacaaatgaactaatgaatttaaatactggtggaaggggaatattctaattgaatttttggtcaactcagtattgaccagatgacttacactgaaaatcttttcataatattagtagtaaatatagtgttttaggattttgtaaaatttctggaggatgtctgtcatcattttgaacactgtatgtagtaaagttagaaaaaaatgaatctaaagtcttgggcattgtttagaagttaaatattcagccttaaaccaaagaatgaaagcaaacagaaacttaagttttagttatctttactgtgagctaaatgttctagaaatctgattgtgtctgtgtcagtttgtatactgtgtgtaagaatatatgcatttcttttgtagccacgtcatgaatattttaatgtccctgtgtactaaatgactactcatcgagtatgcagaatttcacagaggaaatagaatgctgatatacatatgaaagaaaatatcctcagcatggtgatttattgtcttgtataataatagtagaacattttagaactagtacttttatgattgtatttttttcctgttcacattccaaacttttctgttttattttcattctatatgtgatcttgatacagctcattcctttctgcaactgatttaatctcatcttgacaaaatatgacctagaagtgttttgagtaatattaaatcttaaacacatacatattattaatgaaccatctgtgatttatcttataagaggaaaacatgacaatcattaaaatgtttaccaaagaaaatatagctgaagtgctaggtcaaaataagcagtgccataatatatagtgtagtttggtcttcaaatatggaggttaaaaaaagaaactattttgtgtgattatcttacaatctgtatgagctaatgtgttctaatgtatcacataaaagtatatgtgaaaatattacaagaaactaaaattaatttgtaccattatataatatttaaggttaaaacattcagtattaagaaattttgtagtgccacatttattgaatcacatttgtgctatataataatatcaaacaatccctttaagaacttattagagagctatgtctgaagtctgttctgcaatatctgttgctgaataataactctttcaaagcattaatgctgagtttatatagttcaaaaattctaatattcattcagttttaatacctaaatacttatattttactagtgatggcattctaatatattaagtcctcatttaaatacttgatactttgttaactgtggcattatatttctgaattttaaaacctttaatattggtaactattgcatattcttttaataaaacatgcagcatatttttttataaaaggaaaagaattcattgtttatatctagagagcataaagcctaagttaagtaagttattaaacaataacttcacaagatgttcaaatcgatttatcactgaaagaagatctatgaaaatgtgttttgaccaaacttagtattaggcaggtacacagataagattttccattcttaacattctcactgtaatgcacgacatttgaagcacctggatgtgctatcaatcaggtgggaaatttagcattatatattggaagcattgagaaacattggtctttcatttctatttttttttcccctcctttcctcctcctgccccacaatatattattcatctggttttaatgctacataaatatgcattgtctcatgcctgtttgtgttggatgccttgtgctaagctgtaacaaaatgttgcttcttttgctgtctgtatacagctgcttgctttaaattagtagattctgaaatagctttccttgcatgtctaaaataaaagtattgcatgtacttcgtctcatgtgaatgactttttcttttccatccctcataaaataacgttttatattttcatttttctaggcaaattttttaaattgtggttaaaaacacataacacagaattcaccatcttacgcagttttaagtgtacagttcagttgtgttagttaagtttattcacattgttgtgcagcagatctgcaggactttttcatctggcagaactgaaactctatacccattaatcaacaattccccatttctc

SEQ ID NO: 16932 - DNA, 1122 bp, Homo sapiens
tgggttttctgttgaactgtgttgctgttgtgtttgcctaggtctgtgaagtcttctagccaagaaattttcatttgccactacttaattagcatttgaaatcttaggctgatttttccaatttaactctttctgatgatgtcagagatcttaacatttttataatagtgttttgaaagaaccttaacctattttcattcagtttcttttcccagtggcattcttaattgaattgggtttctcagttagtatgctctgatgccacaaagacttatcgtaaaatatatattgaggtcagttgtgagaaattgtcacaatttcttcataacattgggaagatttcagaaaaaaagttcagggtgtgaagtcatataattggttctgaaaatagagcttgagcatagtcactagtgattggaccaagcattgcacgaatggctgaatacactagtttaaaaaaaaaatggatagtcaagtttaccctcattttgtattgatttcagtggtattcttgtgcctggaggctttggaatcagaggaacattgggaaaactccaggcgatttcttgggcaaggacaaagaagattccttttctgggtaaaactcatgtttattgaccctaactatgagtttattagatttttgacacctaggaggggtaacactaaaggtttgttatcgtaaaggtgtgaactcggatttgaaagttcaggtgccaaatagtctgctatagggtcaacaaactatattctaaatttggcccacagcctgtttttatgaataaagctttattggaacacagccacaccaatttgtttacatattgtctatggctgcttttgtggtccaacgtcagagtttcagaccctacggcctagaagctttactatctgaaagaggctagaatctttactatgtgaccctttacagaaaacgtttctcatcctaggagaacttgctgctattccagctgggtagcagaggctgggagaaggctccatctgcaactgtgcttaccttctccaattcccacctcagtctccagagtagctgggactacaggtacacaccactgtgcctggctaatttttgtgtgtgtgtgtgtttttttttttttaaga

SEQ ID NO: 16933 - DNA, 1108 bp, Homo sapiens
acaggcgtgagccaccacacctgacctgtccaatcgttttgtgtacacttcttttttttttttgagatacagtcttgctctgtcacccaggctggtatgcaatggtgcgatctcgactcactgcaacctccgcctcctgggttccagcgattctcctgcgtcagcctcttgagttgctgggattataggcacatgtcaccatgcccagctaatttttgcatttttaatacaggtggggtttcaccatgttggtcaggctggtctcgaactcctgacatcaggtgatctgcccgcctcggcctcccatagtgctgggattagttttctaattaaatgaagctaaccttgtgcaaattctgatgctagctttggttgctgggtttttgtgtgtgcgtgtgtgtgtgttatatcagtgtaaataaactgccagtctctgctgaattttgtttcattcttgtggtggcatatttgaatagatccatctaagtatggtgatttctcatcgccacttaggtcatatgtatccatgatgtttcttccacataccgagttcctgtgcttttagaggaacaaagcattgtgaaatattttaaggagagattgcacctgcccatcggtgattctgcaagtaatttgctttttaagtggagaaatatggctgacaggtaagcgaaaggaattacttgtataatctttaataatttttgagtttgggggtagaactaagacctacttgaaagggtaagcgtgtgtatttggcattttgcgtgtgcacattttggtctggatatgtctaaagatggagcatactgttgcggtgctttgctgtattatttgaagatttctggagcctttgattttgttatacataaaccaaagtgaattaaaggaattcgaattctggaaggaatgtttttttagctctggaaggattctgatttatttgatttatttgctagttcattttttagtttctgaatatttaaaatttttttttgtttgttttcttttttcttttttgagagtcttgctctgtcacccaggcgggagtgcagtggcacgatctcggctcactgcaacctccacctcctgggctcaagtcatcctc

SEQ ID NO: 16934 - DNA, 2042 bp, Homo sapiens
atattctccacttcccatagaaggccacttattctttgaaaactggtgttcatgtttgccgttcaatgaagtcccttgtcaaagacaaggacggtcaattcacgtgtcactttcactaggcagaagtttctccaataccttctggctacttgaaagttactacaaaaattccaccagcaaagtactccaggtttttcaaaagggaattttcattatggatcagtaccaaccgaaattgattttcatttccaaaacaaacactggcaccaacatttttactttgggaagacttggcagagtgttagtcatgatctgttacttacgtgttcagtctgttttctcacccccttcttagttaccatctcttttttaagaagaaaaaagaaaagccacagtattatcaaggtctctacacttggactgggggaaaatttgaaattaagcacataacttttgaattagttctttgtttcaatgttgaatgtggcgcagttatgcagatgattaatcaggctgcactgatggaagttttgactttgtccctggtataatttgcattgaaatgctttatgaaataaaaggttctactagaactgatgttagcacattccactgagcaaaactatcagactgacacttgttaaattgcttactggactgaataaactctgttttgtccagttaaaagggttttctctttgttacaagtgttatttgtaaagtcctgtcacattcatggtcgaaactgggttgaaagaattgaaaattgtccaacagatagatagataggaaaccgcctggagtggaggagggttgtatctaagcctccactatcagtcatgttaattcaaggggccacagtggaggaaaataaatccacaaagtagattatctaattaccatcaaaatgagtcagaagcaaaaaacaccaccctccaacagcctcttaggagtacaccctgttctgctactaaaatactagactcatttccctggtggtgggggggaatgcaggtatagatcagaaatataatccaccttaaaattagtactaatgatcacattatttcacaagaactctgctggatgtacagctcttaacattttattaagccatttgtgtagcccaccacgtttctttgtggtgcttgtcctgtgtggaagattgtaaatcttgggcctgttgcatacttccaagggctttaaagcaatgtgattaacagtacttggcctgctgcttttggcttactttgtatttttagctagatgctattatagtgttgaaaggatatggattctgtctgggatgcatttgttgtcctttcagaacccttcctcccattaccctgtgaataaaaacaaatgggaccccctgagaaggacatcttcctacagtgatcacctcaccagcccagtgttgtggctttgtagcgcaccccgtatctaccatattctagaacactgtaatgctactaggctggcccagaaaaggtttaaatgttgaattcacttaaattgcaattgttgcaccatcatggaatcgtgatgtgtattatttatattggcggtggactccaaggtgtagagaaaacttgggtcttgggtaatatggaccatttcatcctcagacttgttaggagtacatttcttggtcttgagaccagtatttttcagttatgtatgcaactgcctttattacacctggttatcacaattcaattctcaggtgttgcagaaaaatctacctctttcagactgtagatggaaataactgtgaaaaaaatgatgcagatatcttctagtttgtgctaaacacactgctttatttttacagcccacgtctttcatgaggatacgaattgttaagaggcagtctcgttttgcttttcaaagacattttgtagagatttttcactaatgtgaatctgattttatctacttgattctgtatagattaagtaaatatgtatgataaacttaacagcttctgtgtattctttcattatccatgtgaccttaactgtaggagtccaaaggtacca

SEQ ID NO: 16935 - DNA, 1245 bp, Homo sapiens
gtgtctgttctgtgtggtaggcatgagggatacaggaaggagaggtcaaggcattcaaatgacagcaagttctctgaggatgagcactaagtagctgacatttctaagttgttgttaaccgagacttccataacatctgggctaccacttcctctaaacgatgcttgaagtgcctttggaaaacatctcttatgaacagtgattgaaataagtagtgcatcgatgggtggctaagtatacatacggaattacacactggcaaagaatttttcaaaatactggctagcctaccatttccttattgaagtttttaagagagaaatgtaaaaatgaaactattaagttctaaatagattaaattgtttttacatgaccatgtgaaaaccatagggagtttttacctgtgaatttatttggttatctccaggctgaaaatatttacaatgatgaagagtcagatgtcacgacatccgaactggagggacaaggatcttaaacccaaagtacgagaaatgtttctgttgaatgtaatgctacatgaatgcttgatttatcaagcgccaaaaaggcattgtatagtaggaaatgtaagtggggtggcttatggcttctttatcctctgattctagcactttcaagtgagctgttgcgtactgtatcatattgtagctattagggaagagaagaatgttgcttaagaaagaacatcaccattgattttaaatacaagtagcagggtattgcctttgattcaactgttttaagtcctcattttctcaaactaagtgcttgctgttcccaaatatgcaagaataacttttacactttttccttccaacacttcttgattggctttgcagaaataaagttttaaaataaaacttgtgtttttttaaaagcttagtgggggggggcgggggagtctactttttgagtagaaatgggtaaaatggtacctttggactcctacagttaaggtcacatggataatgaaagaatacacagaagctgttaagtttatcatacatatttacttaatctatacagaatcaagtagataaaatcagattcacattagtgaaaaatctctacaaaatgtctttgaaaagcaaaacgagactgcctcttaacaattcgtatcctcatgaaagacgtgggctgtaaaaataaagcagtgtgtttagcacaaactagaagatatctgcatcatttttttcacagttatttccatctacagtctgaaag

SEQ ID NO: 16936 - DNA, 1206 bp, Homo sapiens
ggatattctcctctgctcttacactgacataaaggggcatctattctcagatgcaggtcctgacaaatcagtgtgtcagttgtaagctatgcctcaagtactttgttattaatgccagacatttgggaatgtcttacttttaaatatgaattagaacagatttaaggctatagctaacttcactctcactcccagcttgatatgctttcttgagtgagagagaaaacagcttgcttgccaggaattgtatttgcttgcaccatcagatagatgtatcttattggaacaaaaatgatgagagtgctgtaatagaggttggagaaatgcatcttccacacagatgctaagcgagaaactaggtaaagcgctggtccaaagacccttaacaacaagccagtgggtagcttcgttaacttagattttcttctctttctttggggctcataatgttttccctggtggtgccaatcttgatgctctctcaccatgggtcagccacctcagcccctttagtataggggccctaaaggtctcttgcccattgtctttccttcatacaattagccctatcccccatcctaagcactcattgccaaggagcgccattcctcttagttttctgctggccgttctttgtcctcagccctaggtggaggtccaacttccttgcatcttctcctgtccctgcatacaatgagcaggggctagccggcctccaactctggaggagtttgtcactgtggggaaagggttaatgtaacctttccccttctctgtggaaatctgtccttgttttaactttccagctctgttgccctggaaacgtggtgaaggtggaatgtcagctgtgttaccaggcagtattgcttatagtagaaatgacccaattgttaaattgcttttatgccacaggattgtaaatgaatttgaatacctggtgaaaaaccatagctttgggcttccctgagtgtcaaactcttggtactggcatgtcccatatggggcccctggaaactttagttgtttacaagacatattagctcccgtggggtatggggcttctaagccaagatggaccctatactctctgaagtgcttcttgtctgtttgcacctgagctgccacttggagttccagagaggaggccctggacagcatgtgggctgctgtaaagacccccacagaggagggatgcctgaagctatc

SEQ ID NO: 16937 - DNA, 1156 bp, Homo sapiens
gtttttttcctggagtcaccaaccagctttgggagacacagccgccactcccccagtctacttctttaaaaagcatttaacaggttagtattggcatattcaaattggcagttctttatgtctttttaaattttcattgtacagtttacaaatatacttaatgtagttaacagagaaaaacctttgattttggttaacctttatatctagaaccaaaacagctaaatcccaaaggggaaaatatcagggattgacaacttctataattaaatccatgagaatttttcctcactagagaatttaaaggtgcacctgtagatatcatcttttctcagatattttgtgtgatactctgtggtgttctgttcatgttctatcagtatatctagaaagggaatagccatataaattattttccttttattatttctctgtatgttgtatttgatcatatttaaaggaaaaaagcaagcttataagctttcatgaagtgttcttaccagtttttgataaattttttaaattataggatagaattgtcattttatgcaggagatatttatactacgagggttgtttggatggagtcagattaaattttttcagtgaaattcctattattttaaaactttccatattttcactacgcttggacatttaactaggcattcttttcttacatctctatatgaagatacctgtgtccaaaatttttgaagatatatattgtatgtgtttattcttcatatggtactttaccatatttatatattgttttatacctgtaggtttacacacaagtaaatcttttttttcttgaatttaatctggcactttgcactgccacagaggtgacgatgaactatgtatatagttagatgttttgatttcgtaaaaaatatatgtccatcgtttgctatcaccagtacctctcagcttactcttcaggggatatgaaacaatctgtagattggtttccatacagggaagttctctgtcctatgcaatgtttctaattaatttgcttagttctgagccatttattctgctacactttgaaagatatattagttctgacttattgtttggggctttattttatttttatttttttgagatggagtttcactcttgttgcccaggctggagtgcaata

SEQ ID NO: 16938 - DNA, 1053 bp, Homo sapiens
caaaatgtgctgttactgttaaccctcccccgagattttgagaatcatagctctgatgattatgaagattataaagactaaggtcctagtttccctgaagcttaaattgtgcacatattgcatttttatataaatactataatgtgtattgattatatagataggtcattttaaggtgctttttatttaattttaatgagtgtaataggcactaaaatgaaactcgactgggtactattactgaaaaaatttgactcaaaccaatagttttgcatgctctttagttctttttctgtcttacttctttcaccagttcagtactgtttgggtagctctgaattctggcttttccaggcagctgcttgatgatacaaatgaggtggaccatcagcagttttgcctggacactaatgactctaaaagggtgtgtatttaactcttctttttcatactagatctctaccttgtattccccccttgcaaaccagaaactacactttttttctctggaaagacttctcactgtgctatgcgcttaggaactgcacggtcccgttgccatgctgtggcattcgaggctcgtcacctaggggctggtttcccatgttgtcatccttgctaacactgggatctcagatgtttgcagaacatttctattcatgacggttcttcaaagaagggctagaatatttgccttctacctagagcaaagtaaacctaattgttgaagagtcaatacgtactttttgtactttcccagatttgagccagaaaatacctacagatatctacaaatgttttcaaccagtgttttcgaggtagctctttaatcctcttctcagcttttgtctgttctgacttttcatccaataagctgtaagtgaactacaatctgcatttccagcatgcaattctcttcctgctcacggagggggatgcaaaagttttctctcacacctaatgggccctctcttagcttttaactgttgttttcccctgttgatgaaaaattactgacatcacaaagattgccatccatggtagaaaggactt

SEQ ID NO: 16939 - DNA, 1157 bp, Homo sapiens
gcatcaagtggttagaggccacagatgctactaaacaccctgccatgcacaggacagccccccaaacaaacagtggtccagccccaagcactactagtgctgaggttgagaaaccctgccctacaccatcccaagcccaccagtctgcagagcttggctctggccttgttctgtccaggctacagtactgcaggtgtgatttcttcaacatcacattctcttaagagtcttcaaccactatgcctgaatccttggaatcctattgttcgtttccattgtcttgggcctgctaaaaggtgcatactttggaaggagaccagagttactttataggtgttggagaacttaaattctaggttagcatccttagaaaatctttcatagagccatgaggcttatatttagaagcaagcaacagcctggcagattggcatgatttttaccaactgctcaaaggcatccgtggctttcagctgtgtctcccgaaagaaaatgtctttgttttttattcaagtcatttaatagctctttacaaatattagcatatggcagaccaattagaagcaaaaaagtccgtattggtggttgtgatgtggctgttatagaagtatttgtgctgtatgctttggttaaatctgttttaaaacatgctttaagattcaccttacgcagttgtactttaattctaagctcagagctatgctgtcagtctctagtcacgccatgtattataaagtatgttgtggttgtagagttagccagtttagcatgttcctaatctgagaattagtggactatactaggaaatgctatcccattttccctttccagcccctcttagttaagatcatagtatcctcacttcttaaactagtctttagagtaaataaggaaaaaagccatttattttcttctagccatgtattattgagaatgactcatagtacaactttttttcaaaggccagaggattactttgcaagtgtgtagaaagatctgtctatttctgttcacctgggacctggtggtgactgaactctttcagcaagggcaatggctcaatgtgattcggtgctggagctcagctgggactcagtaaatctgcacgttctctgctggtcagaacatgtttcctggagagcattgcttttctatct

SEQ ID NO: 16940 - DNA, 1229 bp, Homo sapiens
tcacaggtacactctgatatacagttttacctttagaatagaacattttgatgttcatgcttagtcatcattttcttctaaatgttccaggatcagaagttcagagaagcttcacgaaaactagaatttattattagcagcttgctgttgttctgtggggggaagggggaggagctagaaaatgaaaataaaaataaaagcttattcaaaagtttggaatgtaattcagtgaaatatttgaataagaagagtcttagttgtttctttgaaggttctttcaacctataactcagttggcttctaggggctttcagtgaaaatcatcttagaaagatttccttcccccaagccccatctcattgcacagtgaggtttatggatttaaggaacagaggcgatatgaagcattactgatgtgctcctttgcagtttttcaagttcaatattatttgcaatggagttagatcttagagtggtcaacagtgtttgcaatgtagtatgtggaggataataactaccttattccatttcagaaatgtgaccttcaccggctggaagaaggccctcctgtcacaacagtgctcaccagggaggatgggctcaaatactacaggatgatgcagactgtacgccgaatggagttgaaagcagatcagctgtataaacagaaaattattcgtggtttctgtcacttgtgtgatggtcaggtgagtggtaggtttgtggtggaactgtgttatttaggtactgaagtatggcttgtacttattgggctttaccctgccatatgtatcagaagagtttgaggctggtaatgtaattttcttttatttatttatttttttgagacagtctctctctgtcgcccaggttagagtacagtggtgatcttggctcactgcagcctctggttagagtacagtgtgatcttggctcactgcagcctctgtccactgggctcaagcaatcctcccacctcagcctcccgagtatgtgggaccacaggtgcacaccaacacacccagctaatttttgtattttttggagatacggggtttcactatgttgcccaggctagtctcaaacttctgggctcaagtggtccgcccaccttggcctcccaaggtgctaggattacaggcgtgagccactgtgcctggctgaagccagtattttagaattaaaaagtagaatgccaaaacctgctatgaagcttaggctaaagaatt

SEQ ID NO: 16941 - DNA, 1368 bp, Homo sapiens
agaaactgaaagccaggcagaagtcagaaataggaatgtgacagagaagagctggccaatctcctgccattaatgcctggctgggagtgggtggaggcacatggcaagcgtgcctgcacgctggacccacccccttctttaaactgcagcctgccttcttgttcccgagtcatttgaaatagccagctctctgcaggtacgtacctctaaggccatgtcctactactgctgggacacgagcgtcacctccatatgtgaggagaatgtttttattttcattaggtttttaaattagggactgcagttttaagctctgttggcttgaagcactgactctgaagacagctgtgtttgtttcccaggggtggtctcctctgcagactctggagtgcggtctcccagtacagaagggctcaggaggcctcagaaaccaaagacaaggcttgataccaatcagctaagctgtggcagagtgtcccaccacgctacatgttttgttaaagcttctgttagtgtatacacgaattccgctgtgtttacatatttaaaaatgccattgttcaattaatagtttaagaacttgttttaaatactgtcctgagtttcttttgaaacctgttatttataaacatagaactgtgtgtattgtgaaaacagtgagccttggttttgacctcccggaatattaggaaattcacttgtagtcccagctatgcaggaggctgaggtgggaggattgcttgagcccaggaggtgtggaggctgcagtgagccatgatcacaccactgcactccagcctgggcaacagagcccgaccctgtctcaaaaaaagtacacccttcagcacttgctggaatggtgaaacaaacaaggggtatttaacaaacatggaagctgggacactgcctcagaactggtatggtacttcaatttgagaaacacaaaactgatacgaatgtgccttgtagttaatgtttgatatgaacagaaaatagcttcatatttatactgaatgtgtaagtagagaaaactaagttatgtggcctttgaaatgattacaaaattggaatgattacaaaagtcttattttaaaatggaactgtcctcttgcctgataataaatattgtatcttgtagagaaatggtcagcgcgaacaggctgcagcaccagcgctgctcggggtgggtgctatggttggtagaatgctgtgaggggccccgccataatggtctcctcccaaaaaggtggctgggggcaggggaaacaggcatacaaggaattgttcttccttttcataattagagtatttgttcaaagtatactattttaagtcaaaaataatctttaagcactcaataattcatct

SEQ ID NO: 16942 - DNA, 1352 bp, Homo sapiens
ttttgacttaaaatagtatactttgaacaaatactctaattatgaaaaggaagaacaattccttgtatgcctgtttcccctgcccccagccacctttttgggaggagaccattatggcggggcccctcacagcattctaccaaccatagcacccaccccgagcagcgctggtgctgcagcctgttcgcgctgaccatttctctacaagatacaatatttattatcaggcaagaggacagttccattttaaaataagacttttgtaatcattccaattttgtaatcatttcaaaggccacataacttagttttctctacttacacattcagtataaatatgaagctattttctgttcatatcaaacattaactacaaggcacattcgtatcagttttgtgtttctcaaattgaagtaccataccagttctgaggcagtgtcccagcttccatgtttgttaaataccccttgtttgtttcaccattccagcaagtgctgaagggtgtactttttttgagacagggtcgggctctgttgcccaggctggagtgcagtggtgtgatcatggctcactgcagcctccacacctcctgggctcaagcaatcctcccacctcagcctcctgcatagctgggactacaagtgaatttcctaatattccgggaggtcaaaaccaaggctcactgttttcacaatacacacagttctatgtttataaataacaggtttcaaaagaaactcaggacagtatttaaaacaagttcttaaactattaattgaacaatggcatttttaaatatgtaaacacagcggaattcgtgtatacactaacagaagctttaacaaaacatgtagcgtggtgggacactctgccacagcttagctgattggtatcaagccttgtctttggtttctgaggcctcctgagcccttctgtactgggagaccgcactccagagtctgcagaggagaccacccctgggaaacaaacacagctgtcttcagagtcagtgcttcaagccaacagagcttaaaactgcagtccctaatttaaaaacctaatgaaaataaaaacattctcctcacatatggaggtgacgctcgtgtcccagcagtagtaggacatggccttagaggtacgtacctgcagagagctggctatttcaaatgactcgggaacaagaaggcaggctgcagtttaaagaagggggtgggtccagcgtgcaggcacgcttgccatgtgcctccacccactcccagccaggcattaatggcaggagattggccagctcttctctgtcacattcctatttctgacttctgcctggctttcagtttctgccccaccttggc

SEQ ID NO: 16943 - DNA, 1190 bp, Homo sapiens
ctgtgtaacgtagagtatttctcacggtgattagtataaacatattaagatgagcccagaagacagtaaatcccaaaaaccagaagctcagtgaaatgaggatggcagtggctgaaaatattatggttctagctaatggtgaatgatagaagaacccttgaaattcttctctttgaaaaactaaaatagacttgccctaatctgtttgccctgctgccttctggtggtgatgaggggagcgtgctgagggaggggagtggtgatggtttctttccactaatggtttctttatttcacccttgaatggctctttccaagccagaaaggaatatacaagtcatttatcacatagaaagaatccatacggcaaaatgagaacatgttaagggggaaatgacacaatatttagactccaaaattatatctccagcagggatatttgcaaaaacaatgaacagataaacacacaaatggatagatggatagctaatgggggagggttcttgatgtttacacactctaatccttcctgtgaattgcagccgacccccttgttgtgggctgttccccattcggtcctgtgtttttgctcacaaatgctggttttcagttaattaaaatgtacactggggaccttcctcctcccccacccttttggcttaaaaataccattttatggaaaatgacaacaacaacaaacaaaaccattgttttaaggatttgattctgaaacgtgttagcagtttataatgacctttctatattttgtctgttttcatttaacagtttcttcctgcactgagacttccttatttgaatgacttccacattttatgagattttatgtgagcaagtatttggtgtatcattcttatggactaggaggccaccttacctgtaggaagataatgcacaattggctaatagagaacaacatttgatggcgtactttcatttcaagggcatggttatgatcaggagttatgtagtaaatgttcaggagctattctacacatctagaggctttcagagacaggttaatgacagagtttagtattccataaaatattctttgaatcctgccctttgatggcataattgatatactgaccatcaaaggaagaatacacccagaaattaactagacacaaataggctcttccttttaggaacatgattgtgggcagagc

SEQ ID NO: 16944 - DNA, 1326 bp, Homo sapiens
tcaataggaatatacagatgttgccacaggaatctaatctgaaatcgtacaaatggaaatgacgctacaggaggatgtttgggagcatctctctctttttgtcaggagttagaagtgacactaaggcactaatactgtaacttcttgataaaataactttattttttagtagtggaatgctgcaacttttttacacctaacaattgcttttaaattacagtattcaatttaaaagttgtattaactacagtttcctttgcaaaaagtctcaaaagaatcacttgaagggcattatttgttgatgcatttttctctgagcatggtttcatagagagaacttcaccaagtaatattcagacgtttatatgttgaaagttttgcttacataataaaaacaaaaacaagtgtctgaattgtatagtgtctttacatgaaagaactttaaacagtggccttatggtagaaaattttataccagatttttctttttctgatgacattttggcttataactcgaagttttcttaagtttctgaagatcaaggcctatataattcatacatttcatattataagaaggcaagagacaaggtgcttcaaatattccatcaggtagttgtgagtgcactgaatttttagtaatatgttcattcagtttttttccacaactatttgctcttttccaatttcaaaatgctattgtggaaaatatgtaaagattttgtaatctatagtccatcttatttttccctcagggcaagcttgtgcatatcatatttttaaaggctttttaaaaatctgacaaacaaaatctcatatttgaaaattgtactttactactacagcattacacattttgcaagcacatcttatagagtgtttacttttagttcagttgatatgtattgcatacctactatgtgtaagagcaaatggatgggatttttaaatgaaatttttaggccccaataccttatttctttatgttttctgtgttctgcttaacagtacatatacattcccaattacatttttgtgaaatgtttatttgtaataaaataaaatgttgttgctctttctgcttaaataagttacttgccagtttgtgagagcattattttaattttgtttgagacttatagccttggatagcacctctgtttaaacagtgtttaaagcactgttctgtgcttacaaagacagagctttcaaaattaaaatgtgaaggttgataagaacttggtttttcatgactggatgtgaaaaatcttagtacattcagttttcttgtccatatctttaaaagagagggcagccttttcctta

SEQ ID NO: 16945 - DNA, 1487 bp, Homo sapiens
ctctgtctcaaaaacaagcaaacaaaaaatcctgaagctcagtgtgcctgttggggagattggagcgaggtagcaagggccagagcagaaagggctttggggggtcacgatgaggagtgtggaagttatcttgttgccagtggggaatccatgggaaagagtgaaggtgggcctgcagaagacacaggaaggggctgagaagcattgtagagagatgcaggatgtgacacggagaggaatccccaagggctgtggaaatgaggctttggagatcagaggaagatcccagggaaggacctccctcccagatagggctgcctgagaagagccctttgtggcctcagtacctcatgatgacgggagagaggaggctgtccttcgctgctgtggtcctacagtatcagaggcctcagctctgccagtgaggggaccctgagccagtcatacaccttgcctctgttgaatgggctgggtcatgagccattggtgcttccaccagtaagagctgtcagcaagaaggggaggggggcagtgctgccaaaggttctagagcagtaattatctttcctcaaaacacacatttcacatatggtttcagggggttacagcccccagaaagcctgtccttagaccccagattgagaacctggttcaaggagtgtttttccgcattgctaacctccaacttagataaataacatttgttggaaaatgaggggtttagccctaatgactatcatttgtaattttagtagtgatagatcattgagatttcacttgtgtgctactttaattgtttctgaaggggctttttaaaattattcttgtttatttcttggaaaaaaaggtatactaataaaatattcttattttctctgtttccttattagggatgatcagaattccagtttttcaaaggtaaagaatgttcatactgatggattccaaaaacccacacattttataaaatcaaattttagaaaatgtattgaaaaaccttacatggtaagattgcagttccaaaatttgcatttttataatttcttcttctccaatacatcaaaatgtgcagggatcaccaatatttttcacgtttgtaattgttcattaagtatatgttataagattccgttgatgcttaaagttattatgacagaagaaatggtcatttcttacttgatttagtaggattttattggattcattaaataaagctaataaatctagctttcttaagattttttggggggccaggtgcagtggctcatgcttgtaatcctagcactttgggaggccaaggcaggaggattgcttgagcccaggagttcaagacctgcctgggcaacgtggctagacctcatctctacaaaaaaatataataataataaaagaaaaaaattcaaaaaagattttttgggaacaacacttaagatctcttggaacatatttattaaggcataattcacataccataaaattcacccatt

SEQ ID NO: 16946 - DNA, 1737 bp, Homo sapiens
tatctgcaggttttagaaaagttccatacaaggaaaatttgacccatctaaaagaatagtcctatgtaaaatactctatcacttctgttgagaaatactgtataagcccaggaggaaaatataattgccaagaaggtagaaagtgccacagtgtgttgtgatcgttttagtgagagaatagtgctacaaactgcacaatacttggttttccctttgatctcatctggttttgtttctgaattgacacaggtgtttggagaacccgtaaagctgctgatagtcaaatccgagctactagctgcttgaagaagcttctgtcacccttaccgctggatcccaaattattagctcggaatgtaactgtattcctaggtagtatgtcaaacactggccactcttggtagaaaccttgaaactttcaccttgctgggctttagcaaagtttccttttacagttctgtttatgagcttcagctactgataaagcacttcctgaacttctctattatcatagtgaccctctgaataacctgagtgactggctcggcaattcgctttataaccattcttattcccaaagttggagcacataaacatttagatgtcttttcctgtaaaatattctagacatttacccaaactctagttcaacatatactcaacttgcactgtatatctccctgtcttttttgagacagagaagaaattcaggaggttccccatctccagagtttctctgttggaaagcagtatcaagaagcctttaaaaaattgttgttaagctttgccacctgcagaaatgcattgccccacattattcttctggggttaaagtagtaagtttggttgaggaaggaagtcaaaacagtcagtaatgatttctgttctcttatgcatattcgtgtatacatgggcaactgaatctagcaaggactctttcgtgtcacaccttaaaatcttcatgctgtagtcactccagaccatggagtggctttccagctgaatgaatcctatgtctcgcgtgcaggtggttggttttcaatgttcttgctaattttttttctattggatcttgggagttttctttgtttgctcctgtgtttgcccagctttaataaaaccaggcgcaaacaaaaaccatagcattctgaaacaatagggggcccacattggacccagtatgtcactttaatggacttcaagaaaaaatctgaatgggaaaaatgacactagaatgtatactccacacattttatgccatataatggtgtgttttcttaattttgtttcttgtggcgaaatgtggctttcaaattaaaatgaccttttcttctttgaaactttttgttttgacttgtataattaagggtttggaaagattcataattctgagagaggtttgcaaccaggagatacaaagaagtctcagtagtaatcttgttcatgtgcttttacagccagctacatttaagaatgtattagttacagaaattatatgtctgtgtatgtgtctctactcaataaagtacatgcctccacataatgcggtgctgtccatctcggcaaatactggccaagtccctttatgacaggcacacagaaaccatagcatggtctggctttcagaaaatgcctctcatctttcctggaaccttattttgctaaatgtctgttttcttgtgatttgttgtacctcacagcaccattgtgaccatggtgatgcctcatttgcatgat

SEQ ID NO: 16947 - DNA, 1227 bp, Homo sapiens
tggttcccctttaagaagttctaagatgaaaatgcagctttgcaaaatagatctcagtgtcatgtatcaccccaaaaactcaaattatatttgcattaaaattttctcaaagcaaaatgttttatgcttttaactagaaaggatgctcttggttctggagcagaattccagctctcctggttagggcaaaatgccttgagataggcctcaaggagttaatgcttattgggcattattcctagggcagcttctccccagggaggggaggggacaggacacacggtgtttaggttgagagccagtgctagcctagccgcattgtttactctccacctactcagaacacgctggtgtggcagagagagcacgtatgcctgggttttggatgctgagcacagaaagccccatttggtgactcacactgtgcactgaggcagcaggtagtgtggtggggctgggtagttaatcttgttaacacttgccttacacgaactgtgtaggaacggctggaggcgatgatgcgccggtccctggagcgcacacagcagctggagctgaaaaagaagtattcgtggggagcaccactggccattggacccggaggacatgatggtgagtgtagggttgcccctgtatttcaggtcctgggtgggaaataatggagcaggcaggggattatgggcaccactgggtgtctccaggatctgggggatgctttgcacagcttttcagaggcaccactttcagatgtgatgtttaaaactgccaagattcctacgcatgcatttgttatgaaggggatctgtgcattcttcttgatagcaaacagcagttgacacaaaaactgggttttgagggagagcaaaagagaagactttgaacgcagagcccagtgagctgggcccagctggcaagcccagggttgttctgacttcaggggagggaaacggcaggaggctctgtcactggtccagatgcgatcaggaaaagcacagtggcagttatcctccaaaaagggctggactatttcctgctgcattttaaatttttgttgctttttcgactttgtttcaaggtgacttatttcattaccagttcaaactcatctttaaattttcaaatgtgtaatttaatatatggattgttactagtctctggatggcttttccttcttttcagtgtctcactacatttcagcgatcttagcattctattatgcaggaggtg

SEQ ID NO: 16948 - DNA, 1516 bp, Homo sapiens
tttgaagaaatcatttgccttgtcctcacggaatctgattaagccctggcctcttgattgtatagagtcattgtgtatattccagttacctagatattcccttgagattttgatacaatttgagggaggcagaagtctgcagttgaagaaaaaaaataagtctgtttgtcatatttaagtagcctgtggctatttttatactgattttgatatcatgttcttttcatagtcgtattttgccaccgtaaacataaaaaaaaaaaaaaagatttccaaaatgccgttttcagaacctgggttttaatagcagtattgaatttgtaagcttagtagttgcagaaattgaacactaggtggcactcagttatcttaacaggggaagtactgatacaattgttgacttttcttttactatgtgtaagaaataccccaaacatgaaaagattgttttgatcatatgcatgtatgtagaatatttttgcagagcagaaagattatgttagaagtgtgatttttattttcagaagtcatatacatgtaagctacaattttgagtgctttataaacacttaagatatatatataaattttaatttcatagcaacttgtaaaaaataaaatacttgttgaaaagcctttttcaacatatccctaagctaagggaagaggaaggaataacaactcagtgaaaagatggtctccagtttctgaatgaaaaagctacagctgagaaataaaataaaatgtcatgctgcagaatatgttatacccttattttgtgttaaggatatattttattatgtgaatggttttgtttttgttttttgtttttgttttttgcttgtattgggaattagctttactggtaacttccttatttagtttttagtggtcaactctaataaaatgaaactagggctgagctagttagccctcactagccaaactgaaactctatgcaacattaaaagaagagatccatcatgtagcttgtgacacttttattttattagtcaccggggaacttttcagtgatgaaaatacacagggtaataaaccttcacatggcttcaaaaggaaaacaagcaaatcttctctaatctactcttactataatttcctaagtgtacaccaaactctggatttaaaaatctgaagtactatagaacattaagttgaagaatggaaattaagagtacgtattcatggtttatatttcttattctatggagttcgtgaacacatctaggtggaatgcatctgagactaagggctggtttttaatcctcataagaaaccagccttgaagaattaacaattctcttcattggtattctaaacctcctaagatatttaggcttctgtacataaaagtgtttttgctaaatttacagtatatatagatcctttcatattattttactaagaatgtttgaactttgcatatttgatatagttcctggtaggaatagcacagctcaaacattagtttttctacttacctcctctaacacgt

SEQ ID NO: 16949 - DNA, 2284 bp, Homo sapiens
ttatagaggtgtcttatttctaatgcaacagacccccaactttaacagatttgatatggatgcatttattcacaagcaaccccaaaagtccaaaaatgtaataattttgacaaggcccaaagttgagatgctatgaagcttgtgtgtgtgaaaagtcagttatgattgtctggagagaagctgtggtgtgtatgctgtagagtttccacatttcacatgcagtgtactccaaaaagcgggtttgggtcaaccatttcccatctctttttaagaagtgactgctgttggggccaggggacatcatgggaggtggggctgtccagttagctgtgccctgcaccttcagcccaggaaagatttgaacagagcaaaggcttcaagagagggcagaatgtattcggcagaaaagggactcaggtaagcccagcctgggatgagagcagaaaagcattcaagatttgcaggccttgctatggatgcgcttaatcaccatggaggccagcaatacccatctcagcatggctttgatattctctacttcctggcctttaaaaatgacctataatttttcagtttgctttactatattttataaagaaaattctatcttatggttgattgagcattgagacttatgaaggcattaggatagatagctcaggaatgtaaaggttcagaaaaggtctgttttctcagattaacaaatatgatggattccatggctgaccttggtgcttaaaccaggaggtttcaatctagtcctagagttgtgtccctctgaaaggcccaatgccatgtaactaactttaaactggatatatactttgagccttacttaattcacagataagttgacttaactcagtatttttatttcaattaatgaaaacagtcctcttttcaaccccaggttgcttacattttgctggtctccccaagtgaccattggtggagaccaattaatgaaggaatgaaattcactttattgggactgtggtattcaacagagccacacttaaccactttttccaatgaagaatctccagaatgataatgcccaaatatggatggccaagaagaatttgtatctacggtgtgctttatgtgtttttgacactgctgtattctgtgtgatcaagtgatttgcagctggttccaatgtgactgagtgttctcaaagatttctagtaactaagtcaacttaattttcttaagcctggtattactatcagcctcacatttaccactttgattctagttttttaactgttcataacagggcataccgagggttgggatgagagcctacttcctacctcttaaggcactttcctcattattttgccatataatcttgaactgcatgataagctgtttaaatgtccatgacttctcccagagcaactagcaaagtatatgacattttgaatagagattagtggaaaggaaaatgtagagatttaagttcagaggtacaaacctcaataaaacctccttagagcacataccatgagtagagtatatgtaaacgtatatgagaagagagtcgctataatagtcctctctaagtagattagttcattgtctaatggaagtgaacatctttactcctgttatcaccatagtactgaatgaactgtataatgagtttttcaaacaagtatttaaaatagaactttcacgtacaaagcaagggcataaagattttggtttgtgtttctgtaagtgtagtttaccatctaaagctttggtttttaattttaaaaaaagcttcaaggtattgccattccttagcatccttattgattatgggtgatgagtttttaactcttaaaatcatatacgtgtattagtttatcttaactgttgccctaagcaaaagggaaggtatacacctaagggatgtacttattttgcatttttggtcatgggtgggaatggggtgggtgcctacttaaatagtttttaaaaaagaaaaaaatcacaaatatttttctactgttatatatgatcttcctttatactagtttctctctagtaaggcatgccagaagcccaagataccatatcatgaattcttacatattgtaccttttgttggtggttaaatcgcatcagatgcttggcattgctgccataattataaaatgcttgtaaaggatcaaatatcactaaatactttaaattgttttacttaagagtctaatctgggaagttttcaaatcatactattaatgtgtaatctaagctcttcagatgtatccatgaataatcctggaacaat

SEQ ID NO: 16950 - DNA, 1194 bp, Homo sapiens
ctcccaaagtgctgggattataggggtgtgccaccactcccagcccaatgtaagtgttttaaattgttccgctgagcagtgagatttatatgcagcttttgtatacagaaaagaccctccatcagtgaatacttgtatcaacaggaaattgtggtcaagaaggaaccgccgtataacaattttgacgggctcagtagaattctgttttgttaaaagcaggacatcataccacctgtgttatactttaaacattttgggattttttccatctaattcatacatatgtagtttaaagggtttttttctgtcttaatgtgttacatgctctttgggaactggcaaacaacaaaatgaaaaaaatgtattcccttatattgacaccccaagttataacaaatgtttataactagtatttataattgatacattttaggggaaataatctacagtatatctgaatctatattataataataaactgtattatagcagggtcttattttaacaaggatatagtttatactactttgtaatatttattttctcttacttaaatgcaggttttcttagttaaaaaaatctcaggctctgatgctaggcagctttatgccatgaaggtattgaagaaggccacactgaaaggtaagtgttgctgctatttgtaatgttcatgtagtctaaacaaactgaaaggtctcaatagagctcatgggactccttggcatgttatttacattctgaataggttcctgttaccagctttaaatttaggctgacttttagtgaatttttcctgctaggctaggaatcatataactagtgagaaccagagttgccacgttataaaagacgtattataaattcatattgagttttatacaagtaaacatttagaagattaaaactgggtttgattcatcttcaaatttatatatttattttaatgtttttaaaaacgtactgatttactggctgcaaaatagcttttattctaaaggactttatgacttctggtctccaagtaagtttttattctgagcctatgatttgaaaaccctaatgcaggatttggctctcataggtaaaaagtagttaagaagaggccgggcgtggtggctcacacctgtaatcccagcactttgggaggccgaggcaggcggatcacctgaggttagaagttcgagatcagcctga

SEQ ID NO: 16951 - DNA, 1168 bp, Homo sapiens
agcggtttctgctgctgcaaagaagaaagcggaagcctaaggtcccctaccccctccgtttctgaggtcgcagagctagacccccgtccctgtgagtttaacttgagtttcctgtccatggaggtgagagggtgatattcaaggagatcagcggccgccgtaaaaggctttctggttttcctcgcccgggatctggtgaccgtccctgagtcacccatcctagtgcccaaaacccaaacaatatacccaaacagggcaaaacagaatttccccgggcgcatcactacaccgagctttcctgaaccgcccctatcccagaacaactcggggtctgcgaaaataatccagacaagacccgttccaaggtatcaccgctcctctccggagtggaaaatcaattcctgatggtggcgcgtctgtgattcttccttcttgactttttgctgccttctctccccgcagcggactttaggggattacaggatgataggctgcgtgtgtgtaatagttactgagtgagtgaccccatttctggaaagcatgactgaaacgcgggggtggaacggggcaggctctgatgagtggtgtgcttggcggcagccgctgccctgccggcctccgcagtgtgagaagtagatagggttactggttacgtcagtaaaaccgaggctcagtttaatcttgagatgcgggacacttgcattctccggtataatggagagggcgggggatcagttcaaatcgcttttcactttttcccccagtcacctccgctgctgtataacaattttgcttgttctccttaacgcacgcagagttgtaatagtgcttatgattggtgcttagtattttgcgacttggatcatacttgtaaaacctgaactaaatgctgctcttcaatggaaaagacattgatatatgttgaaagaaaaggaaagaaagaaaggaaatcatgtttttaagactggcagaatcacaagaactttatttaaaattgttaaccagactaatactataaatattttattaaaaagccaaatttatgatgtttaataatcctttagatgggtagtgtgaaaaacagtatgcaagagctcgtcatatttttccccagaaaattttttgcattaaataatatagctaaaaggttaataaaatgttcgcaaag

SEQ ID NO: 16952 - DNA, 1248 bp, Homo sapiens
gacagttttagtgaaataaacaagttccttgaaaagcacaacttaccaaagttagaaaacatggcagattatctccactatacaatggtagcttttaataattaaaacaatagaaaaaagaaattattattaaattataccatgttaatatttaagctcattttatcacaaagtaaagctgaaatacgatgcagacaatagaagaggtagatgaaaaaggatggatgtctataacgtcaaaagggctttcataacgatataaggacaagatcaaaacaatattatgtaaatgagcaagtgcatgagaggaaacaaacttttttattgggaatgatattcagattctttagttatcagagaattataaattataaaactgcttaaactagtgctcatgctgcagtcaaatatttgaagttcatgtaggaaaaagaagcagagttactgaaattttttagccattattttaaagctatgaaatgtggctgcttagtgaatttgctagtccatgaattgagagaaattgtaaattaacatgatttttttcccttttgacaggttcaattttggaatggtgtttggcgtaattgccatgtttagctcattttttctccttggaaaaacgctgatgcagactttggcacaaatgatggctgactctccctcttcttattcttcctcctcttcttcctcttcctcctcttcttcctcttcctcttcttcatcttcttcctcttcctcgcttcacaatgaacaggtgttacaagttgtggtaagtatcgtcttttcgctttaaataactatcgaaatagagatgcaagataccacttatgatctagtgtaactcctatccataatataaatatgaaaataaattaaaagtctcataattttcaaattacctgcttacacaaaaaaattaataagaatacagcaaggaattgttgaaatatttggtagtagttgtaatattaatggtaaaagagaacaaatgaaccatcattaagactgtcagcaattaaacagatacgtgactgtctttttaagatattaaatgattgttattttcaaagaataggcatgctgatttaagatctctataatgtataagtaaattgcattctaattatatgcaaagtgtttccctttccttttcatggccttcagagcctaaccaataatatccttttaattaaagatataagacctttctgaatggtcactgtgatttcttaatgtgaagaataa

SEQ ID NO: 16953 - DNA, 1194 bp, Homo sapiens
atttttatataagagactctaataaacagtgtatttctctttagcatacaaacgactagatggttcaactgaatgctgtaacaatcacagcctcacagatgtgtgcttttcctacagaaataattttaataagcgtttggtaagttgtccctgaagcagtcttgcttgtctgatataattactaaaaaataagcatatagagctaaaatggaatctatggaaacttctctcttttgctctatttgtatcattttattaaaatctctacatttcacatgtcacatttcatctgaaaatctttaaaaatttatagtgataatatcttatttgacccaaatggggtacttgaatctattttatagtagatgcacataaatggcatttcttttatatgaacctcattcctgatatgctaggtgacatgaaaaatattgaaggaatgtaacttaggtttttcttaatcatttttaatattgactgattaatattttatttatagcatacatgtcttcctgcccggaaagcagttgaagcaactcaagtttgcagaaccaataaagactgtaaaaaaagctcaagttcaagtttctgtataataccttctttggaaactcacactcgcttaataaaagtaaaacacccacctcagattgatatgttatacgtaggacatcctctgcatcttcactacacaggtgagtatttttgtggtagacccttagaaaatcattaagatcacatatagtctcagtggtagagactcactacaaatccttgaattaatacatttattataaatttgatcatttatcaaagtcttgttaacttgttcttaagcattaagtgaaaattatgcagtaggaaaataatctgaatttataaagtaaggtggagctgaatccatgcctgcctatggagagtgacacatttttccttccctaccatttatgcccaggtcaaataggtgatctctcagatgtcctctgagagtttattaaatttatacaagctccccaaaacaggcaagagcaacataccctagagaatgccaggatgcatggggatgtaactgtaatttatgtgtgacacatgattttcatatgaatatactttcaaaactgggccagcataatcattttagcagtggcagcatcattggactaagttctttatggctaaagatcatgtagtcta

SEQ ID NO: 16954 - DNA, 1656 bp, Homo sapiens
actttgtaaggcccaaagagtaattttccccttatttcttattccttccacattcctttccctgttgtatcattaaaggattagaaagacttagtcttcctacgagttcattatagattggcttagtttataagtggttggcctttatttttctagtcaaggtttttgaactttgaaataatataaactcattttttttaagtagtagagatctaagaaggaatggcagagatttaaagaaagtagagaagtcaagtgtaatctctaattcagtcacagtaaaatatcttctgactcatagaaatatggtttctactcagacctctcacagttggttccttaactgattttaacccaggtacctgatttccctctcaggagctctggctattgttaatgcagtaccctgctttgctttggatggacaatggattctaaactctttcttggatgccacccttacctcagtgattggagacaatgatgtcaaagatctaatagggtttttcatcttgctgggtggcagtgtacttttggctgccaatgtgaccctgggactctggatggttacagcacggtaatgtttgcactcatctgacagaatccctgagttacagtatacagctatgtggtaatattcattgccattgaaattcttacttggtatgaaatataaagtgtttccttaaaattacatcttagccaacaaccctgagctcctcccatatccagagtacccaaactctgtggtagaagataagcagaagaaatgaaaggcatagtccctgactatattctaatttaggactgaatgtacccagatgcttgtggaataatatctaagcaagtgcaaattcatgtaataccgttttgtctgattacatattgtgttgaaatagtataaaggagaacagaactgggtggaattaattgggaaaaacttcttacaaaagcatcattaatcaaaatttgaaggagaccagactttggccaagtggaaggatgaccattgtcttggcctgtatctcttgtcctttgtcttgtttgaaaagtattttaaaacttaatggtgtattattttgtgctctgaaagctgaggtctgattacaattagtaaaattctatagaagaatctgctgacgtgaaagggaaaaatctttgtcaaatgataccaaataaatgaacaaaacaggaagtagggcctatgatatcgtgagacatgttttgccccacaagagttgcatcttttataaggtgtctctgccccctcataaagcagcactagctttgacatccacggtgagctgcaggaagcatcacacaccagcagcatgtgagcagagggaggcagttggggttgaacttcggaactaggccgggtctcctgacagatcacaagacaccccagaggatcttcagcagtcctacttcccattctctatagagctttgaagcttggaacccttccagggtaaacattttctcttgtgctgctcaggacatctggggcctagctcctgggttcctgtctccaagaagcaatgaccttaaactctgagccatactctgtcctcaccagcggctcccatgtttttctgtgtcaggttattaagtacctagtccttgttttctgtctctctcctaagctacctctct

SEQ ID NO: 16955 - DNA, 1284 bp, Homo sapiens
ctctgtaagcactaaaactttttaatcatttttaagaaactttttagattgtattacaaatttgccttaacagtaattagatgttgaatataattttaacattttattaatgacttgggtcatcagttaataccagtactaaaaccatacgaattattggtttattccagaaaatacagtatttgttctatttttaggtagacaatcatttgggatcagagtacattagcatagtaatgctcagtcagacctgttcaagtagtagagcttggagaatgccatgaaatacttatataattaatttgattgcatgaactaagcaattttactaatgaaaaggttgtatatgtgcaagtcacttttttaaaaaccaagaaaaaactttaatagaggaaatcttattcattaatttatttttctgagtaaaaaaacgaaacccaaatctcattttatttcaactgttaaacattttgatctgttgacccataggatcaggatttgggaaccactttactaggaaagagcagatcagtaccatttgtataaaaccggcctcattatgtaagaaagaaaatgttacgtgttttcttctttagcttggttgtgggcacttctacagcaaggaccatatcatattcatctttgcatccctggcacagtgcatgagacataagtacttaataaatgcagttgaatggataatgattagtgttatttatggattagaaaaagcatgtttctatttaagtaagctgtaaaaagtattattgaatatttactgtaaatatatgttcacataaaaaaataacttggagggtctttgtgtccctggcatattatcatcttcatggaaagaatccactgtggtttctgtagagtgattggaaaaatggattattttgaggattgaagaaagtgttctttctgcgttgtcactttgttcaacagtaaaactttattctcagtgttcctactctgcattgtttacatttttgacagttttttttaatcacctacaatctgtaaagaatgtatatattcttttcagcatctcagtttgaaaagacatgcagttaaacttgaccttttgataatcgctcttacaggtcattgtctgttctaacagcaaattgtaaacatgtgcttcatagatattgtggctctcagtcatcactttgtcctatggtatttattgaatgttcacatactaatggtgcacaggtgtttttttctataaatcttctgactgtcctgtaattcattcttaagctttaacttgaaggt

SEQ ID NO: 16956 - DNA, 1154 bp, Homo sapiens
tccccaaaaattgacttagatattaaaatttggtgcttataagagagagttaaaaaaaaataggattgcttcaattaaaattacaaaagagacattttgtgtgttctgtcgttttatttcagcccagtcccctctttctgacttgtgatctcatagagcaacagtatctcctggtctgtttttagttctgtcactcgatgtcatttatctctttataataggatggccccggggccttttttgaacagtagtaatgacttcatttgccaccgtgctaaatgatacacaacctattacattcaccagtccttcattataccattgacctgaggctagcaagagattttgtctgactgtaaagttgaaagtcaaaagcttatttctggtcccactcttagcagtgtattagatgtggaaataaaagtcattttgggtagctgctatgaaactttctgagcagattcttggctgcaccgatgtatgacagaatttatggagaggcctatggcaatatgagcaacttgaaaactcctaaggaagtgcaggtagctaacagcttggtgtggtgtgtgtgggtaacaatccacatcaaaagtgagctttacattgacttggattgttagacatcagtgggttattctgttgtttttataaaaggtttatactgtatcaatggaatgagtcatttatgatgaatttgcaataagcaaagcattaaaaatgaaatattcagtgtccattttgaggtagaattggtgtcaacacagaacgttcttcctctcaaggtgtaggaatcaatagtatggtatttaaaaaaaaaaaaaaaaattttttttttgagacagcgtcttggtctgtcacccaggctggagcgtagtggcctgacattttttttcttaaatgagtgaatgtctactttttctttttctttctttcttttttttttttttttttttttttttgagacagtcttgctctgtcgcccaggctggagcatagtggtacaatctctgctcactgcaacctctgcctcccaggttcaagcaattctcctgcctcaggctcccgggtggctgggattacaggcgccggccaccatacccagctaatttttgtattttttagtagagacggggttttgccatattggccaa

SEQ ID NO: 16957 - DNA, 1182 bp, Homo sapiens
aggccatgggagatagattcaggagacagtaagggatgtggaataggaaagaaaggaatggaaatatctgtcttttcatttagggtgataatagtgaattttgacccaactcacttctttgtgttggagaaaggatgatgtatgttttgaacatctttgttactgttttaaaacaaaagcatgcaaactgaactctgaaaactgaaaatcccctctgcttttgctgacttttaaagaaatgttataagatctagcattgttgttttactttaatggctgtagtgttatatagtattacagtctcctttataacttaaactggaatatactgtagtatcctatagctgctttttaattagagacaagacaaatatgactgtttaaaattccatttaacacatcagcagatgtcaataatttatttaaaaagtgaaatgctgctttctcgtagaagtgtgattgattgaatattttagagacttgactaatggtgatccagcggggctagaggaaggctgggttgacagtgtttttaatgggctggagcagtgctgatgtcgaaataaaaatgtgctagtacttcctgtacagtctgcatagtcacttccttgcttgcattaactattgctgacgcaagactttgcatttctaccatctgtctcagtagatacatcaatttcattctggtcccatgactcctgggatagggtggggaattgtgggggtgtgggttttatgttaaatatcactggcctgtgttcaaggctctagagcaggaccagtcaaaagtgtagtttgtcaaccagctctttgttttctaagcgctgcacttcagctgacctgtttttcacagcaagactctcattgaaagaagcagtgtgctgatttttccccgtggcacaagctccttaccacatcttggagcagcatttttttgagaccgagttttactctgtcacccaggctggagtgcagtagcgcgatcttggctcactgcaacttccgctagagttcaagcaaatttctcgtgcctcagcttcccgagtagctgggattataggcgtgcgctaccacacctgactatttttttttatttttagtagatacggggtttcactatcttggccaggctggtctccaactcctggcctcaagtgatctgcccgccttagcctcccaaag

SEQ ID NO: 16958 - DNA, 1528 bp, Homo sapiens
ttatatttaaaatttatttataaattaaataaatttatttatacatttataatatattcatgcatacatgcatgtttttggttttttgacaaaatgggatcatattccacatattgttttacaagttcacagaaaactttctttttactgttatttatctggggggatgggatcttgctgtgttacccaggctggacttcaactcctgggtttaggtgatcctcccacttcacccttctgagtagctgcacagaaaacttactgaaggcatataattgtaattatattatcatacataaagaaattaggctttctttgctgcgtctactgcgagaatgaagactattctcagcaatcagactgtcgacattccagaaaatgtcgacattactctgaagggacgcacagttatcgtgaagggccccagaggaaccctgcggagggacttcaatcacatcaatgtagaactcagccttcttggaaagaaaaaaaagaggctccgggttgacaaatggtggggtaacagaaaggaactggctaccgttcggactatttgtagtcatgtacagaacatgatcaagggtgttacactgggcttccgttacaagatgaggtctgtgtatgctcacttccccatcaacgttgttatccaggagaatgggtctcttgttgaaatccgaaattttttgggtgaaaaatacatccgcagggttcggatgagaccaggtgttgcttgttcagtatctcaagcccagaaagatgaattaatccttgaaggaaatgacattgagcttgtttcaaattcagcggctttgattcagcaagccacaacagttaaaaacaaggatatcaggaaatttttggatggtatctatgtctctgaaaaaggaactgttcagcaggctgatgaataagatctaagagttacctggctacagaaagaagatgccagatgacacttaagacctacttgtgatatttaaatgatgcaataaaagacctattgatttggggaaaaaaaaaaaaaaaagaaattaggctggggctgggcgtggtggctcacgcctgtggtcccagcactttgggaagctgaggtgggcggatcatgaggttaggagtttgagactagcctggccaatatggtgaaaccctgtctctactaaaaatacaaaaattagccagacatggtggcgtgcgcctgtagtcccagctactcgggaggccgaggcaggggaatcgcttgaacccgaaaggcggaggttgcagtgagccgagatcacgccactgcactccagcctgggtgacagagtgagactctgtctcaaaaaaaaaagaaaaaagaaaaaaaggaaattaaggccgggcatggtggctcatgcctgtagttcaaactactcaggaggctgaggcaggagaattgcttgaacccgggaggtagaggttgcagtgagccaagatcgtgccactgcacactcccagcctgggcaacagagagagactccgtctcaaagaaagaaagaaattgcac

SEQ ID NO: 16959 - DNA, 1234 bp, Homo sapiens
aaattaatataaaaattggcataatgttggattgaatctacattttggcagaagttaaacattcccacataatgtcaaaattatacatcatgcagttctgtttttttgtttgttttattttgttttgtttttgagtctggctctgtcacccaggctggagtgcagtggcgtgatctgcaacctctgccccccgggttcaagcgattctcctgcctcagcctcccgagtagctgagattacaggtgcgcgccaccacacttggctaatttttgtattattagtagagacggggtttcagcatgttggctaggccggtctctcctgacctcagggtgatcagcccacctcggcctcacaaagtgctgggattacaggcgtgagccaccttgcccagcccacatcatacagtttgaaatgaaactttgccacaaccagcctttgctgtagcacacacatatatcactgaacctgtttgaaataaagttttttttctttttcatgattcgtctttgagtacctccaggctgaaagactgttgtaccagtaaaaacttaaaggcacaaattctccttgaagaccttctcccttttatgtggccccatattttatgttgctttatctttgaaattttgcatgaaaaggaaatgaatggattcgaatgaaattgtcctttagagcatgattacttgttcccatggacaaatatttttctccccttgctcttcctggcctgaaacacgggaaaccagagtcaaaagttatctccctctccctgtgatgccttgagatttttttctgcgttgtttaatgcctgaaatccaagtcttcctccatgggaaaatactgttataccaaataattctagatgagtaacaaagatctttttaggccttcattttatgttttttcttaactgttatattatgattgtgacatagattatactactactaatttttggatgtttcaaaaggtcaagaagtaaaagatgttagaaagcaatgagtgagtccttttgatttttaacttattccccatgtccctatacttcgtgtgcttttcctttttttttttgagacggaggctcactccgtcacctaggctagagtacagtggcacgatcttggctcgctgcaacctctgcctccctgattcaagtgattctcgtgcttcagcctcccatgtagctgatattacaggcacttgccaccatacccggctaatttttgtattt

SEQ ID NO: 16960 - DNA, 1551 bp, Homo sapiens
aggaagttgggattataggcttgtgctacccatgcccggctaatttttgtgtttttagtagagatggggtttcacaatgttacccaggctggtctcaaactcttggcttcaagtgatctgcccaccttggcttcccaaagtggtgggaatacaggtgtgaagccattgcacctggctatatatggattttattagtgtgcctaaaattttactttcatgtatgtattttttctgtgactgcctcaattgctttgttctcctaatttttaaaaatctattgatttgagatgattacaaaagttcttgggttaaaaacatgtgattcaaaaatagattccctctttatttctttaatctatcttaatgtttaagaaaactgaggagctaatctgttttcccagtagaaattaagtaacatttacgttaattgtagtcatgcatacttacctgaaatttgtcattttaattttttttttaaggagctgatggtacacacatggatggtgatcaaattgttgtggaagtacaagaaactgtttttgtttcagatgttgtggattcagacataactgtgcataactttgttcctgatgacccagattcagttgtaatccaagatgttattgaggacgttgttatagaagatgttcagtgcccagatatcatggaagaagcagatgtgtctgaaacggtcatcattcctgagcaagtgctggactcagatgtaactgaagaagtttctttagcacattgcacagtcccagatgatgttttagcttctgacattacttcagcctcaatgtctatgccagaacacgtcttgacgggtgattctatacatgtgtctgacgttggacatgttggacatgttggacatgttgaacatgtggttcatgatagtgtagtggaagcagaaattgtcactgatcctctgactaccgacgtagtttcagaagaagtattggtagcagactgtgcctctgaagcagtcatagatgccaatgggatccctgtggaccagcaggatgatgacaaaggcaactgtgaggactaccttatgatttcctgtaagtcttggggtacagtgattgtcaaaggtgtttttgtaggctgcctcttctaatttacatcaggggtgaaattttcttgacttaaatgtctgtaaaagtaaatctcatagacctacctgcattgttgtttccatttgcagcctacaagataactgaaaattaagaaaagtgaggccgggtgtggtggctcatgcctgtagtccgggcactttgggaggctgaggcaggtggatcacctgaggtcaggagttcgagaccagcctggccaaccaacatggtgaaaccccgtctctactaaaaatacaaaaattaaccgggtgtggtggtgggcgcctgtaatcccagctacttgggaggctgaggcaggagaatcgcttgaacccgggagccggaggttgcagttagccaagattgtgctactgcacttcagcctgggtgacagagcaagactccttctcaaaaaaaaaaaagctgaaacaaa

SEQ ID NO: 16961 - DNA, 1596 bp, Homo sapiens
gggtgacagtgagactccgtctcaaaaaaaaaaatttttttttttttttttgcgaatagtaacattttatttaaatatctgttactatttgtgatttatttccttcctttttagtggatgatgctggcaaaatagaacacgatggttcttctggaatgaccatggacacagagtcggaaattgatccttgtaaagtggatggcacttgccctgaggtcatcaaggtgtacatttttaaagctgaccctggagaagatgacttaggtaagaagaagtgtttagacattatacatcctcatccaaatgtttcagcctgattacttttgggttatttagattgagaacatttggagtctcttctgaagtaacttttatgtaagaattccggtgtagtaataccaaagtttgtaaaaagtaataagaaaattatgtaaaaagaaataggtggaaatgcagttttcaaataaattattgaagctgtcttcttccctgattgataggtggaactgtagacattgtggagagtgagcctgagaatgatcatggagttgaactgcttgatcagaacagcagtattcgtgttcccagggaaaagatggtttatatgactgtcaatgactctcagccagaagatgaagatttaagtaagtaggtggcctttttgtgggagaaaattttatgtttctggagcttttaagtggccagtgtttgaaataagtagcattattttagagattattatgctactacattccaagggaaacatctttgactcttttatatatgcttatgatgttgctttaaaaccaagttatggtgaaagccaagaagtaaatgattcattcaacaaatatgtattgagtgcttactacgtgaaagctatgttctaggtatgtaatatttggaccatctttccattttgtctattaactgaattcaaataaaaacgtgtttcctgtgatctctgtaaacctggtcacagaagtttttgtaactttctacttagatgttgctgaaatcgctgacgaagtttatatggaagtgatcgtaggagaggaggatgctgcagcagcagcggcagccgccgccgtgcacgagcagcaaatggatgacaatgaaatcaaaaccttcatgccgattgcatgggcagcagcttatggtaagttgcccagcagctcttagcattgaagaagttggttcttaaacatgaatccatgattgaaaaatggtttctgtggtcttaggtttcagaagtctgaaataccagtatcctgtaaggattatttgaattgaattagagtataaagtctactttttgtctttatttttaacaggaatttccttcatgtgtatattatgtagaaggaagtactgcaagaagtacacaggctttcaggctgaaagttttcatcttgattatgtttggcccatgactttttcattttgggagacaacaagggagtccatggcgcaaaaatgctgacatgtgttttttagctttggaagctaggcgtttcctacggtctcgcgataataaatgtgctcataaaacccatgacctagaatggggaatttctgtcattcatgagtatcatg

SEQ ID NO: 16962 - DNA, 1161 bp, Homo sapiens
aggtaactcatggcttataggatcttttgcaactttatgtatgtaaatgtaccctgaattatatatatacacatatatatcatgtacctgtgtgtattgcttattttacatatttatacacacaaccccaagtagtagttgtttaaaatctataatgaaaagtattaaatttacaataacatgaaagatccagggatgcatgagagagcattttgtaagtcatgctcttcagagagactactcaggtgaagaattagaaggaaaataaggacactagtatttttaaagagtaaagatattttcttttaaatatctttggtaattgaaacatagaggttaagatgtttctaggtagaatgttttcatacaatttcacctccatgtctttatgtttttctgaaaagcaaatgagtatccagacatgactcccacagttctctttgagaagcctgagagggaactctgtcttacctagtgagggggatggaaaagaagtgatggctctgtggaccagagaacgggtgctaattatgacttcacactcggcaagttcaggctgatctgttatttctcagttacagttagcaaactttaaaaacttaacactcaagttggctttgattaaaaggtaaagatgtgttttaagtggataaggaaagtctgaggccttatttggaacatcactaagtcttccacaggttttttgtttgtttgtttttttttgttgtttttttttcttaagacggagtcttgctctgttgcccaggctggactgcagtggtgtgatcactgcaacctctgcagctcactgcaacctctgcttcctgggttcaagcaattatctgcctcagcctctcgagtagctgggattacaggcgcccaccaccacgcccggctaattttttgtatttttaatagagatggggtttcaccatcttggccaggctggtcttgaaccctgacctcgtgatccacctgcctcggccttccatagtgctgggtttacaggcgtgagccaccgtgcccagacaccacataggtctgaatcagtgtcatacattcataaaacaaactcggttaattagaacttggttatgttaagacgaatctgggagaacagaaaacagtttttggggtcccttcagttggctattggtccgt

SEQ ID NO: 16963 - DNA, 2101 bp, Homo sapiens
ttgaaagctctgtctgtttttttgtgagaacctttaaaatctcccttaatttttattttcccagaaataatgtaaaaacacttaaatgaaagtggaaatgtattaattttaaatcctataaaattaatacagaaaatataaatgattgggtcatttaactatatttttttaaataaactgaaagataaagaacacaacacttcacacattttatatttctcttacatactccggaatcatacacagttctttttaaagcacaacattaaaacctttaaaaggtatttaagggtttggtcaagtgaatatgataaaacatacttgtctgtataaagagaaaatgaaattgtagtcactgttatgtactgacattagttacaacctagttttaattcttaaaacaattttgattagcaaagctaaaaaaaaatggatgtttcagttaaatgttttaaagaggtacagatttttacaaggacataatataagttattgttctgtagaaatatcctattaaatattgtatgtccctccctctgtacactttgtaaagaaagtaaaatacataaaaagaaaatcatatagggatgtgtgacattattgtaattgtgtacttgagaataacgtgcaaaaataaaaatcagaatattttcctgttattgaatgtttagtctatttgataccagtactaagttaatgctttttctcaaggaaaaaaaatgtacagtttttgtaaacctaataaacatcaaaagcagtggattattttcatccccccatttcttaatttctttttcacagcagtggaatgcaaagtgcttgattgctttgaattttgtgactcggatgcaaatactggtaatatttcagttctgtgaatttgcaagtaatatttcagagaagttaagaggtgattggtgagtcctttgatgagcatgtccttggaattcattttttcttttatcttcataaaggatttgttttattagcatctccaattcccctgagataaattactcatgcataaagtggtttttgagagcacttaaagttcatttcagtattaatttacagcatatttaatcagtggggactgttaccacctccacaacagaaatcatgccctcgagttaccccactgcgcccagtttagaggactagtagatgctaacatactagggaatggtcattgccacagttaaaaatcggcagttaagtaaatgtcaggagtcaaaagagatagagttgtgccatctttgattttatagacaagattctgcagttcttccaactgtatgaacaaacgtttgcctaatagttgaaacaataaattaaaattttaggtaaatgacgaagggaatgtggtgaatgtcactgtccagagccataaatcagacaaaaccatacatagcatgctgaaaaacttttgtaatggaacacccaacaaatgacacctaacctgtctgtgatccaacaagtccgataacatgctgctgtatttgtattctctgggaatctcagtattaataatttcatttcccacaaattctagcattcatgtaaggaaaaacatggctaatcaatatcttaaaggggcaatctttcagagcagtggttttcaaagtatggccggacagcattggcagcatcttaatctcctgggactttgttaaaaatgcaaattctcagccccaccctagtcctactgaattgggaaactggcgtgggacccagcagtctttgttttaacatgttctccaagtgattctgatgcctgttcaaacttgggaaacacttttagagcacttgaggaacctaaaagatgactggttcagcattttgtgtggtagataagaaagaaattatcacaaaaaatcagaaatgaacagtgagagaaaaataggaccccagacagtttataccttccatttgctgttttaaaagtgtgagcctgccaagtcaacaagtatgcctttagcgcacatgtaaatagcctgcacttcctaaatctcgtgtggcctcccatggttacattcttcaaaggtaaactgagttgagaggaagattcagcatttaaaagagaagggttgaaaaagattgt

SEQ ID NO: 16964 - DNA, 1755 bp, Homo sapiens
cgagagatatttcaaaggtttcatctagaaatctggctgattaagccaccaaacttttgttcacaattgactaaagttcaatggcttgtttccttttattttctttggtaacactctgatgggttagtgagcagtgaaatggccaacaggtagcaatttcagggtatgagagtcaagggacatgcacaatccatcacagaggaacctccccgtgataactgggaggagacctctaagaactacacctacaattgatagatccaactgagattgatgctaaggagtagggcgagccttagataaaaatgattgaagtctacgtttctcttaccctttcaggtactccctccctcttcccccagacaaaaactcttcaaattaatgtgttttctcttctaggtcattttaatgtcattcaacaaatacttactattggatatagggaggaagagagaaacagaagagttgaggatgattccaaggtttttagtctgagcaaccggaaagatgaagttgtcgcttcctgagatggggaaggctgcttgggtagctttgcactgtgtcaacttggctaagctggaactatgtttcctagaattgcctttcctctggacctgtctcctgaactagactcataacatcatgagtattatatgattctggggtgtagggctggccaaaagagaaatttttatgagatctggaagtcaggattgaagcagcagccattacattctgaagttcagtgtcaggtatcaggcaccactgcagctcacacatgttgctcatctactggctcaccttgatgggagctggggagtaggcagtagctgggtccacagctccccgagctcccgctggatatcctccttcagcttttctgagtcctgggccaggtgcctgtgcacctccatggcaaagggagccagttccttctgcaagtcacctgaatcatcaaggttagaggcaatgagagccagactcaggtttgtcctcgctggttccagttagcccttgtgtgttccagatggtccttgttctcgtgcttcatgcccagcttttcttccttgctgcttgctctactgacccccagtggtatcaggttcatgcccagatgcagaagcaacagccctccatagacttcttcaccagcttccctttgtgatccctggttaatgacttttctccgaccttccaattgtcctcttctacacatttacttccctagagtctcccatgatttgtggggtctggtcactataagcaaatgtaattccatattacttatagtgattccaattcctaattgaaccccactgatactctgccaaaggagcaagtttgggtaggagataaggaattcagtttggacatgtcaaattgaaaattcccattcagcagtcagggggagattttgaataggaagcttgaggttatgagtctgtagttcaggggagaggtccaggctggagctatacatttggaaacaattagggtgtagatggtatctaaagccataagaccagatcaggtcatcaaatgactgagtgtaaatagagaaaaattgtctaaagaccaagtccagggatgctgtgacattaagaaaacaaagggcagataacataccctgaaagaacaaatactaaacgaagaccaaagataaattattgaaatgagcaaaggttcttaactgttgaataaatctagaaaatttggaaacggttattgacatttaccaggcagacgaacaaaaat

SEQ ID NO: 16965 - DNA, 1089 bp, Homo sapiens
tggacccctctcttccagggccataggcaaaacacaacactttcccaaatattctcccttccttgtttttgattcaagcaaaaacaacttacaagagaattgaacacttttgccattagtaaccaccagaaaacacattgagcttcaaattattcaataaattttgacagaaaaaagtcaattgtggttgtctctggttttcactgaaatgggagtggtctgtcttagaagtagaccccacccaaagaccagcctcacaacttcatatggccccttccatcagggagagagaggcccccacacctcccccttcatccccatccatggagatgtgggtcctttaggtgacccattaggagccattggtactgaatattccagaatgaaaaatcatgtttggcccacttggttatcttcatagttaaaaagggactatctaattaaatagtttctttttaattatgtctggcataatttataccattcaaaagtttcaaaaaataaagagtgaaaagtaaacttttgctgacaaagaactgttatcctccaaaatatacaaagaactcttaagactcaacaataaggaaatgaacaacctgattaaaatatgggcaaaagacttgaatggatacctcaccagaaaagatatacacatggcaaataaccatatgaaaagatgctcaacatgtatgtcatctgggaattgtaaattaaaacaaggaggcccagcaccagtggctcatgcatgtaatcagcactttgggaggcctagatgggcagatcacttgagcccaggagtccaagaccagcctgggcaacatggtaaaaccccttttttacaaaaaagcacaaaaattagctgggcatggtggcatgggcctgtggtcccagctacttgggagactgaggtgggaggatcgcctgagcctgggaggtcaaggctgcagtgagcagtgatcgtaccactgcactccagcctgggcaacacaccaagaccctgtctcaaacaaaaaacaaaacaaaaacaaagagataccactacacacctattaggatggccaaaattcaaaacactgaaaataccaaatg

SEQ ID NO: 16966 - DNA, 1402 bp, Homo sapiens
accgttttaaagtatatataagtaattaaatggtcattctatttctgtagtaattgtagaaaataattctgagatatggcaagggtttttgaattatcactataatgaaatactctaaaagtcctggtcaaaacagaggaggttgtactcacaaactcactatggatattctcattattttctttgtagagacaagatcaagactaatagaactttctagaggactgaatgctgtggtcctctctgtgaagaaagattgccttctgcaagtcaaacagagagaactgctttctcccacctgctctgagcgtggcatcacagttattcctagtgcttaaatgtgtattttctctctaccacctggactttcccaaagagtttttcctgtagctactccagatcttccactaaagtagtaactttttaatgacatcttgctgtggtgtgattgatgcctgtcaccgaagagcacagagcctccttacagctcttgtgccctcgtactctccatcttgttatcatagcatctgatgtcttcagtccttccaggattctgtgcgcctttcccattccagatacagcagatcgtactgttgctccttgtgaccaaataccatatttgtcccaaacctccacctagggccctgggaccctgaaagtggaagacatcaggtggccatgccctgatgatttagtcccagagccctccgtctctcccgtgcctccctccgccactctatgatttagacttttgccttcttccatctgatcggattctcattgtgagatgtggtgactttcatgttagatcttcttcattgatgccttggttttattttaaaattcatttgtatatgtctgttgattaaagcattcgaaatgttatcttagaatttttcacccaactgcttggtttcaaagatcttaagtgaaaaactgcctcctggtcaataccaaatttgtacagagtgtgaagtggagtttttatgcttctgtcaaacttccatccatctaatactgtacctgtgtcatattttattcctttgtagtcttctaaggaattggaagtttctgtatgatgcgctttactagttgtaaaatagactatcagagggaaaaggcctctctagtttatttttgaaaaatgctccaggtcttaataattttcattttcattcatcttagttttagaattgtcacctcagtctgattttcacaatcctttttgctaaaagttggaagtgggaattagcagacgatttgggataaggaaagaggaatgatgttatatttacccttaggaatagaagtgaccgaagaatccggattgaaaccagcatcctatatacagctccacaggatgtgcttctcttcatggtaattttccatatatatcatctac

SEQ ID NO: 16967 - DNA, 1064 bp, Homo sapiens
ttgggtgcttggaacagtacgccaggtgatttgtattatctcttttgaggaatttcttcagtatactattcctcaaagggtaagctctaaaccccaaattatctgtagagcaagttaattccgttcaggagagggtttcttttgtgtgtttccattttggcatagttagaggagataatcagatggatttggcagcttttaccaaaaatgacaggcaacttaaagtggatagctgtaggtaattactagagttatttagacttaattctgtgtctgaatgaattcagtgcttactgccagccctttcatacaaagactccacatttgagagctgatgtttttatcttttttgcagactggattacagcttcggttgggttttcttgcatatttacaaatgtattcctgttgctgttacttacgaacaataacttggctggctatcggattcttggatcacagcctttttccttgaattctctggagacaggatgttattgctactttatggttgtccatatctggtggtgctgacaggtctgagtcctgatggatttttcttccccttttgtagatgacctgattgtttgccctggatacttgaattctttgtttatccttgaaatttagtaacttcgttggagtatatctcaggattgactgttgtctgttgcctttttctggaatgcagtgagcattagatatggtcatttcaagcctcactgcgttttgtatcagtttagtctgttctcttcttgaaaacttcatttttatattggctctctgtcatctgtccttcacagttatctttccttagatggcactcatctcatctttcttcattcatgctgtatgatttttttctcaagtcttatcctccatttcactgactgactcagttttctgtactgttgattctagggcttgttccttgtaatgtggcttccacttctgttacagttttatttattttattttattttattttatttttttcaagatagtgtctcactctgtcacccaggctggagtgcagtggtgtgatctctgctcactgcaacctc

SEQ ID NO: 16968 - DNA, 1164 bp, Homo sapiens
aacagcacaagtatcaacaatcacgtatgtactgagtaatatttgccctccagttagcaaagtcaagaaatgtctaactctggcacacagcactggttttaactactctttagttcatctttgccttccaaattggttgaaaatggcaagcttagaatggaatgcatattaataacagaaccacttaatgttttaaaatattcataccttgagattctttttgagagaaaaaagaaatcttaacatccaattctagttgttttggcttttcacatatgctagacatgaaaaaggcagttacaaaagtgaaatccgattggaagtcagtggtgtccgccattgagccgtgctaaatgtcgtgtcacaaaaggagtttgtgaaaacaggatgagtagaaaatgttatactgttgtttctatcgtggcaccgctttcttataaattccatttgctttttgtcatctgaactgttacaaccatgggaaacctcagtccatatttttaaaagcactatatacttacaggaaaaaccgacttatgccttcattgaaaaaatgttgaagttaatatcccaaatgtttaatgagcatgttttagaatatttacagctaaagtctgtcactttagggatttgacaaaacttgagactgcctgccaccgaagagggaccaggcagaatcttctcagccttgtaaccagcgttaaaaaaatataaggggcttgatgagatcctagatctgctccttttctcctaggtgcctgggtaactcctggggaaagcatcatattaagtccttttcaagcaaggtgtgtgattttgaccaatgaattgagctgatatgtgattttgaccaatgaattgtgcatctatttaaaaattaccaagtgtatcttgactcttgagtggacagtcaaggcaaagtttacttaggaaatgtaaagtatggagtgttttaaaaaattcaaattgagtttattcactgttggaggaattgaattctattgcctccctcatttccattatgttcattgttacaattgtgctgctctgttctcattgtgatgcttagttctcgtgtagaactgagtgctacattgtgattagaaactggagttgtgcttgagtcagtcctggaaaacaggacccatttttaagaagaacgga

SEQ ID NO: 16969 - DNA, 3566 bp, Homo sapiens
agacaaagccttgctttaggctggttataaaaggtcatctagtgtgaaccttaactttttattcaaaggacagttttgtcaagaactccacgtaaggcctgatgtgctcctggttgtactttctcatcactggtttgacttcattgttttgcagaaattaccttaatccgtgggaactgcaacaaagaaaaacttcctaatatataaaaaagaggagctgctttgctttgcctccaggtttagcggacaagaaatgtctcctgaagcttctccttaaaggatgctattatggaatggcttttcccatttctgaccagttaacagtttcatagacctcaagtaacagtttgaggtatcaaacatagtataccaatagggggtgctacctgcacgtatctgttctatatatgctccaatatgtcatccccgggtgtatcccatgtgcaatatgagtatatagtggtggcattttataatagaccccactcctgcgctccaccataatactcctctgaaatccttggtctcaagaaacatctgttctcttgtgacttgggcactttgtcaagcttattccagattcctgtggaaacgttttatcccaaccaggaaattagtattttgttctcgtggcctcctataacatttttgggtgaaggagaactcaagactttttacagagaactgtgggctcagttatgatctcagcatctgaatggtctaggtagtatcaccattatctctggccctaggtttgccaagtaggatgaagactctaagtgttcctgctgagttgtccaaaggtcctgctccttagtcacctgtgcgaaatgagcagggagagttaaggcatagaaccaaactctttgggttattgtatgggtatgccagtaaattcagacacagagctggggtctgactgaatagaggcccaaaccagcaacttgtaggcagagcccagaatctcttgtgatagaaataccccttttcagaggccttgggaaccagccttctaggtgacaaggggacaaccagtgaaggaaggcggcatgtctttccccttcttgttggggttgaactacctccctatccacttggagatgagtgctgtctgctgtgaagcaaaactatgaggctgagctggcttggaacctctttgttcttggcactttccttctccaggactctgggaagcactcatatgggacagagggctggcaggaacatggcatgtgaagaagaaaacttctttttgcagtcaagggccacccagaatattgctcttcagagagggacaagggcctcattcttccatttggtctctgtcttccatcatgcactcaggtcaagccatgcaagtctgcctaccatttgagttagttggcacttgtagcagtgaaggatgaggccagccaggcaagggaaggtggcgggaacaagggaagagaaaaggaggaaagaagttcctggagggaggaaaggaggataaagaaaatctgctctcataaaaccatttcaggacctcactttacaggtgagactctcttgggaaggcctttgtgcccctgctccatggcccagggcagatagattcacttttacctgaatcttatactctggagcaaatagtgtatcaggctgactatacatttgcaggccttacacgccatactgacaggtgccacttacgtgactcatcagataatgtcaccattgctgccaattatgggaaataactaatgcctattccagggatgagcccaaaccacacataaatgggttctaaatctcaccctcctaacctgcagtgagtccccccgttccaccctcttgaggctgcaaatctactgagaaggaatgggaaggattctacaacccaacttttgatactttttggccatctctcagtctctcccagcccctacccccacaccacctccctgctcccaggcagagaccgggttgcactttgttagggccagcaggtcaactgtaatggccaagagtgagttaaggctggaatgagaaatatgccccaagcttggaggggtaagcaggaataacacaaagcaaggaaagagattctttttgccctagtgaggaaaggaagcttcagaatgagggctggaggatagcaacttaggactgcagaagggggcagcttatgaagatgggagaaagtgggactgaagttgtaggggagcaggagggtagtgattttccgcttttctttctttctttcttttactttctttctctttctttctctctctctctctttctttttctttcttctttctctttttctttcctctttttctttctttctttttctttctctttcttccttctttctttcattcttctttgttctttcttctttctttctttttttttttttttgagatggagttttgctcttgttgctcaggctggagtgcaatggcacaatctcggctcactgcagcctccacctcccaggttcaaggggttcttctgcctcagcctcccaagtagctgggattacaggtgcctgccacgacacccagctaatttttgtatgtttagtagagacggggtttcaccatgttggccaggctggtctcaaattcctgacctcaggtgattctcccgcctcggcctcccaaagtgctgggattatgagcacgagccacggcgtccagccgattttccgctccctttcaagtgttaactcaccccctgacaggtgaagagggaagggttccttttacgcacaaccaaggttagcaaatgcccatgcaggatatggggtccctgcctctctggttgcttcatttcagcacttctatattagctgcttatggggaccctaaaatgaactggtcacccctccaccagctaagaaacaagggtgggattgctgtgccataagtcacactgaacgacttgcttctggcaagcatgctcctgtgtgtcaggaccttaccaaggcaaagaaatgccaggctcaagaggagcaggacgtgagacattggcctggcttctaacctggtctgagtggaagagacacagcttagggatttcagttttgctcttaggctactagatactgttatttcaccccctgagggagggacaggaagagcacggatttattttctctccgtcttcagtacttattttagcatctagtcataccccagggagagatgcgagacggtgtcactggctcagctgaagcagatgagcccgtctctagcagagatgtgcctgtttcttaggcatccgttcagcactagtcttggccatcagatttttaaaaaagaaatagctcatgaggcatttgcaacttctcctctctagacttctttctagttttcctctgttgtgtcactgcgatgtgtccagggacaaagccataagtagagcatacatacttaagactatgctgtacatataagacaagacctgtctgggttaaagcacgaccttatgcccaagcatttactctggtgctgaataacgcgaactactggaatcagcctcccccaactctgcgcgccccctgcccccctgctcctatc

SEQ ID NO: 16970 - DNA, 1197 bp, Homo sapiens
ctgttacattaataatacataaaatctttttataaaagggaactgtcattatctttggtcagggtaggacagttgcatatttttagtatgtaggtctaactgactaaatatttaaaaacgtttacaggcagttccttcaggaaaaattgcttcccctgtctccagaaaggagcctccattaactcctgttcctcttaaacgtgctgaatttgctggtaagtgtgatgtcaggcagaattgcaagagtgttgagtggtttctgtcaaaaatggaggccctatgatggaggaggtagaggagattttgaaggtgttgtgatggcaagtttaaatgtgaagatttgaattcataaaaatttcagtaaaagttaaaaacacccaatttggagattaaagagaaatgcaaacatagtatagaaaagggacaggctgctattttagtgttggataagcctttgtgcgcctttgtgtgcctttgtgtgcctttgtgtcatcgcaataacacatgacaagaatgtgtgatgatgcctacaggcgatgatgtacaggtcgagagtacagaagaagagcaggagtcaggggcaatggagtttgaagatggtgactttgatgagcccatggaagttgaagaggtggacctggagcctatggctgccaaggcttgggacaaagagagtgagccagcagaggaagtgaaacaagaggcggattctgggaaagggaccgtgtcctacttgtaagagcattttatgacttttctggcaaataggaccacaatttttctgttggattttgaaaggtttttgaaaatgtgatttctgcagaggaagttttctcccggatgtctcttgttgggacattgatcaagaaggtgatagcagtttctcagtgcaagaagttcaagtggattccagtcacctcccattggtaaaaggggcagatgaggaacaagtattccacttttattggttggatgcttatgaggatcagtacaaccaaccaggtaatcatatataaggtaactatatgcctttaactcagagtaggacttttcccttaaatattttattttttgtttctttttgtgtgttttgtctttttatttaatcagtttatttctgttttttttttctttatccttaaatacttgagtcactgtaattagctcaggtcaggccctgccctcacttaacatgta

SEQ ID NO: 16971 - DNA, 1170 bp, Homo sapiens
gttaggaaagtaggactaaaacatgcagagaagggagtatgagatatgattgttgtgaagttttcccccttaagtgggtggaacacatggaacaaaatggtgatgagaatagcctggaaaatatgtagaagagagcaatcatgagttcatttcaacacgcatttattcacttcctctatgtacgtcactatgtgaacagctgttgtgtatggtaaggaacttacagtgtgtaataggggaagctttggtcaattttaccttttcagaaggctgaactgagtttctccgctgtatgttgcttgcggcattggtggtggtgggatttcctttgaggaagactgctaaaatcttccattctggcttcagtggatagatagcaaatgtttcatcaaagcagttttaacaactgcagggacttagggttctgtgcttgaccattcttttgaggtcatcaacatgaccagtggaagtatttgatgaccctcctaattctttagggttggggggaatatatttaagacagtttcgtttggaaacatgtactatatgattacctgaaattagactaagatgggtgttggaatctttattttttttcctttttacagttgtgtctaaaccaaaggactgtatttttccatatgctttcaaagaagtcattgagaaaaaggtaaagtgctcattatatgaagcatctgtttgtttggagcgagaaagaaaaggggggtggtatggactagtagaaaaaaggtgttttatattttattagattcattcctgccagattggactatgacatcgacccattaaaatgtattagacatacacctagaagcattatttaacaatgtttaaatgttttactacctgaaaataatgggattctgtactgtattggtggttggataggctcaaacccccctccaatagcttaattagaagcttctctaaaatgcatgatcatatgattcctgttttgggaaggtgttgggtagagtccctccccagcttgagggaagctaaatgaagttgggaatactgtggacgttaaagagccatgtattgacaaagttgacatggggttggccaaaatggatcagtgatctctaaattccagcgtgctccatgaagaagttttcatgggtccttaataaaatggggaggagtggg

SEQ ID NO: 16972 - DNA, 1204 bp, Homo sapiens
agatgccaagttcattttgcagatcatgtgtgagctaaatgttcttccattagcattgcagatcactaacatcgctgggaacattatggtaaatttaacttagaaagggggaaaaagcatttcctgttggattcagtgtttgcttggggtagttgttatatgataatgagtctaaatgcatgcttataaaatgagtaacttggattctgaaagctggatttcttttgtaaaaggaagaactggttgggagaaggggaggaatgccaggtgcagcgtgttgaaatttgggtgaacatacggatcatctctctaacatctggatgtgtctttttagtggaatggtccatttgggagtaaataaatagccaagttgtcaatattttaagctctctttgtctcctttagctataatgcttaaagaaaacgttaggaataatttagtaccttttttttttttaaaaaaaaagcagaccgttattaggaatagttttgaaggaggtgctgtgactaaacttactgactcaaagttgcttttgttagttgtggttttgagctcaaatttaaaaaataaattccatttaatagtccaggacgctgatgggtggacgatccgagcgtaacgagttcttgttgcttcatgcattttacgaaaacaactatattgtgcctgacaagcagattttcagaaagcctcagcaaaaactggtgggtccaaaactgtgtagtattttgttttctcttaaccccccccccccttttaatacctagatagccttttttttctgtgataacatctgctttcaaaatagctaatcccttgtgtactaaagaaaccgtgtcaagtttattcccttgtttttgtgtggtcatttccttttccactttgtaaaaggaaaatgcactttgtgcagacaaaattatttgtgaaatgtgaaattctttgagggaagcattagacctctctgatgggtgaccatacatggaatgtgttctggcacctcagccctatccaaagataaatgccagttaaactttttattttcttaaacctatgagcctttatttttgtgttgcatttttctgtactagtatgaccaaggtcacccacagtcaggtttctgaagtagcctccatcactttggaactaaaacttagtttagctactgttttattagcactgatattaattaattcagaaatggga

SEQ ID NO: 16973 - DNA, 1126 bp, Homo sapiens
aatagtcaaagtttgacttctttatttctggtcacatatttagttgttggactgtctattcactaactaactgaatagtttgaaggcaagtactgtatgtatgcattaagtctttacattcaacaaggactgtttcataattttcatatattacctggggctgatccagccagtcctgtcctttggttgcatgggatgatctattattgtctctctctctctcttttttttaatctatttttgtccctgcagttttcaatgtctttgctttatacccaatgtaatatcatgttacatacaagccaagtaaaattccaatgttgtatgacttcaaattctgtttagattaactcttgggaatttgtaacatgttcatcttctccctattagatgtttgagaagctaatactaatatttgaaattttcacaggtaaaaagtgaagtgaataagttgtacaaactgcttgaaatagacattgatggggttttcaagtctctgctactgctgaaaaaaaagaagtacgctgctctggttgttgagccaacgtcggatgggaattatgtcaccaaacaggagctcaaaggattagatatagttagaagagattggtgtgatcttgctaaagacactggaaagtgagttcagctttcagttttgcttttcttgtttgtcttttaaaaattcaggtgtgaatgatgtagagaatgcttatgaatctgtcaagcccaagaacacttctttgttatttttattattcttattaataagaattattaatcattcttatttggaatggaattttataggtagattaaaacttagaaaaagccaaatttgctcagtgagaaatgcctgctctaagatacgtctcatgagtttttaactcatagtaagggtaaaccttcacacttcagatccttatagagttggtttcgttgatgttggtttgttttgctctattgttgctattagaaagtgccttgttttgtgctcctgaatcttcctagagcctcttgagggacataattgttaagattttcccattttatggcttaaaatgttctgggactcaaaatgggccatggagtgagactttgttcccacccgtatgatttgtatataaaa

SEQ ID NO: 16974 - DNA, 1216 bp, Homo sapiens
atgttgcattttgtctcagatgctgctactgaattttaaccactgaattagattgcaacctacatgctgttaactactgagccaagatgaaatcgactactgcattgaaatcagggttagctgtgtctgcacttgaaggagttgtaatggcagtgaacctgttttctttaatgggatttttattccctgattttattctcagttttaattgtgactttgattttaagagaatttcttagtacacatttatttgaggttttcattgtaactttaagagaataataaaaaacatcctatcgaagtaggtgcttccaaacccatatgttcagtggcatatttctgtgttgtgttgttgcagttacttgttttatttataaagtatctcttgtaaaaagagaagtcatttgtccatgtgcttttgagttcaaatggttgtgtgtatgtgcatgaatttaaaataattttttgtgggagttttcttctttggggtatttttggaatacttttctgaatttgtttttttcttttacattaataggacttgaccccacccaatttagagttcatcattatcataaagatgaagagaatgatgctctacttggtggcccagcacagctcactgatgaagagaaatacagggactgtgaaagattcaaatgtccatgccctacatgtggaactgagaatatttatgataatgtctttgatggttcggttagttgtttctgtctttcattttgtgagtgaacttgtataaaggccttacccccttcccccactatggggtatataaaaagggcgaaataaacacacacatgttgctttcatgtgtttaaagaattttagcatcatgtgaaatctaccttcacagcttgcttttatttctgtttgaaaactcttacttgaatgtgcttgaatattgttttggcttcctagagtgcttgaccttggtttttaagtggaatcccttaaaaattctaaattatcttaaagtatttttattataatttcttaattagtaacctgtattgtcccactgtcaacccccatctattaagacttagaccaatatttttccttatcttaaatcaagttactgggaactaagtgttttgggaaagtttgtgtttgtctttacacatcccacttacctccattttgcaaaggtactcttatcttttctgctgtctttgcatattagacatttaaaaag

SEQ ID NO: 16975 - DNA, 1243 bp, Homo sapiens
ctccctcccccaatacacttcattttttggaaaaattgccaaaattttagatttgctaagcagacagtaagtgatactgtttttgtggtactacacttttaacttttagactttatttttaaaattaacttgacaagatgaaaacaaactaatgtgataaaggctcttgtttttcttcaagtttgtaatgaataaatacaaatttaaagtttttaatcagtatctctgagaaagaggtttatttccagtaacatgacttcactggtatttacagagggaaaattattttatccatagagtccctcgtatagtgaatgtaaaatagtgatttcagggttttccctttgactttgcactccattatgatgatggcaaggaatggaaggtatgtatgactaaagcggtctttgggaggaaaataattgagaagatagggttaacaactcaccaataaaacgaattaagaatattcaacactaggacagcatgtaagtttttaagcacaaaaacccttttatagcctcacagtaattttttgtatacttctcctgacttatgtagggaacagatatggagcccagcttgtatcgttgcagtaacatcgattgtaaggcttcacctctgacctttacagtacaactgagcaacaaattgatcatggacattagacgtttcattaaaaagtactatgatgtaagtatccataatgatattcttacatacacaacttattgaggtttggtacttgtttattggttttcatgaaactaaaattttgaaaagacttttgggaaaaattcctagtgaaatactattaatacaaatatgataaagtatgtaattttggcatattagcatgacaaattatttgataatttctctcaggcattacatctctttcatttacgagcagtattttaaataatgaaatttttacttcttttagaaaaagccagaatataattaagaaatgttttagtttattgttacctaaataagactaattaaatgattgcttagatctttggataaaggaagaaaaaaatcactattggctattgtcagcaagtagagccataagatcgtgtgtagtgatcttagtggactgcccacacaaaactaatactttgtgtttatgtagcactctaaacgactccataccctagttttttgaggaaatcaaatatcttttaaatttaaatgcagtttttctggcattcaaaagagaatatctaatttttat

SEQ ID NO: 16976 - DNA, 1218 bp, Homo sapiens
caggctttgcctcagggcctttagcctatgtcccccccacataaagagagcttctcagagcctgactgaagagctgacgttttgctttttcatatgccaattaaacccggtctaaatccaaatgcttctccagccatccaggagtggctgtccttttcagtcttgtcttttatataggtagctgagggggaagatttagaagccttgcactcactaaatagattaaacagagcaggcttgtttgttgaattgctccaaagtccaacagacacacactgagcaggtgttttacactcacattccctttttgccccttaaatagaaagtgcaggtaaaggtttatacaacaagaaagcacattgaaaataatttgatactctaacaatccattaacatgtgtaggggttacggtgaggatcactgtgttgtattcagaaaaacggggagagggatgcttaattggccctggcgcttgctatttttttctcatttcttcacaataggaccgtctttggcagcagcaaaatgtatttcagtatggcagtctttcctctcttacattattggtaagattatactaacaaaatgtttccccttgtacaattatgctgtgtttttaaaaaacattgacctgtgtgtttttataaaagaaaaagtatgttgtgccttcttcttaagaataaagttttctaaagggaaagcagttgtggtgaatccttaccaggtgcaaagagttgactagagaggcagcaaggagtaaaatgtgagtagagccagttgctgtggcacacacctgtagtcctggctactcgggaggtggaggcaggaggatggcttgagcccaggagttcaaagcagactgggcaacatagtgaggcccccacctctaaatacatacacacgtacatacatatacatatacatatacatatacatatacatatacatacacacacacatatatatatatacacacacatatatatacacatatatatatatatgactagaggccatccccttttcaaacctcagcccagtttcttcatagccacctctatcagaacccagctcaggagtgcacagcatgatatttggtcgaatgttctgagaagcattcagaatttctgtgactttaggtcatttaagagatgaagtatggtttcttacgtgctttgctgacttagagagccaagccaagagcccagcagcatctct

SEQ ID NO: 16977 - DNA, 1575 bp, Homo sapiens
tttgtggctgtgaagtttaccaccattggctgaacgatcagtgtaatgatggaaagttcaaagaagaatggtaaaaacatttgtctcatggcaacacttcttgtttatcatggcttgtttctcataggtaaagtgcccacctcttgaaatatcatgaacttcttcatatttgcatagaaagtgaactggagtgatgattcattaaaccgtattctactgtcatattaaattgtgtgcgtttgttggctcatggccagtgtatttgcaaacgtgtgcatagaaacatagtaaatattaagtaagatcacatgatgtttcattcttggacacgttgcttctgaaaacgtagactggtttggccttttacccttttaaccgggaagctttgggtcttgtttaattgggatgaaacagaaatggctatttttaaaaagctagcaaaggactctgtggtgagctgttttataacaaagagatttttctccctccagacgtgccgggcctgcagtgcgtgaagtacattcagggactccagtggggaactcagcaaatactcagtgaacacaccaggatgacgcaccaagggccccatgacagattcatcgaacttaatagtacccttttcctgctgagattcatcaatgccaatgtcattgctgaactgttcttcaggcccatcatcggcacagtcagcatggatgatatgatgctggaaatgctctgtacaaagatataaagtcatgtgggccacacaagtgcagtagtgcagttcaccatgagggaagaataaagagctgtgggcaaaagagtgtaaaatattttaaaataaactttcttaatatttttacatgcagagtatttttgtattcaattaaagaaataattttattccagacagtcacaaatttctctgttccatagttaaagaagacatttgccaacaggtagcatagctctgtacatcttttaaaaaaaaaatagcagggtactagtataataagctattttcacaagtgtagcaatttcatggaacctgctcaaatcaaatttgtacatattgttataataaattttaaggtcttaactattaacttgattgaaaaaagcttcagcagggtttaagtaaggcctcaaaaactattaaaacctagccaacataagcaaaaagtatctttggaagtaacaacatgacattgaatgtaattatgtgccagtatcagtgggaggtcactttgctctatcttcatttccacttccctcagctgtatggaagactgcgtttgcatccaactggagtcaagaagcaatctgtaattataaagacatgcagaagtgaaagaggagattttctgttttattgggggatctttttggtacacagttatggatttaaagatccacaaggaacatacattctataatgaggggttatagttccagaaagctcaacatcattataaaaccactaattacacttcatcttttagatacattacgtttgtaactggtatattgaacaacatggcatgaaatcataaagcaactttattgttatctcctgctgcccctttaatt

SEQ ID NO: 16978 - DNA, 1222 bp, Homo sapiens
ttcaactatatttcttatcccttacatttttatttaattgtcttagcttaaaaaaagaagaaactgtggaatactacagtaaatattgttttcaaacacaagcaataattcaaatagttatttttcttttgaattaattttagacatattttggatcctattgaggggataagaggatgtcaaaaaagttaaatacctaagtagaaaaaaatatagaaataaagccaagaatctctttcagttcaaatgttatcaattgttaataagaaattgctatctgggatgacagaattacctctgcttagtatctcattataactgaaagaaggtttatcattacaaataccttccaatgaaaccaagaatttctcaaaatatttaatgtcacatattataagaagttacctaatcctgcttcttaacatcaatttttaaaaatatcttaaaattactttgttttgtagtaaacagtgaagaaaagattgcctcctaattatttttttcaatgagtgctgaatgggaaaacatttatatcttactataaaaggttctgttttgtttggaatcaatggtagctttattgactgttctgattgtgctgtttctaatttattgaatctgctaggttttattgatgcagccaccacttaagtgacataaatattatagaaaggtactgtgaaatgatcactttgtggcaggggtacttttaaacataaatgtttctacaaaagtaggttgagttcattgtaaataattgtgaaagccactgttcaaataattttaagattacattaatttttctataaattggaagatttataaatgtttgaaattgtacacattgatatttaatgacaaatttacttaaaataaattgaccccttgttcttacttgcatttctcatttacagactagaacttagttgaaagttaaattaagaaagatgtttcagaggccgggcacggtggctgacgcctgtaatcccagcactttgggaggccgaggtgggcagatcacctgaggtcaggagttcgggactagcctaaccgacatggagaaaccctatctctactaaaaaaaaaaaaagatgtttcaggacatgtgaaacttggctgttagcgcttgatagggcacactctgaagagttaaccaacagccaaagaagtaatttctgtaatgatgaacactttaatcattctattagaagaaactacactg

SEQ ID NO: 16979 - DNA, 1210 bp, Homo sapiens
tcgctattttgtaaactgggattttagaaagcacgtttgccattttgttaaagtacattgccccttaaattttggagtagtttttaaaagtttaaaatggtaatagaggagccagaaactttttaagcattgtaaaatgttttgaattgatattgactttgtttggaagagagtagaggcagggggctttaaagaaacaaagaaatgcattgtaaaaatgtagttttagagcaaattaataatgatggtggggaaagtgttgctaatttgtttatttccctggaagaaatgggaagtgtgataagcagtttaatttttaaggagctggtctcaattttagtactttttaattatgcaaataaatcaatgtttccttaaattttgtcattgctttgtcacagttgtctagggttcatatccaaccttctgtggcaattcaattttatatagtcttttaagaggtaattgtaatgtatttctgacagtataaacaaaaagaatataaggcatagaagaattgtcctctaaaaatatcaatgatgtatcctggaatgtgaagatgtccctttatagttaaaaattgaattattttaatattgtaccattgttagaccttgaatgagtccatgttaccgtgtgtgtctgtatatctatctgtagagaaagaaaaatgacaactgaaatgttacttttaaaaatcagaataaattgggcactgtctgtgttgcaccactactgtatcttttcgaaagaattaacagtatttgcctattgtaaaggttaattctgatgacgttttcacattcaccagactttttttcctgtattatttgcatccccaaatatttaatacaagtagattctgcatggcttgggcattcagagattaatagaatgatgactcaattttaattctaaagccatgaaaagttactttgagactgaacaattctgaattatttatgatacccaatgtccatgtttctttccctactgtaaaagaattgatcagtttcttcattaaagcagcaaaaacttattaaatcttgtaaataccatgtctcttttagatttctgtgtatgctgtgaatgaaatcattttgagatgaaattgtacaaaggcattttaaaaggctctgcatgcatcgtacctccaaacagtacatattcggaaagtcaaagattcctgcaaaataaataaactaaaagc

SEQ ID NO: 16980 - DNA, 2532 bp, Homo sapiens
gcatggtttttataatattcatacaacaaagaggattagacagtaagagtttacaagaaataaatctatatttttgtgaagggtagtggtattatactgtagatttcagtagtttctaagtctgttattgttttgttaacaatggcaggttttacacgtctatgcaattgtacaaaaaagttataagaaaactacatgtaaaatcttgatagctaaataacttgccatttctttatatggaacgcattttgggttgtttaaaaatttataacagttataaagaaagattgtaaactaaagtgtgctttataaaaaaaagttgtttataaaaacccctaaaaacaaaacaaacacacacacacacacatacacacacacacacaaaactttgaggcagcgcattgttttgcatccttttggcgtgatatccatatgaaattcatggctttttctttttttgcatattaaagataagacttcctctaccaccacaccaaatgactactacacactgctcatttgagaactgtcagctgagtggggcaggcttgagttttcatttcatatatctatatgtctataagtatataaatactatagttatatagataaagagatacgaatttctatagactgactttttccattttttaaatgttcatgtcacatcctaatagaaagaaattacttctagtcagtcatccaggcttacctgcttggtctagaatggatttttcccggagccggaagccaggaggaaactacaccacactaaaacattgtctacagctccagatgtttctcattttaaacaactttccactgacaacgaaagtaaagtaaagtattggatttttttaaagggaacatgtgaatgaatacacaggacttattatatcagagtgagtaatcggttggttggttgattgattgattgattgatacattcagcttcctgctgctagcaatgccacgatttagatttaatgatgcttcagtggaaatcaatcagaaggtattctgaccttgtgaacatcagaaggtattttttaactcccaagcagtagcaggacgatgatagggctggagggctatggattcccagcccatccctgtgaaggagtaggccactctttaagtgaaggattggatgattgttcataatacataaagttctctgtaattacaactaaattattatgccctcttctcacagtcaaaaggaactgggtggtttggtttttgttgcttttttagatttattgtcccatgtgggatgagtttttaaatgccacaagacataatttaaaataaataaactttgggaaaaggtgtaaaacagtagccccatcacatttgtgatactgacaggtatcaacccagaagcccatgaactgtgtttccatcctttgcatttctctgcgagtagttccacacaggtttgtaagtaagtaagaaagaaggcaaattgattcaaatgttacaaaaaaacccttcttggtggattagacaggttaaatatataaacaaacaaacaaaaattgctcaaaaaagaggagaaaagctcaagaggaaaagctaaggactggtaggaaaaagctttactctttcatgccattttatttctttttgatttttaaatcattcattcaatagataccaccgtgtgacctataattttgcaaatctgttacctctgacatcaagtgtaattagcttttggagagtgggctgacatcaagtgtaattagcttttggagagtgggttttgtccattattaataattaattaattaacatcaaacacggcttctcatgctatttctacctcactttggttttggggtgttcctgataattgtgcacacctgagttcacagcttcaccacttgtccattgcgttattttctttttcctttataattctttctttttccttcataattttcaaaagaaaacccaaagctctaaggtaacaaattaccaaattacatgaagatttggtttttgtcttgcatttttttcctttatgtgacgctggaccttttctttacccaaggatttttaaaactcagatttaaaacaaggggttactttacatcctactaagaagtttaagtaagtaagtttcattctaaaatcagaggtaaatagagtgcataaataattttgttttaatctttttgtttttcttttagacacattagctctggagtgagtctgtcataatatttgaacaaaaattgagagctttattgctgcattttaagcataattaatttggacattatttcgtgttgtgttctttataaccaccaagtattaaactgtaaatcataatgtaactgaagcataaacatcacatggcatgttttgtcattgttttcaggtactgagttcttacttgagtatcataatatattgtgttttaacaccaacactgtaacatttacgaattatttttttaaacttcagttttactgcattttcacaacatatcagacttcaccaaatatatgccttactattgta

SEQ ID NO: 16981 - DNA, 1143 bp, Homo sapiens
accatcactaatatttggaagtatttcattactaacaatctcagtacaacatgaaaattgttgcttctcatctaaaatacaattttgtctatcagaataaacacaagtgaaattttcacctacattaacattatgtctttgcagctttaggtttgttagatgtgttcttaagcataatttttagccacaaacccattgttagatagatatctatggatatagatctacatctatagatatagatatacacacatatatatactcacacacatatagcataaaatactcagcagggctagttattccgatttcttgcacaattatttagctttttgtaagttcaacatgtaaattttaaagacataaatatagagagacttatgtgtttgaatataaatgatatatatggattagcatgtacctgtatattattaaacatgcaatgaactgactggtaagtgacgtctaattgtatggctagcaatgtaatttattcagactgtatttttgtacagagcagtgcactctaacctatgcctctgtgtcctctttaatgcctaaagctgtgcctagaaatttcatctgtcttaaaagtaaaatatacttcatgctgtttatgctattagtttctgtactgctattctatatttattatttttaaatatatgacatgtttactacttaaacatgaattcatggtatcctggttattttttttaagtcatctgggggaaaacctgtttatcactccagtgattttgagtttgcagtttcacaatcagttcttcatttcatgatttttgtagttgacatgaagtcatctatgtggaaaaaaataaaaataaaagtgatttcacggatgtggtttgaatttgtgtcgtctctgttgtgtaaactctttagacaacgcttctaaattacatatattcattacattttctccttcaaaatatatattatttagaaaacatcttaatatgacatgctgattttacttgaaaacatttttaaattttttattacaaattatctcccaagatccttctattctccacagcctttgcacggtcagtgataaagggatactattaaatatcttttataaccttctgttttaaaatgtactcaaaggagatgtagtgc

SEQ ID NO: 16982 - DNA, 1859 bp, Homo sapiens
tttgcttttctttcagttgttttacaggtttgcagcctggtcctttacccaatcaagttcattgaaactgtgagcttgaaaatttaccatgagttcaactggggttatggcctggcctggggtgcaactatattttcgtttgggggtgccatcctttattgcctgaaccctaagaactatgaagactactactagaaccaatagtctcaaagtaaaaacaaccaccaccatccaacaaaaggattacgtctgcatcttttctaacttactattttctaaaacacttgtggagcatcaagcagtttgctcagttgatttaatcttttttgccttttggctgtcaacatcataaccagcttttacatccattttagaaatctgcacaaattaagagagctgattagacataggcaaatgctgcaaacttccaatatgttcatatcgtttttcttgacaaatgaagggtctatatgacagcaaccattgtgagaaactagttggaatgagatttgcctcaatctcctattgcctgcaggggagcagttggcataagcaacatttagaagttcctttgcgctgacaaggattccactgttagagcccttaccgcctgcttatcctacccaatgactacattggctgttggttatttgcttgagtgagcccttgaaaaatgaactgcccttcagcatctaatgggagttgtgaatgtaactggttaatgatacacattccaccttcaggaacactctttttaatgggaggttatgctttggcaatcagcgtctccctgggaagagagtcaagacttggagacatgtgcttctcattatgtggttagaaattggtgcctcagccctatctagactggggaaaaattgaggatctctgtttttcctggggcaaacagaaagaaatctgcatgagttgcttttgtaccctttaaatcatttgccaaacattgcagcaaacaagtgtgcgtatgtaacaagcttcactgtttttatagaaggtgaaccattagtataaatggtaataagttgttccctaaccctccacatacatttgcctatcacacgtaaaattaatatttactctagtgaagtggtttgagcactaaccttgtacacattgttaagaggcttagattggtattcatacttatttaccatacaaaagtatggtaccttaaagcttttgctctatgttctttactgtttcactggaaagtgtcaatagagttgcctaagaataaaaattgaaatggtgttaatctgaaaattaatgattctctgtaagcactgtagttgaaaagagagtagcaattaggatgatcattttgtgtaaaattcattaaaatagaaggctgctattttttgcaagtattttaaatgtcttcatttttttaagaaaggaatagcgatagatttatataaatatctaaatgtctcagtagaggagtagaattcatctggttatcacctggtcctctgaagttaactgatgggctaaccgatttgtgcacacacttaggatggatttatgttaagggaattacttactgactgttcaatggaaggaagtattaataatagggaataagtttgcaactaatctcatgctgcaaacttgtgttaattctgtttaatatacaaatttggatagcttaattataaacatatttttatatcaaatatacagttctaatataaaagttataaataattatttttgttaacaaagacactaaaacagtatgttctggttttggccctcttgcagaaagaagcattagaaaaattactttaaaagtagctatatgttactgtattgcaaaatctgttaagagcaggaccaca

SEQ ID NO: 16983 - DNA, 1141 bp, Homo sapiens
ccattatttctaccattaaaatcttgaaagcgaaatacttgaaaagaggtgaccataaagatcacaccaatttagaatgaatattaaagtctgagaaatttacaaaagggactctatggactcgattttaccatatggaatagggatccacttctctgttaacctacaaaacgtatttatctggccattgcacttcggataattttcatttttaattcctcttggtgtcaaatttttaagtaatttcatgcacacaggagaaaatgcaatttgataatcagtttccactacattcggaggtcaagaaagcagtatatattctttcacaaggcatccatactgtttaatatttatagagttcatagaaatacatcaataagctcctaaattatagagcctcaattttggtttttctcatttgaaatgtttttgatttatcaatatttgtggtttaactttgtgggggtgtccaggcagtagatcattttttgtctatttttaaccaaataagaataacactcaagactatgttctccatcccaacacatcacttaccacttgcactattcttaataggcctaaaatagtgagcatatataatcaaaataatacttcatacaacatatacttccatgcactcttcatgtaatcacatatgtgcatagatacacaatcgtattacataaaacacccttgaaaatatatgactttgaataaaataaagctaccatgttaatacatcattttttgtttcttcctaattaacaaaagggctctataatgattaggagagctgtaaggccattctttagtcattccaagtgtatatttgtatcacaccagttacttgtgttcattgacaccaaatattttcaagctttttgtgagaaagagattcttgccttgaggctctgcagtggcaaatggtaggggcaatagcgctcccttttcacctgaaatgccttcagctcaggccttgggagtgaggtgtgggagtagccaccagcctcccactgactaggcatgttaggaattagacaaggatggagagactggttttttccagccttggtttggaagcttgtctcaaaaaccattacaaaatcttaaccttcaaatacattctaaatcactttaattt

SEQ ID NO: 16984 - DNA, 1208 bp, Homo sapiens
cctgtccagcactacaacttaattgctctatgcctcagtttccccataatacccttttccaacctacctcacaaggttatcagaaagatcaaattaaataatagatgtgaaaatgctttgaaaatgtttttaagtgctatgcatatttatagagttattatagttattcaaatccataagcaggttatttttatttttttactgtttgaaaagaaataagtagtgtcattcatatgagttcctgagtggatatgcgaatctttggtcttctcgacaggtgccctttctcttaccactagttgcttacaaaaatagcacccaaacacatggcacttggaagaaaaagacccactgaatctgagaaagtactttctggtggcaaatgaatttatcattttagtatagttttcgataaaggatatagcaacatcttttgataattgtgctttacaacttgaatgctgattcaaggcattatttggatgtgagtttaatcttttcagccttgtaaatgggaaaatatatattaaaattgattgtcaaatacagcatttctttggaaaccaccttaaaacattagtgctatggttatgagtgtatgtgccagtacttaccagtcaatgcattgtggatatgagctttcgttgactgcttctctgcagtcgttgatgctaataaatattgtcctgtttcttcatataataaattaatttttcaatttctccttgtatttcattctttatacaattcttacatggcctttttacttcagggactatttttaaaacagaaattttaaaattgtttcattgtaactgattatagttttataaactcacctggaaattacttctgtaggctgagaaatttgagagtgctaagattcagccttgcagaacaacaacagtccatgaaaacctctctgattgttttatagacatttactccacttgttaaaattacactgctggatactaagattctgttcagttgtccatcagttgccatgcacaatacaaaaaagagaggcaatacacatctcttctagacaaacataaatatatactgattcagaaatataaaacaccaaagaaatggcttggtattaacatacataatcaaatgtaaatggttgggaaaaacatcagtcattaaagggatcatttcagagcatgagagagacatggactgtttcaataattcctttg

SEQ ID NO: 16985 - DNA, 1911 bp, Homo sapiens
tgtatatatatatatatatatgtgtgtgtgtgtgtgtgtgtgtgtgtgtgtgtgtgtgtatatgtgtgtgtgtgtgtgtgtgtgtgtatatatatatatatattctctgataatttttatgttttgctggtatttcaaaatcctttttttgtgtttcaggaacctgtaccgtaagatgggagaaccggaccatgaactgtattgtcaacgtttttgccattgctattgttctttaactgactaaaaatgttgggctaaagccattaacttaagaatttgtcagtgtatcctttccaaaaagagtaatagttgtttactagtgtgctagatgaaaagcgtgcaatatgctttaaagctatcaacaaaaactgaatattataagcaagcaatatcatagtaattggcagattagctcatattctatacagcatcgtttaaataggaaaaatttaatgctagcaaaaaataaatttagaaatatggcatgacatgaaaatacaatcttatatttacaccagcttttcactaatattttgtacctaaggtgatggggaactccattcagataataaaattctctttcagctagagaagttaacaggaataaatatatgaacaaaaaagctgcaaggataaatgtggagaaaatgatgagaattagctaacatttttaagtttttttaaactttcttcccctcagttgtacttaatatttagtggaaagtaataatttttttaattttctatcaactaatagtatagtaacaactatgattaacttgtttactttttctgaggattagtaaatcaattttttttaatttcaaatttttggatttacacttgagggtaaattaaatctggtaaactgaatttcctagttaaataaaattagttgcagtatatgatgaacagtgtatgactcaaacagctgccttacaattcactcattccatgtggaacaaacatttatcagatgcctattatgggcatatgtctctgctaagcaccatagttgtcaatgtgctgtgcaaatgctaagttccttttagcaattgttcagttggaagacgtattaatatttggggaaggaaaagaaagtagttgttttacaagggaggaaaaaagtgaatctggttacacatatggaagtaagcaaaatgaaaagcacttattgctttctgacagaattatagatgtaattttaagagttgctcctagcaagttaaaagtgcatataaaatatgcaactcttagttaaaggccttattatcagtcttacctatacaagtagtaaattttgtcattgctttagttacaaccatctgtaaataacttaaaagacttattatgtggggttcaaattgagtggaataaagtatagattaaaagtatacaatccttagcacgttatctcagggcttatgaaatgtaattaaatttattaagaaaatagatgaaaaattagggtacacagctggccaccaaatgcgaagtcaatctgctacttaaccctgaaaacaaaatcagttttgcatattaccactaacactaatacatatagagagcggaaccataactcattgaattttggagaggaataagcttagcgttaatattgacaatattaaggcaatattcttgtaggaatactatgtgcatgtttgatattttgccaaataacaataattaataattgttcaatgtttaagaataatattaacaaaataaaggagtttaatgcagtgatctttgtttttggcacatcaaaaattctcagtcattattcatgtttctttatgctgctggcttttgtgccctggaagatcataatagtgaccaaaatatacatgcagacttgttttttattattgttgtttaagcataatttaagaaaaaaaatttttacct

SEQ ID NO: 16986 - DNA, 1269 bp, Homo sapiens
ccccttaccccacaacgtgcaactgacactcccacccagtctctgctccacctttcagcccacgtcacgtgtagtgtccattttgtgaagccctgttgtgccacagagtgtagccaggtccccctgcagctagtcctagtgaacctcaccccgaggccctgcatgggccagcccctccatctgtacttggtccaactgcaactcatcatcggtgactggttatcacaccatcgctggcccctttgggccctgcatgtagtgtgggaggctcctgttagctcctcactgtggtaaatgccacacacctttaagtagataagcagacgatagttatctgttcttttgacttaatctcatttggtttgattttccctctactaaggctttcctaccttcttcaggctgcctaagacatgtaacgaaacacttcaataattgtccatgaggagaaaaaaagcatgtgtcatgcatgaaggaaactgaacttgaggtggcctccttgcttgttacatacctgggtatgtgtaggcagtttagtgcatctttgcctctcggttgaaacctgtataaccctgttacaaagctgtgttgttgcttcttgtgaaggccatgatattttgtttttccccaattaattgctattgtgttattttactacttctctctgtattttttcttgcattgacattatagacattgaggacctcatccaaacaatttaaaaatgagtgtgaagggggaacaagtcaaaatatttttaaaagatcttcaaaagtaatgcctctgtctagcatgccaacaagaatgcattgatattgtgaacatttgtgatatatgtattaataaatagagcaattacaagcagctgtgttctggttctgttctttggttcttatgaaagttttaaaacacatttcttttccatcttgctcttcaggacatcgcaggcaggtggaccatctcacacactgacacacctctccatgtgtgctcccaccccactaaaatagcatcagcagcagagaagctaaagggttaggtttttttaattattgttatggacacttcagaaactttaaccatttatcatgaacagaatacattgttgtctgtggaaatagagccttcatatcatttcaggcctctgaaatccttgggcctgaaatccgtgaaataaatacaaagatttcagctgagtttttaaagtctggatttcattttgttaaaaaggaaatgagcctctattctttccttcatcgcttctaatga

SEQ ID NO: 16987 - DNA, 1192 bp, Homo sapiens
gttaagttttagagaaaagggatcttttttttttttatttgagacagagtcttgctctgtcgcccaggctggagtgcagtggcacgatctcggctcactgcaactccgcctcctgggttcaagcaattctcctgcttcatcctcccgagtagctgggattacaggcgctggccaccacgcccggctaatttttgtatttttagtagagaccgggtttcaccatgttggccaggctagtctggaacccctgactttgtgatccgcccgcctcggcctcccaaagtgctgggattacaggcgtgagccaccgtttcaggccgagaaaagggatttaaaatgagaagcttgaatcttattgaacataattgtaggactgccagagaggactggtggatgaggaatatggcaagggacatgagatgggaaaaattaaataggctgtggtttggaagtctcaaagtgaaattcaaggtgcaaggctcttaaaagttaaatccagcgattcggtacatagcttaggccctattaaatgacccagtgctttaagaactatcttttgaaaggaacacttcacacaagcaccctcaaaaataattagacacctccccatttctctgttaaatggtgaaagacacccaagactagacctaactactgtcaccctctcctggcctcttggcagccaaaaggccacatggcccaggctctccagcatcactgtgtagccgacttggacaaaaatggacttctccccattgccacttgcagatctcttcaaagaatcagcagatctgatagtgtgcccctcttcatccccggcaaccactgttaaaggaaagattgggaaagatcccaccccgccaggagggaggcaaaagcctctgacgctcccctccccccatagctgaccaaggccagggccactgcgggagcaccgcgcgtccacgtgcacccagcatgcccggtcaccctttattacgtaagagtcccaggatggagttgtacctgctgccggcccctcttccccgacggctaataataaacccgggttcctgtttcccggccgcggccactccagattcggggctgaggggctcactctgcaaccaaggcacgtgcattctggtcatcccacgcggggagcgcgcgcaaggcccgcccagcccccacatgccagccccaccctccagtc

SEQ ID NO: 16988 - DNA, 1141 bp, Homo sapiens
ggtttacatgttccaatatgactccacccatagcaaattccatggcaccgtcaaggctgagaatgggaagcttgtcatcaatggaaatcccatcaccatcttccaggagcgagatccctccaaaatcaagtggggcgatgctggcgctgagtacgtcatggagtccactggcgtcttcaccaccatgtagaaggctgggcctcatttgcaggggggagccaaaagggtcatcatctctgccccctctgctgatgccccaatgtttgtcatgggtgtgaaccatgagaagtatgacaacaacctcaagattgtcggcagtgccttctgcaccaccaactgcttagcacccctggccaaggtcatccatgacaactttggtatcgtggaaggactcatgaccatagtccacgccatcactgccacccagaagactgtggatggcccctccgggaaactgtggcgtgatggccacggggctctccagaacatcatccctgcctctactggcactgcgaaggctatgggcaaggtcatccctgagctgaacgggaagctcactggcatggccttctgtgtccccactgccgtgtcagtggtggacctgacctgccgtctggaaaaacctgccaaatatgatgacaccaagaaggtggtgaagcaggcatcggagggccccctcaagggcatcctgggctacactgagcaccaggtggtctcctccgacttcaacagcaacacccactcttccaccttcaatgctggggctgtcattgccctcaacaaccactttttcaagctcatttcctggtatgacaatgaatttggctacagcaacaggatggtggacctcatggcccacatggcctccaaggagtaagacccctggaccaccagccccagtaagagcacaagaggaagagagagaccctcactgctggggagtccctgccacactcagtcccccaccacactgaatctcccctcctcacagtttccatgtagaccccttgaagaggggaggggcctagggagccccaccttgtcatataccatcaataaagtaccctgtgctcagccaaaaaaaaaaaaaagagagagaaaaatcttggcttacattttgactttgtgaaaattactttac

SEQ ID NO: 16989 - DNA, 1307 bp, Homo sapiens
cctgaaagtaaggagctgttagatctggtggaattcacgaacgaaattcagactctgctgggctcctctgtagagtggctccaccccagtgatctggcctcagacaactactggtgagcaagctggacccaccatgtacagtgtgttatagtgttaatccttgtgcatatgtgtcataatacaactatttctgtaaagaaaggacactattacatatgaaaatatctcttctttatataagagaaattactccagtcagaaggacttagaaacatgtttttttccttttaaacttttaagtcagtttttatgaagttgttataatgtttctttacttttcaatgcacacatgctttgggatacgtttgtttttacttggaacatttgtttcttttcttttttaaggagaaaaaaaaatgagtaaaaggagctccacactttgacttaatttcatacaaagctctgatgacaggccatgactgtagagtggtcagaactgtgtggttggtttgagggagcgaattcggggaaggcacttggtgatataactttgttttgtttacagagtacctgctcgggccaggtaaatgctattggatgtaatccagtagtgtgtaatataaattcaaaccatatccacacacaacaactaattgtatgaaacttttatatcctaatttaaaagctgtgaaattagttttcacgcatcaaaccggattgtttatatgtttaaacattttatgctcttatttaaagaagactttgagctatttttttctgtaccctgtaaaatattgaaaactaacataatatgttgaggttgcttggaaatgtacataaaactaaaattttctgaatcgtgtgtttatgtttgaaatctgtgttttaactttgtaagtaaattctctgcctttgtatttatattttacaaaaattttcttaaaaggcaataaaactgttgaggaaaggagaaaattgaagtaccttgtgtcccatgtattcctaaagcattattgttgtccctgattcttcttaaatggtgctggtgatgtattccctatagataactttagagcaatttatagtctctggaaaccaaagcagactggaggattttggaggagttatactcagaatataatttggagtcctattctgaaagcccaattcttggacatatttcctgtctcttagaaccttctctttcctgtctcctttgatgcttatggaggcttttgcactgcctttggccttgacctatttcagtcccacgtcatggccaactctctaggagtgttttttctgaa

SEQ ID NO: 16990 - DNA, 1221 bp, Homo sapiens
gtccattgcgcagacaaaagcctcccgtggaagatgggcgtcagccctgggaatcctgttgattcccacgcctatcctcacatccagaacagtaagcagcccagggttccctctgccaaggcggtcaccagtggcctgccgggggacacagctctcctgttgcccccctcgcctcggccgtcaccccgagtccaccttcccacccagcctgctgcagacacctactcggagttccacaagcactatgccaggatctccacctctccttcagttgccctgtcaaagccatacatgacagttagcagcgagttccccgcggccaggctctccaatggcaagtatcccaaggctccggaagggggcgaaggtgcccagccagtgcccgggcatgcccggaagacagcggttcaagacagaaaagatggcagctcacctcctctgttggagaagcagaccgttaccaaagacgtcacagataagccactagacttgtcttctaaagtggtggatgtagatgcttccaaagctgaccacatgaaaaagatggctcccacggtcctggttcacagcagggctggaagtggcttagtgctctccggaagtgagattccgaaagaaacactatctcctccaggaaatggttgtgctatctatagatctgaaatcatcagcactgctccctcatcctgggtggtgcccgggccaagtcctaacgaagagaacaatggcaaaagcatgtcgctgaaaaacaaggcattggactgggcgataccacagcagcggagttcatcatgcccgcgcatgggcggcaccgatgctgtcatcactaacgtttcagggtcagtgtcgagtgcaggccgcccagcctccgcatcacccgcccccaatgccaatgcagatggcaccaaaaccagcaggagctctgtagaaaccacaccatccgttattcagcacgtgggccagcccccggccactcctgccaagcacagtagcagcaccagcagcaagggcgccaaagccagcaacccagaaccgagtttcaaagcaaacgagaacggccttccaccaagctctatatttctgtctccaaatgaggcattcaggtccccaccaattccctaccccaggagttacctcccttacccagcccctgagggcattgctgtaagtcccctctccttacatggcaaaggacctgtctaccctcacccagttttgtta

SEQ ID NO: 16991 - DNA, 1189 bp, Homo sapiens
caaccagccccgcctttcacagctggcgtccgtagccgggcggaggcacacgaccaggaaagacagacaccctggttggagaccgtcgctcgagactggcagaaagatctgcactcgggaggcaccctcaccccgtgggctccgggacccctcgactagctccatcacccattccgactacccgccctacgctccacctcttgacccgtcatcaccgaccggggggcgggactgcccgacttttcaatcgctgcctaccattggtagaactctccatccgttactttaagtcccgcctatcaggctgtcgcttcccaggttacgtcccttccgtaggccgcggcgtaactggtgattggtggagaaagcggcagctgtcccagcggaagcgacgaagggacgggacccgggagcctggacgagtccgagcgcgtcacctcctcacgctgcggctgtcgcccgtgtcccgccggcccgttccgtgtcgccccgcagtgctgcggccgccgcggcaccatggctgtgtttgtcgtgctcctggcgttggtggcgggtgaggagccgggggccggcaggacgtgcctggggaggtcctgcgccgcggggcttgggggtcgggggcggccgcgggcgagtagctgcgaggcaggtgccgcagtgcggtccgtcagcggcggcctcgcctcagccgcgtccccgtcagcatcttctctggatcggccgtggcggcgcggcctcacgggccgccggggccggggctgggctgcgtagggggcccctgagcctgcctccaccctccactttgagggcggcgcgtccggccggcttcttgcgcctgaaaaggcccttcagagtacggagatgcatttctcagtgaactgggattgagtcgcagcccgctgcgaagaagagaaggcagactttttagctgccactggctgccacgatgtttttgcatttgtatggtgccttcatttctagtggttgtcatcagtaattgctgaaatccctgcccctcccttcccttatgtatatttccggatgcaaaagttgagatggagtcattatttttatatgacttatatttcttaaggcgaatacaaagcacctctcaatagtttgtcagagttccaaattttaaggatttggaaacaggatgtgagtcgcatttttagggtcacatgtcaat

SEQ ID NO: 16992 - DNA, 1642 bp, Homo sapiens
ctgggataatttcctattttaaaattcttccctcttgatttttctttcttttctatattgtagaagaacccagcaagtccctataaccttgcatataagtataattttgaatattccgtggttttcaacatggtactttggataatgatcgccttggccttggctgtgattatcacctcttacaatatttggaacatggatcctggatatgatagcatcatttataggatgacaaaccagaagattcgaatggattgaatgttacctgtgccagaattagaaaagggggttggaaattggctgttttgttaaaatatatcttttagtgtgctttaaagtagatagtatactttacatttataaaaaaaaatcaaattttgttctttattttgtgtgtgcctgtgatgtttttctagagtgaattatagtattgacgtgaatcccactgtggtatagattccataatatgcttgaatattatgatatagccatttaataacattgatttcattctgtttaatgaatttggaaatatgcactgaaagaaatgtaaaacatttagaatagctcgtgttatggaaaaaagtgcactgaatttattagacaaacttacgaatgcttaacttctttacacagcataggtgaaaatcatatttgggctattgtatactatgaacaatttgtaaatgtcttaatttgatgtaaataactctgaaacaagagaaaaggtttttaacttagagtagccctaaaatatggatgtgcttatataatcgcttagttttggaactgtatctgagtaacagaggacagctgttttttaaccctcttctgcaagtttgttgacctacatgggctaatatggatactaaaaatactacattgatctaagaagaaactagccttgtggagtatatagatgcttttcattatacacacaaaaatccctgagggacattttgaggcatgaatataaaacatttttatttcagtaacttttccccctgtgtaagttactatggtttgtggtacaacttcattctatagaatattaagtggaagtgggtgaattctactttttatgttggagtggaccaatgtctatcaagagtgacaaataaagttaatgatgattccaaatttgtgtcattgcagtactaaatctattttatattgtaaaaacctaacaaaacaggcttttctttcatcaggattggctgttttgttgtacagataatttcatggtgtttcttttacacttgtttattctcgctgcctcctgagatttagtactaatgtaaggaaggcattttaattaccattcttgttactgaatttatataggatatatgagaaatgcatactttatgtaggaaagggttacatttttctatagcttttttttttttaaattaaaaacattttagagaccagtcttgctaggttgccaggctgaactcctggcctccagtgatcctcctacctcagcctccccagtagctgggattacaggtgtgcaccactgcacccggccctgtagcatttttaaagatgaataagcaactaattggttagaatatgaaggactgtctcaggtaaaggtttaaggtaacaatttgttttctttttcaaaaaacaggat

SEQ ID NO: 16993 - DNA, 1096 bp, Homo sapiens
cctgcgcactgccgtccgccacgccccgcaacctcctggttccaagtgggagacatggtgctgtcggagctagcggcgcgcctcaactgcgccgagtacaagaactgggtgaaggcgggccactgcctgttactgctgcgcagctgcctgcagggtttcgtcggccgcgaggtgctctccttccaccgcggcctactcgccgcagcccccggcctggggccccgcgccgtctgccgcggcggctcacggtgcagccctcgcgcccgccaggtgagcacctggctcggggccttgaccaccgcccccaccccacccctcctcatccccgttcctgtcccagacccagagcgcaagtgtcctgttccctccgcgatgcggggcccaccgcgacgtccctccctcctgggcccctcctcaccgccgccccctgtagtttcagcctcagtgtcaggtgtgcgctgaatggaaaagggagattttgagacatcatgtcaacagaaatggagatgtgcactggggaaactgccggccgggccgctggcccgtggacgcctgggaggtggccaaggtaagcgcctgaggcggggacggaaggaggaagcggcgggtcacccagcactcggggtggctatctggtcttgtggtcgccggggcctcataaacagatgcagagagagagattgatcaagggtctaggcggttcaggggtggtatgcgggacccaacccagcttagtgaagtagaagctttcttctacccgtctgcttcctgagggcatttgagtttgttacccctgcttggaaagttacaggaaagagttctacaagagatactggggcaagatgcagagcgagcatcatgagcacaggcagggagggagggagactcttgtgtggcctgtttgagggtaaggctcgctgaacagctcatcagctcttttttggctataggatgccgtaaggatgacagagtaagccaagggaagttagggctaaaatagcaccttaagtgcccagttaaaggcactttgggtagctgggaatggggtaggcagccggatctgtcttcagatcttggcaatgtcacttactaagta

SEQ ID NO: 16994 - DNA, 1657 bp, Homo sapiens
gcaggtctgtcatttttgaatactgtaaaactgtgataaactttatattgaagctgtattttaatatgaccgctttgaatccttacatgaaatgttctgggagttgttataaacacaccccaaggaagcaatatttaataaaactaggtcaaaaacaaaacaaaacagtgacactcacttgtgtgtatataaactctagagacatcttaggccctcccttcatctttaacctggtggatggagccagttattaatttataataatacatgtctgaaatttgaccaaaaacatcttctttatgtcaaggttaatatattttcttcagacattcctaacttgactagtggttaacatttagcaccttggttgtctttcaatatataggatttgggtgaaaaataaggaacttagtctttgagaagggacagtatgtggttcgtattgatcaaggatcccaaataatgcaatcattctcatctgttgaggatgtgggaacttttctgtcaggaaaatttagtttacagaatacttctgcatacaacattaattaggaaacaaagaactttaatgctgtacctctgcatgaagtttctgtgagctttctttatcttgcttaacttatcctcctttccttccccaccaaaattgggattgttctaaacaatttcaatttaattcattgtcaacaaaacgatagaatgttttgcttggaagaaacctggtccattcccctcattgtgaagaatcccgaatcctgggcctgtccagggtcaaatggagtttttggtattaatacatctctgcagggtttctttttggagcactgtgctgtctttcctagtcagtcagggacttttttaagcttcaaagaacatggtctgatgcaaaggtcttctaccgacttcatggtatttaggaaaaatttttaagtgataataccatgccgagttacctggtcactgtaatactggttctccattaaaatgtagatgctttgtctaattccacttcaagatgatttaattgagcttctataactatcaactatcaaattctagtttcaagtatctcactgtacctatatcatatctgttctcaactttgtttgattctccactcattttcaatcagagttgaagccttctttgcctttcttctttgtcttatttctgccttcatctcccacttctcacccaactctgccactgttcaggagcagttgactaaacttttatccttcctttaacttaatctttttatccttctgtttttagttcttacagtggtaatcacatcagtttggcaatctaagatgtctttatcaagggtcagcccttttctatttggagctgaatcttttctttcatgtagaaatctacatgtatatacaagaaatgtatttttatctgcaggataatattgtttcaaataattttattaagagttaactttttaggtattttcccttttaatgtggttttgaaatgttaattgcatttttacacatgatgcattcagtggacactcttttttcctaattataactcatctctgaatgcattgtgccaatcaagagtaagataggattcagtgcgcaaaatttgcttttgatgcttattaagagtaaacccatgaatttgaatttttatattatgc

SEQ ID NO: 16995 - DNA, 1108 bp, Homo sapiens
tttggacctctgtgattccggaagttccggggcgttccggggcgttctggggcctttggagcgtgggataagcagtaatggcggaggctgcagctcccggaacaacagccacaacatcgggagcaggagcagcagcggcggaggcggcggagacggcggcagcagtctccccgactccgatccccacagtcaccgccccgtccccgagggcgggcggaggggtcggcggcagcgacggcagcgacggtagtggcggcaggggcgacagtggcgcgtatgacggcagcggtgcgtgcggcggcagcgacgcgtgcgatggcagcggcgacagcagcggcgacagctggactaaacaggtcacttgtagatattttaagtatgggatttgtaaggaaggagataactgtcgctactcgcatgacctctctgaccgtctgtgtggtgtagtgtgcaagtattttcagcgagggtgctgtgtttatggagaccgctgcagatgtgaacatagcaagccattgaaacaggaagaagcaactgctacagagctaactacaaagtcatcccttgctgcttcctcaagtctctcatcaatagttggaccacttgttgaaatgaatacaaacgaagctgagtcaagaaattcaaattttgcaactgtagtagcaggttcagaggactgggcgaatgccattgagtttgttcctgggcaaccctactgtggccgtactgtgccttcctgcactgaagcacccctgcagggctcagtgaccaaggaagaatcagaggaagagcaaaccgccgtggaaacaaagaagcagctgtgcccctatgctgcagtgggacagtgccgatatggggagaactgtgtgtatctccacggagatttatgtgacatgtgtgggctgcaggtcctgcatccgatggatgctgcccagagatcacagcatatacaagcgtgcattgaagcccatgagaaagacatggagttctcatttgctgtgcagcgcagcaaggacaaggtgtgtgggatctgcatggaggtggtctatgagaaagccaaccccaacgagcaccgcttcgggatcctctccaactgcaaccacacctt

SEQ ID NO: 16996 - DNA, 1283 bp, Homo sapiens
ggccctggtggccctgggatggggaaccgcggtggcttccgcggaggtttcggcagtggcatccggggccggggtcgcggccgtggacggggccggggccgaggccgcggagctcgcggaggcaaggccgaggataaggagtggatgcccgtcaccaagttgggccgcttggtcaaggacatgaagatcaagtccctggaggagatatatctcttctccctgcccattaaggaatcagagatcattgacttttgcttgggggcctctctcaaggatgaggttttgaagattatgccagtgcagaagcagatccgtgccggccagcgcaccaggttcaaggcgtttgttgctatcggggactacaatggccacgtcggtctgggtgttaagtgttccaaggaggtggccaccgccatccgtggggccatcatcctggccaagctctccattgtccccgtgcgcagaggctactggaggaacaagatcggcaagccccacaccgtcccttgcaaggtgacaggccgctgcggctctgtgctggtgcgcctcatccctgcacccaggggcactggcatcgtctccgcacctgtgcctaagaagctgcttatgatggctggtatcgatgactgctacacctcagcccggggctgcactgccaccctgggcaacttcgccaaggccacctttgatgccatttctaagacctacagctacctgacccccgacctctggaaggagactgtatttaccaagtctccctatcaggaattcactgaccacctcgtcaagacccacaccagagtctccgtgcagcggactcaggctccagctgtggctacaacatagggtttttacacaagaaaaataaagtgaattaagcgtgaaaaaaggaaagaaagaaagaaagaaagaaatatagcctctgagccaggtgtggtggtgcacacttgtaatcccagctactggggagactgaggcaggcggattgcttgagttcaggagtttgaggctgcagtgagttatgactgcattactgcactccagcctgggcaacggaatgagaccccgattcttaaaagaaagaaagaaagaaatggattgtggaaaatcatgagctctcagatgtataaaataatgggttgctggctgggcgcggaggctcacgcctgtaatcccagcactttgagaagccaaggcaggtggatcacctgaggtcaggagttcaagaccagcctggccaacatggtgaaaccccacctctacaaaaaatacaaaaattagcc

SEQ ID NO: 16997 - DNA, 1102 bp, Homo sapiens
tggtgtgccagatcttttcgggcctcccttccccaacttcggtcctagagccacctctgccctcgtcccgctcctgagccgaggggcatggaacaggatttctggccgtagcacgaccctgaaggggccagccggaagaaacagtactgcgcgaacaatctttaccgcattgtcttcccctcccccaccctagctctccgggttcccggcggctcgcgccgaagcccggccccctcagcggctcgcgctgctctcccagccttgacggcccggggtggagggagagaagagggggcagctgagcgggagggggctgggcaggagcagggggagggccgaaaggaggggcctgaaaggggcgggccctgacgggggcggagaacttcgggtcttgggcggctctggggctagtgggagtctgcgccgccgccgccgccgccaccgctgctgccgccgtcgccgctaccgccgccgccactggccgagcggtttttttttttttggtttgccggatccgccatattgacgaggacgggcatccgcggctgcggacgctagtctccgccgccgccggagccgcaacctctccgcacccggccccgtcagggcctctgtcgcgcctagcccctccccgccttacacagctcccgggcctcgcgggagcccgccgccgccgcctctctctcacgggaggcggccgccttagcgcccggtgcttgggtcggcgccgggagcgaggagcgagctacttcaaagccaccaggcctggagcggggacagaggcggcgactaggggaaggtgaagccgtcgctgcaggaggaggagcaggaggaggtgacgcaggagaaacgcaccgcccggagcccgtctgagctcagcgagagccccagcctgaggggagaaggggaagagggccgtcgccggccaaggaggaggaggaggcgggcgcggcgaggagcgagttccggcgccggtgtgcagccttttggttgagacgcccgcagccccgagcccggccgccgcagcctttcgatacactttgttgccggtcacccccgggcctgggatgcacccagggtaggtctcgtcccgggaccgagc

SEQ ID NO: 16998 - DNA, 1142 bp, Homo sapiens
cctcagcctccctggtagctgggactacaggcgcgtgccatcacgcccggctaattttttgtatttttagtagagacggggtttcaccgtgttagccaggatggcctcgatctcctgacctcgtgatccgcccgtgtcgacctcccagttctcatgttttatctatggaatgctcaagtaggatttactttagatcttttttcttccagagtcttgtttttaatatcttaaggtatgagatttctttgctatcttctcagagatttttctttgacatggtggtaataatgcagcttatggttttgaaatggatgtttgtcatgaatttgctaatcatccagttcttgattagttggtcacacaacaagtgtctttgagcttatttttatttaataagatcaatttctaacgttttagtttcaaaattttagtattaaaaccaatctttgtttaaaacagatgttaagaattagttatttgaaatatctagcagtgtgtgttaatggattagtgttcttctaagtcttttgggcagtgaaggtgaggggggtcttatcctgagattgagttagttgatttttattctgaaagaacgtattactttttatggtagcctacattatgtttcccctcttgtaggtatgttttctgagtcttgaattgtttttcttttttttttcaaaaagggaaaaaaccggattttagttgtcatttggttcttttaggagctgtgtttttgaaagccatcctgtgtattgctaagttcttgtattattttaacatagagtttaacgttaatatttgggaaagagttagtgcattggacctcaaccctgactggacatgagaatcacttggcggggttaaaaaacaaccacaacaaaaaaactgatccctgggttccacccccagagactgattaattggtctgatagggagcctgggcaaaggtatattttaaaagcattgtggatgattcttacatgcatttggagttgaaaaccactgggctattgtttttatcatgttgttagaactttcaagtggataaataagaaaatggatttttttctcaattgttttcagttattagcatgattatcatttgagcattaattgtctgtcagcactgttaagcattt

SEQ ID NO: 16999 - DNA, 1168 bp, Homo sapiens
gccactcttctgcttttggagcctggggcttggggtttatatgggcacgggataggggtgcgtggcaggccaaaagggaacacttgggcgtgaaaacaggaatgcctgttctcatttagggctgcaggtccaggcttgagccctcaccagggaccccaccctcatacctcttgtccttattcttacagtgtaatgaatgcatcagcaaattgaaaacagatagtttttgccgtttcttaatttaattaaaatgacagttaagtactttgatatattgcctttggagtcatttccaggaggctatatttgtttgttttcttggtataatggccagtgtaccaatgatcagttttaagttaaatgtagtattaatgaaacttcagctttttactttctcttcttgtttgtatagcccctttttcctgattagattcactggtgatactaaattcgaacagttccataattcatgttttttatatctaaaaccaattactttttcccctttctatttgtaggttatgcaatggtctctgcaagatggtttattcttgaattggacctttttaagactgacaaatgctggtacttcatcttctataagtggactataatttcttttctcaagacaactacataagcagacaaaattgcaaagatctgccctgtgtcgagtatgacagccacgactcgtggctctccggtcggagggaatgacaaccagggccaggctcctgatggacagtctcagccccccctccaacagaatcaggtaggatgttgaagatactagttaaagctacagtggggctggactcagtggttcacatctgtaatcgcagcactttgggaggttgaggcaggcagatcacttgaggtcaagagtttgagaccagcctggtcaacagggtggaaccctgtctctactaaaaatacaaaaattagccgggcgtggtagcatgcacctgtaatcccagctacttgggaggctgagacaagagaattgcttgaacctgggaggccgaggttgcagtgagctgagatggcgccaccgtactccagcctgggtgacagagcgagtctctgtctcaaaaacaaaaacaaaaaacctacattggtgggtctactgttggggtactaaatgatggaacatgttctaaataatttg

SEQ ID NO: 17000 - DNA, 1159 bp, Homo sapiens
ggattagatgaaattattttaaagcacagtagtacagagatggcctgaaacatcataaactttcaattattttatcttttgtaaaaatttacaatgcagttgtcccttagtattcatggaggattggttccaagacctcttaccacttggatagcaaaattggtgtatgctcaagtccctgatataaaatggtttagtatttgaatataactcatgcacatctttctgtatatacttcacatcatctctagattacttatgatgcctaatacagtgtagatgctatataaatcattattatgctatattgtttggggaataatgacaagcaaaaaagtttgtacatattcagcacataggcaattttttctgaatattttcgatccaaggttgttggttgactttgcagatgcagaacccatggatatgtagggctatttacaaaatttttaaatctgcaatgcttgtctatgttggtgtttggattactattttacatatgttatagaaacttaaatgtggaatgtttaatttttaattaagacttcatcgcctgattcttccaatgaaaattccccggcaactcccccagatgagcaaggtcaaggtgatgccccaccacagcttgaagatgaggaacctgcatttccacatactgacttggccaagttggatgacatgatcaacaggtgagttggtgtgtaacacccaagaaagagagcagacaggaaagtaaccccactgcctccttaatagtctttatagcttcgtcactgccaagtgctttataacccatgattcttaatagatttaataaatgaaagggagtgacagtgttagtaaaaatttcacattaatgatgatgaccctagttgggttgtttccgaagtaaaattgtatgttcagtttccctcttggagagtttatgaagtttttttctcattggtctcttggttgctggatgactttcataatttttgggatggcctgaggtaaatcaggtcatgaggacattgagttcctcagagcctgatcctagtgaactcttgactagtttgagctatttaaccatcctagatgtttcctttttttggtcttcatctcagggaacagttcagaatataatttttcacacttatagtacaaacaaccaccctat

SEQ ID NO: 17001 - DNA, 1273 bp, Homo sapiens
agcctcccgagtagctgggactacaggcacatgccagcacacgtggctaatttttgtatttttagtagagacagggtttcaccctgttggccaggctgatctcaaactcctggcctcaagtgatccgctttcctcagcctcccaaagtgttgggattaacaggcgtgagccactgtgctcagcctgacatactgtttagactctagaattgctgcctctcgtgtacaaattccacagagaaaaaatagtaacttgcatcttacctgtggacgtagagcaggaatagatatcttatggtgcctcttgtattttttaagccatagcaaatggcttttgaaagtaccatataaattatgaagtaaacaaattctaatttgtcctttgataatcagtttgatcccaatattaatgattagaaaaatggagagatcgttatttgttaggatacgattaatattggaagatatttctgtttgaaattgcagtgttttgatcttgtaaatcgcctttcccccttgtataacagaggtgtattattaacaatactcatcgtctggtggagctatgtgtggccaagttgtcccaagactggtttccacttttagaacttcttgccatggccttaaatcctcattgcaaattccatatctacaatggtacacgtccatgtgaatcagtttcctcaagtgttcagttgcctgaagatgaactctttgctcgttctccagatcctcgatcaccaaaggtgtgttggtttgttattttcaaaattaaataatacaattgttttgttctgacacagaatcttcagtgatctgtatttaaagtgtgacaatgaaataacactttaaatgaaaatacacacaaccaggagcctttttcgtagctttgtcgttctagttctttgttttttctgcatgtataattatccccattgtcttctgtccagcctctttagaagtagtcataatttgggttagtaggaaacagactgtattttttctttgaaatagagtaggagattacttctttgaccaaggactcaattgttgttctgtagggccgtgatcattttaggcattctaagattttgactccaaaatcaagtatatcctctaaatacctaataatacatcataaaattacagaaattgttaatgaaatcaatatagtaaatcttccaaatctcacttaaatatattgtgtacataaatgtaagttttctatattggtgtaaacagactgtacactttaaaaaatttttccctaaacg

SEQ ID NO: 17002 - DNA, 1152 bp, Homo sapiens
agatactagtaccagaccttagtttttaattgacaattgactctcaggctattagttactgtgtttatagggaaattttaatgttttacaactaaacaagaagtagattcaaaattcattaccaagtagcttcttcttaactctcttgaagtctttctgcctcctgaaaattattttaatataaaagactttacagtaattagaaggtattcattcttatatggtgggatatctgaaataggagcatgtcttctaattcctgttcaccacttacattggtacagacagacagaactatgccccagtgatttaatctatacttactacgtatactgcttctgtctcacagatggaattactatgaacaaaatgcaatgttttgtggtcctttgaaagatgatttattttattgaatttactatttctagtatatttcaataaggcttttttttcgtgctttttaccctttaaagtaggaagttaacttttttcattaattgtgttacagggttggctagtggatcttctcaacaaatttggcactttaaatgggttccagattttgcatgatcgttttattaatggatcagcattaaacgttcaaataattgcagcccttattaagtaagttacatttaaaaatcaatggttagtgcaccgtagaattgctggtttttgcttcataaaaattgagtttttcaagtgtggtttcttcaactaataactgggattttttaaaagtaatataaagaatttagtcctaaattgattttaagaaattgcgtatttacaggagttttgtatctttcttatttcagaccatttgggcaatgctatgagtttctcactcttcatacagtgaaaaagtactttcttccaataatagaaatggttccacagtttttagaaaacttaactgatgaagaactgaaaaaagaagcaaagaatgaagccaaaaatgatgctctttcaatgattattaaatctttgaagaatttagcttcaagggttccaggacaagaagaaactgttaaaaacttagaaatatttaggttaaaaatgatacttaggtaagatacttacctcttgaaataattgttaatgccgattttagaatcatacttatcactgaatttttcttacagattattg

SEQ ID NO: 17003 - DNA, 1169 bp, Homo sapiens
gcacagtgttacagaaaaacagactgtggaagcatatgacttgattcatattccaattctagcatctgtgagcctgtttacattttgtaatagaataatgtatctcttactaggattgtttggaaaattaaagagataatggataagcaataatagtgcctagcacatgataattgttaataaataaaagtaaaaaatagagagcctttttacccaaggtcaaaacataattctgtggcaaaattgggataaagaatccaaagatcctaaaattggtcctgtactcaccctaccatggtgattgtgtacttaaataatatttttctgagtaaatgctggagtgtagaatcttcttaatttcagtattatttatgggagcatttctgtatgtgcaaaattgttataaaatttcataattttccattaaagcaacacataagtatattttaccagtattatattttgtaaatgtgttttgaatttccttatattatttaataatagtgtgagcaattaagaaaaaattgttttaatttctgctttcaaacacgtttttgaattaacatttaggaatggatacagcagaacaatatcttatccatagtgttgcgagatagtcttcatcagccacagtatgtagaaaagttagagaagattcttcgttttgtcatcaaagaaaaagctctgaccttacaggatcttgataatatctgggcagcacaggtaaggaatttaagatgatggctatttagtttttaaaataaagatactaaaaactgaagaaatacagtagctgtcatgaaatggatgcaggcttgtattgtttgactttgagaacgtttaaatgcttgttaccctgccaggaatctttttgaaataaccaataatcttttaaaaataaaaatattcttttatctgtatttgataaaggttgagaatttgtcagtggttttaaataaagatgcaaacagtaaaatcataaggaatgtctattgaaagagagtaaagacatctgtaattggtttcttcatagatttaatagaaagcaaaaacctccagtgtcaggagaattaattcacttgattatttataaagacctgtaataattattccagagaatttataactcttcagaaggattagtaacctttttagtttttgagttggaa

SEQ ID NO: 17004 - DNA, 1216 bp, Homo sapiens
aacagaattttatttggcttatgattctggaggttgggaagtacaagaggcatggtgccagcttaaccgtgagttttgggggggacattcgaaccatagcagtaactttactcataaaacttttcccatattgcttagcagcatccctggtctctactcactaaatgccattagtaccctgcccttccccaagcatgataaccatgttgtattacaataccattttagaggttttaaaaaaatgtattttagagtttttaattgggtgtcttctaaattgaaatagtgtatcatttatttttcttttttggaatttaactctaccctataaaaaaaataccaggctaactatattttcagatctcacttgaatcattctgtgcttagctacgttgcttttgatgaatttgaatatagttaacctggtgacaatttatgaagtggtgactaaatatgtgttgttttcatgtcacttaatttttttctaggccagttggacaaatgcgagtaaaaagcaacgtgaaaagctacttgagctgatacgtcgtcttgcagaagatgataaagatggtgtgatggcacacaaagtgttgaaccttctgtggaatctggctcacagtgatgatgtgcctgtagatatcatggacctggctctcagtgcccacataaaaatactagattacagttgctcccaggtaagagtgtactgctttgctcactttttgtgacttttccccttcagttaggttggcttagttacaggatagttctgttactctgacattgttagtttttaaatgatcttccggagttgactttttttgttcattagtctgctttccttaggatctgtacatcaaggttttgtgactcatctgaaaagcattttagtctccttgggagaaagtataaacagaacagattatacagtggtggcattatcaagtgtatggttctgaaatgccgtttcgaatagaattcgaatgttaaagctgatagggacttcagagggaagagaaattaggttttctttgctcatagggaagttaagaaaaattaatagaatttcctaaccattaaaacatttagtgcctccacagtgagcaaatcacacagtttccctacattctaatttgtggcatgtgtattttttaacacatggtaaagtgaacattgctgagtaatttctcacatgttaataaaactatttgttaca

SEQ ID NO: 17005 - DNA, 1192 bp, Homo sapiens
ttctctccttgtacgtgtgtttctttattttgattttggcgattatttttaaatgtagttgtcattctatttattttcttagtcaaatatacattttttgtgttcttcactgtactaaaagatggcccatttagagtaagtcagggtcttgttatatattaattctggattttatgatacggtagaatctcttaaaatactggctaaatacctaccctctggcaaacttggaaaatgaaactttctgtcagtgtgcctaatacttaggatctgtagtgtgtacagatatatttcagtccatataatacaaagcttttataacagtgctgggctttttggagttctggtagtaagtgtgaaataaaaacaaacttaaagcttttattatttaaattaaactctttactgtaattacaacatgatgcttgtattgctaatcttaaaagaaaagcttttattttataattctcaaaataatttgaaaataaaattctcctgagtattgatctatttaaaacattgaaatcatttgtttaaggaccgtgatacacaaaagatccaatggatagatcgctttatagaagaacttcgcacaaatgacaaatgggttattcccgcactgaaacaaattagagaaatttgtagtttgtttggtgaagcgcctcaaaatttgaggtaagactttttaacatagaaaatttcaatacttaaaatttatgtactttattgaaaagaaacagcatattggctggcaaatgcaaatttttaaattagtggagtgagaagaggctatataagaagtgtttggaacaaaagaattctttattacatctacctcctttttttttattaatgaggaagtaagccacagttaagtgataaatcagaatcaaggtaatattgcctttgggttcttggttcagaattattattatatacatactatatttccagcaagtatgccaagaagtttcatagcatgtctttaaagatggattagaccacaagaacatttaaattgatgaaacatgacaagataaagtttcataatttttaaacatttattttagctaaatttctttttaatagctgtctttatactatcttaggtgtcatattctggttactgaaataatttgtcctattttctggtaatacagttggaactgataacatgaaaaggaaaaataat

SEQ ID NO: 17006 - DNA, 1246 bp, Homo sapiens
caggctggtcacaaactcctgacctcaggtgatccgcccacctcagcctcccaaagtgctggcattacaggcgtgagttactgtgcccagcctaagtcttttatttttaactcaagctactaaacatgcttctttccaaaagtctggtttcaaaaactaaaggttcatggaatgaatcttttattcctaattcagctagctgcatttcaggcacaaagtgggtgttcagtgtgtgcttgttgaattaattaatatctagtggggatttttttttagtaccagataaaagtagagaaataggttattttgaaagaatgaatatctttttatctatagttaaaatataatggtgataaatgtattttataggtaatacagattgcctttccggataaaaattacataaatctaattgccaattttcaatgttttttcaagatttttattgaaggatggtcagctgtggctatgtgctcctcaggcaaaacaaatatggaaatgcttagctgagaatgcagtttacctttgtgatcgtgaagcctgttttaagtggtattccaagttgatgggggatgaaccagacttagatcctgatattaataaggacttctttgaaagtaatgtgcttcagcttgatccttctctgttaactgaaaatggaatgaagtgttttgagcgattcttcaaagctgtgaattgtcgagaaggaaaactagtagcaaaaaggagagcctatatgatggatgacttggagttaataggattagattacctttggagggtaagtcaaaagtaggaactctgtaaatggtgtctgatgtactttttcatgtacgtaaggaattgtaattttgcatataaattgtgtattttactctgatgtttgtctcaggaatttggtgtagttaggaattgttcatttttattatgtcacctgtcagtgggctttttcttctctcttcctctccctcctcctgccactgatgttccttttgtcttagcttagtatctgtgtattccatagatgtgcactaaacatacaaatctttcattcctcccccgtggatattaatgttccttcccgagttttcattcagtgtcgatctgtttcctcctcttcaatgtttaacactaaaatagaggacagaagagaggacttgtgtttagtatagattatgagtatatgctttattggcactgtttaccttgtgatatttttaaatacctgggggaataaaatactatc

SEQ ID NO: 17007 - DNA, 1176 bp, Homo sapiens
caggcgtgagccactgcgcccagacctatttttcttttctttaaaagaagcttttacttaaaaaaaaaaaaaaaaattatcaaggtatttttttaatcatagggcagttaccttagatcatcaaaatactttccaaggttgattgactattaataaagttggaatatttggtagctaatgcttaattgtattttgggattatcttatttttcccccactgtgtcttttcaccgtaatttaaaattatgttttaatattatgacaaaaggacaaaagctctgcttgctttgaggtgaatgtacataggcacttaccctttttcgatgtttgctttttagggttcattttcttggatatcactacattcctttcagtgaagcaagccagttaatatatagtgtcagggggcaaacaataaagaggttagagggaagagtttataatttttttcttgttattttcagtcagaactacttccttttgaaatgtatttttttccatctccagtggctgagaggagagtatcttgatttgaggtccctgagtagcagatgctttgtattgagagtaactgattaaagagccctgttttttgtttttgtttttgtttattttttttttcttttttaatcattccaggtcttgtcatgtcttaggaagtttgagcctatagcccaactgagtggattgttattccatattagtatggtcttcaagatatcaaaagttaaatatgtatgaacacatgaattacattttcacactgtctctttttttcctccagatagcacaacgatagaaaaattaagagctatttgtttagaccatgccaaacttggagaaagcagccttagtccatctcttgactcacttttctttggtccttcagcctcacaagtgctatatctaacagaggttagtttttggggttttttgttgttgttgttttctttgtttttccttttaaatttattctgtgttctttaaatttgacctttcatatggtaaggtgaatgatttgggtaaaattgtaatgaagtagttttgaaatgaaatattaatttgaaataaataatagtgagatggtcaagagtttcttggcactgacaatagtacaaatagaagttattttttttttaaatcttttaatacagccctctccccctcttctctatt

SEQ ID NO: 17008 - DNA, 1200 bp, Homo sapiens
tatatatatataggaggggagttacaacttgaaggcagtcagaattacctcgctaacaactacgtaatgaaattaatctgtcactgatttaacaacttgattatagcattaagtaaaaactagggtacctttcatacattagtcctcttactgctttttcagtattccttaatttttcttttttttttccaaagaaaaatgtggtaacaatggggaatacaagcagggtctgcccaaggcatgtacataaaagatgtacaatactttactgagtctctagaagggaaccagtctatttagtgtatcattatcccctgcaagttaagctgaggccagatttagagacacgagttgattgctctagaatggggatttgcagacacgtggcactacagtgcacaaggaagagaggaagcccactttgttggcagtgctttttgtgtaagttgccacaggttctataatgtgtatatgcaaggaagtcgttctgcaggagtgggtgatgaatgaagagcaattggttaggtctggttatgtacaaattatttactccaaataaaatggttaacttttttcagatcaaccaagttacccatgatcaagcagtggtgctacaaagtgcccttcagagcattcctaatccatcatccgagtgcatgcttagaaatgtgtcagttcgtcttgctcagcagatatctgatgaggttagttttatcaagacttctgtcacaattttaactttcctaggcccacttattttaatcactgtctcattctatagataatgtccccttaatatcagttttgtctactattaatattagtactttctgtttttaatcaactttatgtataataaacagcatccttttaaagtatacagatggggtgattttttttttttttgagacggagtctcactctgttgcccaggctggagtgctgtggtgctatctcggctcactgcaacctccacctcccaggttcaagtgattattctgcctcagcctccacagtagctgggattacaggtgccacacccacccccccatgcccggctatttttttatttttagtagagatggggtttcatgatgttggccaggctggtctcgaactcctgacctctggtgatctgcctgcctcagcctcccagagtgctgggattacaggcatgagccaccatgcccggcccagatt

SEQ ID NO: 17009 - DNA, 1152 bp, Homo sapiens
aggcggagctcaggccataatgctcatttggccttctggcctggggtttggggacccctggtgtaagagacatctgccacaatagccttaccgtggttactacagaatttccacagagctgttgtgcagaaccacagttgaataaaaattctgtggaaggccaaaaagatgcataaggttattgtagtagagcatttggtatatagaggaacatttccagcctgttccaagaaagaggtgttagaaggtggtatccctcaaactcttagtgtcaatttgaggttatagtcctggacatagagcttaagttcatgtattatgtggtgttggcttgagtgcttgttgtgtgtaggtagggtaatcctgtatccttactattaatttatttcccttttatactccccccacctctcctccccaagagggaacaatgttacaatcattttttaaaatggaaataatgtattaaatgtgaaacattttttatttcagaactgttcgtcaggtggcacaggagcagttctttttaatgtgcaccagatgttgcatgggacaccggcctctacttttcttcattactctactctttactgttttgggggtgagactttttaaaatatgcttatcaatgtgattcattctttaagcaagaaacattcagaaatttgtggttttagcttgcattaaagttaggacagtctatatttaataaatgaagtactactttatttcccgcactgtggtagtcatcttctctagttaactctgggtttttaaaaaagtggattttgaggatggacgtgtaaattgatattattctactctgtttccagagcacagcaagagagagagctaaacactcaggcgactactttactcttttaagacaccttcttaattacgcttacaatagtaatattaatgtacccaatgctgaagttcttctcaataatgaaattgattggcttaaaagaattagggtaagttttagttaatactccatttatatgtcattattagtaaatagaatgttttattgatgatttatattttttgagcattttggttaaatggaaaactccaaagattgataaaagggaccaaagaatgtactctgcatcagtggacgttagtaatctgtgattcacaaaa

SEQ ID NO: 17010 - DNA, 1195 bp, Homo sapiens
tttagtttttctctttggaaaatctgaattgttaatttcatttaatgaggcaaacctctgttttgtaagaatgcatcttgtatatctttaatgagttttttcatacatgtagtaacacaaggaaacaaagtttcatttttgtacattttatttctattcaaaatgggtttaatttgctatacacttgattaaaggagcaaacatttaaaataaaaattttgataagtactatattcagttctttcttaatatttacaaatttatttaacctgcgaaattaggtatgttagtgatagtaaatagtgttttgaaggaagatctttttattagaaaatctgagttttctgagatgtaatgagatcttaaattccaatgagtaattttaaaatgatttacttacaagagaactttttttttctaaaaatatatagcattgctaatatgtaatccctttttcaactttttaggaattaattgatgatttcatatttcctgcatccaatgtttacctacagtatatgagaaatggagagcttccagctgaacaggctattccggtctgtggttcaccacctacaattaatgctggttttgaattacttgtagcattagctgttggctgtgtgaggaatctcaaacaaatagtagattctttgactgaaatgtattacattggcacagcaataactagtaagtatttttaatagaatgtgataattgatcatttcaatgtttcaaagttgttttcctgtttttctttcagaaaatatttccaacttacgtatttctttcagtaactagtttaacatttttagtgagtgaatgaacagttaagaccattataggccgggcacggtggctcaggcctgtaatcccagcactttgggaggccaaggtgggtggatcacctgaggtcaggagtttgagaccagcctgaccatggtgaaaccctgtctctacaaaaaatacaaaaattagctgggcattgtggtgcacacctgtaatcccagctactcaggaggctgagacaggagaattgcttgaacccaggaggtggaggttgcagtgagccgagatcgcgccactgcactccatcctgggtgacagagcaagactccatctcagaaaaaaaagaaaagaaaagaaaagaaaaaagaaaaataagaccattataagcagaccaccttgtatagaa

SEQ ID NO: 17011 - DNA, 1144 bp, Homo sapiens
gttgatatatttagataacatttcattccttgccaaatttgaaggcaaaagtatcaaatattaagaaagtgaataatggctaaaaataaagatgcaagtaaagttagcatgtagacattagaattatactatcttgtacttttgagactgccatagaagcaacatcatatgaaacgggtttgcgggtgattggataagaagctgcacagtggtgcctgttgctgtatattttagattgttggaagatgaagtgcaaactcagaacactgcttcaggttgctgtagggttagtcgaattatgggtggtagaattattgccagggttgctttgtcagcataatagagtttgaaaggacagaatggccgtgttcatgctacaagaatctttccttctctcagcttgtgaagcacttactgagtgggaatatctgccacctgttggaccccgcccacccaaaggattcgtggggctgaaaaatgccggtgctacttgttacatgaattctgtgattcagcaactctacatgattccttccattaggaacggtattcttgccattgaaggcacaggtagtgatgtagatgatgatatgtctggggatgagaagcaggacaatgaggtaaatttgagttaccatttctgttttctgtgtttcaagttatgataccagatactattctctcttaagagagtgttatactttcatcaaacgtattaaagtatatttgaaagttagggatgggccgagcacacacctgtggtctcagctactcaggaaactgaggcaggaggattgcttgagcctgggagctggaggctgcagtgagccatgatcatgccactgcactccagcctgggttacagagtgagaccctgtctcagaagaaaaagaaaaagtaagtagggatggacttctcccagccagcatgaactgctacctcttaacatagtatagttctcactacctaccagaatttaaactgcagataatttttagaatggtttgtacatttctaaagcaacagttggctgggcatggtagctcacacctataatctcagcactttgggaagctgaggcaggtggatcacctgaggtcaggagttcaagaccagcctggccaacatagtgaaaccccatgtc

SEQ ID NO: 17012 - DNA, 1148 bp, Homo sapiens
ccatctaggtttataggtacactatgatgttcacatgacaaaatacctaatgatgcatttctcagaatttatccctgtcattaagcaaagaatgactatactgatataggtatattttattgacagatctgagcattttatatacaacagctacacaaaggatatattacccccattcacacataaagaaacttgaagcctagaaagtttaagtagtttttacttgctcaaagttacttggtttataagtggtagagcctgcatttatgtctagttcagtctaaattactatgctaatgctacactatattatctatctttcttacacatggtcagggttatttggttatgataactaatatgtgaaatggtggggataaacactaaataactaaaaatttataaattgaaaagtgctttggaaatgagcataataggaatacaaatcatttgttcaataactgcttggcatttgtctcaacgtattttattatactttagctcattggtgacattttttggtttctagagcaatgttgatcccagggatgatgtatttggatatcctcaacaatttgaagataaaccagcattaagtaaaactgaagatagaaaagagtacaacattggtgtcctaagacaccttcaggtcatctttggtcatttagctgcttctcgactgcaatactatgtgcccagaggattttggaaacagttcaggtaaactatggatggacagtaatagagatacttcttaaaatgaacatctcaatacactaacattaaacctctaaaagacatgttggaaggcatctttttttaagcactggtaatattcaaactgtccttaattgggtgggtttttttttttttttttaggtccccttaggaagaagtagaaactgccatagtaagtaagggcaacatcctttagtctcttaaccatattattaactttttattaggaaaacatctaataaatacagaagtagaaaaaatagtatgaacccctgtatacttgtcacccaacttcagtagtagtcaacttgtggccagcctcatttaatctatattcttaacctattttttttttctttttttctttttctttttctttttttcttttttttttttgagatggagttttg

SEQ ID NO: 17013 - DNA, 1178 bp, Homo sapiens
catttaaatcagctgataggattatcttgattatgctcattgtcatgtatttgtttatacttaaaaattcagataagtcttaatatcatttaaaagtttgcttggggtttttttttttttcctgtggattttaatagaacatctggtaactttgtcttgtttattttaggttgataccgtaaagcgcttgctgattaaaaaattacctcctgttcttgctatacaactaaagcgatttgactatgactgggaaagagaatgtgcaatcaagttcaatgattattttgaatttcctcgagagctggacatggaaccttacacagttgcaggtgtcgcaaagctggaaggggataatgtaaacccagagagtcagttgatacaacagagtgagcagtctgaaagtgagacagcaggaagcacaaaatacagacttgtgggtgtgctcgtacacagtggtcaagcgagtggggggcattattattcttacatcatccaaaggaatggtggagatggtgagagaaatcgctggtataaatttgatgatggtgatgtaacagaatgtaaaatggatgatgacgaagaaatgaaaaaccagtgttttggtggagagtacatgggagaagtgtttgatcacatgatgaagcgtatgtcatacaggcgccagaaaaggtggtggaatgcttatatacttttttatgaacgaatggacacaatagaccaagatgatgagttgataagatatatatcagagcttgctatcaccaccagacctcatcagattattatgccatcagccattgagagaagtgtacggaaacagaacgtacaattcatgcataaccgaatgcagtacagtatggagtattttcagtttatgaaaaaactgcttacatgtaatggcgtttacttaaaccctcctcccggtgagtatcaagagagtttagcttcttagtaataaagaataatttatagtaggcgtcaacatgtttaagttcataaaattaatgttttcactttaaatgagtctaatttgctgggtgtggtggttcacgcctgtaatcccagcactttgggaggccgaggtaggtggatcacctgaggtcaagagttcaataccagcctgaccaacatggtgaaaccccatctctactaaaaatataaaaattagccaggcatgg

SEQ ID NO: 17014 - DNA, 1418 bp, Homo sapiens
atatctatctgatcattataatgcataatgttactttcttcgttgtgcttaggtaacttgatttaaaatgttatttctctaaaataaaacatttggccagacatagtggctcatgcctgtaatcctagcattttgggaggccgaggtgggtgggtcacttgaggtcaagagttcaagaccagcctggcaaacatggcaaaaccccgtctctacaaaaatacaaaaaaattagccaggcgtggtgacgtgcacctgtagtcccagctactcggaaggctgaggcaggagaatcacttgaacctgggaggtggcggttgcagtgagctgagatcgccccattgcactccagcctgggcgacagagcgagactccatcttaaaaaaaataaaaaaaaattataggctattttctatcgtgaaagttgtgtattattattgtgaagaagcttattagttttttattggtgacaaatctgtattctaggtaatcctcctcttcccaatccttttggtgatcctaatttatcacaacctataatgccaattcagcagaatgtggcagacattttatttgtgagaacaagttatgtgaagaaaatcattgaagactgcagtaattcagaggaaaccgtcaaattgcttcgtttttgctgctgggagaatcctcagttctcatctactgtcctcagtgaacttctctggcaggtaaaaggaaaataacatttgtatgtttataatttgatttgttattcctttcattaagttactcaccatgtcttacttgtttttaggttgcatattcctatacctatgaactgcggccctatttggatctgcttttgcaaatcttactgattgaggactcctggcaaactcacaggtggatactctttttgtgactggaaacaattaggcttgcccaggtgttagagttaactgaaattgacagtcaccacattttttttaacctattggagttctagtgaatgttttatcttaaacctaggacaagggtaaataacaggttctccccttttcctcagaattttatttccttttttattcttttttctcactgcctaagtttcatacttaataagcctgtttctttagaatgacttttttaattaaggaggagctagcttgggcatttggtaaatatttgaatttcattaatgatgcccgaggattattttatgattatattacatttgttttagaattagtcacttgaagcaacttagtcattagtcacatgaagtataatagtatatgtaaaaagtcttcaggtaagtacggtttccatttttcatggtacttatattctgtaaagtcaccacagacactgagttagcaaatactgaaccattactcctaggaggaaatacagaattaggtttctataagcctctgtttaca

SEQ ID NO: 17015 - DNA, 1246 bp, Homo sapiens
aataagttagtaagagcacagactctggagtcacactgctccgcagctatatgacctcggcaagctgtgtaactctgtgccaattttctcacctgttaaaagttttaataataaggccaggcgcagtggctcatgcctgtaatcccagcactttgggaggccgaggcaggcggatcacgaggtcaggagattgagaccatcctggctaacacggtgaaaccccgtctctactaaaaatacaaaaaattagctgggcgtggtggcacgtgcctgtagttgggctgaggcaggagagaggcgtgaacctgggaggcaggacttgaagtaagccgagatggcgccactgcactccagcccaggccgtctcaaaaaaaataaataaataaaaaataaaggtttaataatagtacctattgtctaatgttagattaaatgactaaaagacattattgagtggcacatagtaggcactcagtatatattagctattagattttagatgtttttattttatatctggttctctttcagaattcataatgcactgaaaggaattccagatgaccgagatgggctgtttgacacaatccagcgctctaagaatcactatcaaaaaagagcataccagtgtataaaatgtatggtagctctatttagtaactgtcctgttgcttaccaaatcctgcaggtgaggatttttttcttataattttgtagaaatcttaatcagaattaaggattctgttttaaaagaagagaatcatgagaacttggggttgtcattttaagttaactttgaagtattccaaatcctcttatctatatggttttattttcttttgcagggcaatggagatcttaaaagaaagtggacctgggcagtggaatggcttggagatgaacttgaaagaagaccatatactggcaatcctcagtacacttacaacaattggtctcccccagtgcaaagcaatgaaacgtccaatggttatttcttggagagatcacatagtgctaggatgacacttgcaaaagcttgtgaactctgtccagaggaggtaaaaaaagccaccagtgtgcagcagatagaaatggaagagagcaaagtaattctttattttataggccagtgtttatgtattaatgatattattaaaagattatgttgaagttttgggttttgaaaaatgtttattcggctgggcatggtggctcacgcctgtaatcccaacactttgggaggccg

SEQ ID NO: 17016 - DNA, 1297 bp, Homo sapiens
gcagatttagtggagggtttggtgccagagactaccgacaaagtagcggtgccagcagttccagcttcagcagcagccgcgcaagcagcagccgcagtggcggaggtggccacggtagcagcagaggatttggtggaggtagtgttaatctgtaacttcatagctttgggaagggtttttttccttttagtcatctttttcaaagcctaattaaacaatttaagttcagcactatagaaacttgatggcaaattacgtaagggaaggattgtatttaatgatggataacttcattaatttctctctctttttaaatctctcattaggtggctatggaggcttttacaacagtgatggatatggaggaaattataactcccagggggttgactggtggggtaactgagcctgctttgcagtaggtcaccctgccaaacaagctaatatggaaaccacatgtaacttagccagactataccttgtgtagcttcaagaactcgcagtacattaccagctgtgattctccactgaaattttttttttaagggagctcaaggtcacaagaagaaatgaaaggaacaatcagcagccctgttcagaaggtggtttgaagacttcattgctgtagtttggattaactcccctcccgcctacccccatcccaaactgcatttataattttgtgactgaggatcatttgtttgttaatgtactgtgcctttaactttagacaactttttattttgatgtcctgttggctcagtaatgctcaagatatcaattgttttgacaaaataaatttactgaacttgggctaaaatcaaaccttggcacacaggtgtgatacaacttaacaggaatcatcgattcatccataaataatataaggaaaaacttatgcggtagcctgcattagggctttttgatacttgcagattgggggaaaacaacaaatgtcttgaagcatattaatggaattagtttctaatgtggcaaactgtattaagttaaagttctgatttgctcactctatcctggataggtatttagaacctgatagtctttaagccattccagtcatgatgaggtgatgtatgaatacatgcatacattcaaagcactgttttcaaagttaatgcaagtaaatacagcaattcctctttcaacgtttaggcagatcattaattatgagctagccaaatgtgggcatactattacagggaaagtttaaaggtctgataacttgaaataggtttttaggagaattcatctacttagactttttaaatgcctgcca

SEQ ID NO: 17017 - DNA, 1866 bp, Homo sapiens
tcgtaaaaatggctccagaagagtaacaaactgaaatctttgagatcacacaggttggaaatatgtacataactgcacaaggtgtcaattctgctctacagtgcagttttagtcagttttagttgcataggtttccattgtatttatagtctgtttatgctaaatctggccaaagatgagcattgtccaccactaaaatgcctctgccactttgaattctgtgctaattttgtggccagaatgcggtgatcaaaacgctccatctttttacagtggcataggaagacggcaaaaatttcctaaagtgcaatagattttcaagtgtattgtgccttgttctaaaacttttattaagtaggtgcacttgacagtattgaggtcatttgttatggtgctatttcaattagtctaggtttaggcccttgtacattttgcccataactttttacaaagtacttcttttattgcacattcagagaattttatatatatgtcttgtgtgcgtgtccttaaacttccaatcttactttgtctcttggagattgttgaacgcagcttgtctaggaaggggatgggactagattctaaaatttatttgggaccatgggaatgatagttgggaagaaaactatttgcacacgacagatttctagatactttttgctgctagttttatgtaatatttattgaacattttgacaaatatttatttttgtaagcctaaaagtgattctttgaaagtttaaagaaacttgaccaaaagacagtacaaaaacactggcacttgaatgttgaatgtcaccgtatgcgtgaaattatatatttcggggtagtgtgagcttttaatgtttaagtcatattaaactcttaagtcaaattaagcagacccggcgttggcagtgtagccataactttctgatgttagtaaaaacaaaattggcgacttgaaattaaatcatgccaaggttttgatacacttgtcttaagatattaatgaaacacttcaaaacactgatgtgaagtgtccagattctcagatgtttgttgtgtggattttgtttagttgtgtgtttttttttttttttcagtgaatgtctggcacattgcaatcctcaaacatgtggttatctttgttgtattggcataatcagtgacttgtacattcagcaatagcatttgagcaagttttatcagcaagcaatattttcagttaataaggtttcaaaaatcatgtaaggatttaaacttgctgaatgtaaagattgaacctcaagtcactgtagctttagtaattgcttattgtattagtttagatgctagcactgcatgtgctgtgcatattctgattttattaaaataaaaagttgaactgcacagtctcctttgttgttgtcaattgtggtttattttcagaggtgtaaataaagtgctcttgcctgaaaaattgtaaaatgttattttttgcttgtcatccagtgctattttttgagatgcctcttggatacagaatgactcataccataagtatttgcaatgaaagatgaagatagtattagtttgaaatacagtgaaacaggatttttgtaatagacggaaatctaaaaggcccttactgataatacagcatgtattagaaattggcttatactttgaacaatttgacatgggtgggagtctctttgttctttgaagtatctattatgaaggatggttgaacagtggaagaatgagcaggataaaagtcaagtgtgtcagtagtccaacaagtgatggtaagtatatacttagggaaggaatcaagactatttgggccaggtgtgatgattacatagtcctatagtgctagtttacttggaagctgagggg

SEQ ID NO: 17018 - DNA, 2789 bp, Homo sapiens
cctctgagaagcacacaggcaggcatcattcttgccatcattccgatggtgaaatccctgcatgcagaactcattgacttctcaaagatgttacctgttccattccactaatacatgtcttctctaaagcagtgtctttatgacctagctgcatatacttacatttctgaattcagagtaatttcagtacattgctgctgctgctgctgctgctgctgctgctgctgctgctgctgctgctgctactgctacattacaattgtccactaagcaatcagagaaaattgctaaaagcttctttactgcttccattccatcagcagaacctttttttttctttctttcttttaaagaccagaatgaatgtttagagtactaaatcttattagtggtcaattgaagtattggagagccacattttgaaggttctctcccccacccaactccattccccacagcaagaaagggagtgtttttatatgttgaattctttgttaaaaagatgaaatgtcctgattttccagtcacaagacagtaattactttgcacatacagcatatcccattttaatgctaaaaagggaaatgtcactcaatttaattcatctggaagtttcccagtgtcaagataacattgtagcctttttaaatgcaattaaatgtatctcttgtcaggtgagatgatttaaaatctttgctcagagaggaaaacaaatggttgacctacttcttgctatttgcattcagaaggcatcgtcccagcccatcctattggtggcagaatatctaaagatgtcgcaaagtcccccactgcagtagaaatgcaggaggtgttcctgttccccgtccaattccttcttaggctgctagagacagccagtgggccaagccttcccctgtgctccaggcaggcctgggctgcagctactgttacctttttacagcctttgatctgatcgctgcagagttcttttgtttttaaatcacttgtatttgtctcttcattaaggcttcaagtttatttcttgaaaaagtttagtcaattgaaccaccctccaggaagattcccagcgtggaaactgcccctgaaaaacaaggcagcccaaagccagctctcttttgtcccccactgatgtcatgtcctttttttttttcatttcaggccagtttcttaacttggggcaaagagaatgtgttgctaaagctaccaagaaaactgcttgattaacaaattcttaatagaaatgcctcccacactgtctctttgaaaagagaaggcaccttggaatcggcattccaaaaccaagctccttgtcatcctcatccctcctccttcttgcttcctattatcaaactcgtgtgtgtttcttgttttctcagaactgaacacagcctcctaattccatcctcttgactagggcttacaatactgagagcgattacaggctgtaataagttaaaggtccctgagcgtggctttcttgttctgcgcctctaattaattcttctattaaaagatgctttccttctcactgcagcttacagaaaggctacaagctttaatcacagatcatttcatttgccagagcctttccttttctaactcctttagaaataagatttccctctctgtttggaatctctggatacaggactctcctccaagctcatggcttgattggctttgcctgtgcacacacacatcagtttgccttaaacttggagctatggggagtcccagattttccagcttagtgggtgaagtttagctgtcacctacatccaggaagtgggggaaaagggaaaaaaagaggatattcaccaccatgttcccatccggtctttcccctgccttgctttgtgcagcaggtgggcagacagagcccacagaaacagaagtagaaagagggccgcaccatctctggggccagcactcctaagtcttagctctttgtgggaatagaaaatcctgagctcccaccacctctcgtctgaccctccatcaactccctcgaacctgtgcaaatggactgagcaaaagaaaatggaaagagatgtttgtcaccacacaggagacctcctttctggccccaagcacaactccatctctgcgtatgctcagaaactcagaatttagctgctacttatgtgttagctccattctctctggtgtgtgactgagagaacacgccagtgttcttactgacagaggcttaggggtgaccctctctggacccagaggaagtacaacctctgtagcgagaattgtccttgggaacagaaacaggcattcctccacagtgagtggctccccctattttttttttatttggaagagaccaagaattgggggaattgatttccagtcttagctgtttcccggaatgtcatctgtgcaggcaggtaggcggctgccgggtgcagcaggcagcgtgactgatgtgaaggccgcccaatcctcacgtgctaagacccgagtatcgtgtttaattgcagtgtaggcacgtcgccattcaaactcagttctggggtggttttgcataaagttttgccaacgtgttcttttttctgtatgtattattgcctttttataaaaggtgttgaagtattgtctcagtgataaaaagagagagatgttaatggttgttgtatatttcaccgtatccaattgtaagtatttgcagggtacagcagagccttagcttgcaagagcgtttgtgcaggaggtgtccctcaacacccaggagctgaagggattggaaaggtttggattctttgtaaatgtcctgc

SEQ ID NO: 17019 - DNA, 1066 bp, Homo sapiens
ttgttatcggccttgtgtcagcaggtcatggtccctagagactacctagttgtagtgtgacctacatttataattattgtcatgtccgaatagataggaggagaaaaacaattacacactaatttaaagagacagtatcttttttaatcagttctcctaaactttaataaaatgtatctttaaatgtatgtattattcaatcctttggaatgttatatttttggaaatcatagctttttatttccaaggcccctaaaaactgcacaaaatagatgctgctttctataatctattttaataataataaacaatgattctgttaccttgactgggggtggaacactacattctttttagagtctgattttatggattggaatattgggatatctttctttcctttatttatttgaaataattagtgtagtgattacaaaacagtcataaatttttaaaggccttttttctctctttttttttttttagaatagtatttttttttaagtcctttatgtaacatccagataatgtgatactgtctctttgaagcaccctgtaaaccttttagagatttgaagttgggtcttgactcttaatgcatgtggacagtcgcgagcgtttatgctgtcggtgtgtctgtgttggacaaaacaatctgtaatctacagcaaagtacattctacattccgttcatggggcacacccaggggaataagaataaaatgctattatgactaagttgtaaacctatgcacatcccttgcattttgggcaactttataaaaaaaaagaaactgatttttattaataataatcatgtagtgaaatgtgtttgtaattttgtctcaatttaatttgttgtaaggtggggtggggggaattgctggtttcaccatttcagatctgtgttgtctaagagtattaacgttttaattaagcaaagaaatgatttttaatctgtatgtaattgttttaaagcacccattttaagagaaaatactgtgcaatgaagaaaccagtttaggcatttgctataaactgaaatattccaaaagaatcatctata

SEQ ID NO: 17020 - DNA, 1114 bp, Homo sapiens
gcgcgacgccgcgcggtccccgaggatccgcacgccgggcagcgcggcccgagcagcgcgagaagcagcgggcgggcgggcggcgccgggcccgggccgccctcgctcccgcgccccggccccgccgcccgcgccggggcggtcgcctgcagaggaaggcgccgcagtctctgggcctcgcggccccactcgagcgtcctcggcaccgagggctcgcgggtcctgaggggaggaggcgatcccggggctgggcactgagctcttgggcgcccccacccccgttttcgaagccctccacgctgcggccgctatcccctccggaccatggccgacgacgacgtgctgttcgaggatgtgtacgagctgtgcgaggtgatcggaaagtgagtctccacgcgagggagcgggagtgtggaaaaatgcatttcagtgatgccccggtcttcccgcacccgctcggggcctgccccctgccctccctccttcccctcttcccctctcgtccttctcatcctggagtatttatagacgtgtacctggagctcctgccaggcgggggcctgggggttctcagcggtccattgaggccaccgagccgaggttggccaccccgtaaggcgtggggccggctgcctgcattttatctgacggttgcacagggacgtggcacagccgattttatagttgcttcagttggggttattgttaccttgcatgtaccatagaccatttttgaaacagagcagcttgcatttcctttgcttgtgtggtgagagagtccagggttttaattgtggggtgtgtgtctattgtgcgggatattagacagatgcctttgtgtacaccccatgctcggattggagggggtcatttaagacggggtgctttcagtttcagcaaattccctcctggtgtacacgaacgtggaaagagttgggggcattcgaatttttaatgccttgttatgcaatgactgttcaatcagtgctcgagactcccctcgactgttgttgggatggtggttagcgtggtagagccgtctgctttgagtcaccgggctggtctagaatatagaactgacagtccaaatgctcatcctttcatctgtgttgta

SEQ ID NO: 17021 - DNA, 1523 bp, Homo sapiens
cctccgatttaattatagatgcaactatcccaggggtctccatgcatggatcttgcagtgttttgttcctccttgtcagcatgagttttttgctcatgatctgtgttccttcatctaggacgttccagcggtagaaatcacccacaccttctgggaaaggaacctgccctctgtttctggcctgctgaagatcattggattttccacatcagtaactgccctggggtttgtgctgtacaaatacaagctcctgccacggtcttgaagttctgttcttatgctctctgctcactggttttcaataccaccaagaggaaaatattgacaagtttaaaggctgtgtcattgggccatgtttaagtgtactggatttaactacctttggcttaattccaatcattgttaaagtaaaaacaattcaaagaatcacctaattaatttcagtaagatcaagctccatcttatttgtcagtgtagatcaactcatgttaattgatagaataaagccttgtgatcactttctgaaattcacaaagttaaacgtgatgtgctcatcagaaacaatttctgtgtcctgtttttattcccttcaatgcaaaatacatgatgatttcagaaacaaagcatttgactttctgtctgtggaggtggagtaggtgaaggcccagcctgtaactgtcctttttcttcccttaggcaatggtgaactgtcattacagagcctagaggctcacagcctcctggaggaagcagcctccactttggatcaggaaatagtaaaggaaagcagtgttgggggtagcggcatgcagaccctcagaccagaatggggacatcttgtggtctgctgcctcaggaatctcctgaccacttgtagtccctccgacttctctagacatctagtctcagtgctagcttatttgtatttttcctctttcacttcttatggaggagagtgtttaactgagttagaatgttgaaactgacttgctgtgacttatgtgcagctttccagttgagcagaggaaaatagtggcaggactgtcccccaggaggactccctgcttagctctgtgggagaccaactacgactggcatcttctcttccccctggaaggcagctagacaccaatggatccttgtcagttgtaacattctatttcaacttcaggaaagcagcagttttcttttaatttttcctatgaccataaaattagacatacctctcaacttacatatgtcttcaacatggttacctctgcataaatattagcaaagcatgccaatttctcttaagtactgaaatacatatgataaatttgactgttatttgttgagactatcaaacagaaaagaaattagggctctaatttccttaaagcaagctcacttgctttagttgttaagttttataaaagacatgaaattgagtcattttatatatgaaaactaagttctctatcttaggagtaatgtcggcccacaagggtgcccacctcttgttttccccttttaaaaactca

SEQ ID NO: 17022 - DNA, 1186 bp, Homo sapiens
caaggttcatccctgttgtagcataattaagagtatttttgtttaaactttgtttcaggcaacagaatttatcaagcagaacattgtgatatccagtggatttgtgggaggctttttgctcggacttgcatcttaaggacatgaatattctcccataacggattcaactatgagaagagaagtggcagcaataaggcagtctctcaaaagtcatactgccagagtctctagggcaaggagaaacaactagctggacaatactcaattcacaacttagcattttgccatctgaagcttggcaaactagtatctgctgtaaaacaacctatatggtatgtgaaccgtagtattcctgagcaaaacgtggctttcatcgctttgtaaaaatttgcatctgtttagaaactagcctataaaatatcaccattggatgtagatatggagagaaaagaaatatgttgggtttattgcttagcgaaatattctctttttatttaaataaaatgttcttcattgtgttttatggtatgtgtccataatttaaaattcatgttatagtttcagtattaaggctgactttttttttttaagatatgtttgcaataagttaaaaaactgtaatacccttttgtggaaagctttagaaatgatataattattaaagatattaaacagactctgctgatgtaatatgataccaatttttatgttgttttttttcctggagttattactttgttataagtgtaataattgtacatttcttttttgttttttttttttttttgagacagagtcttgctctgtcacccaggcttggagtgcagtggcatgatcttggctcactgcatcctccgcctcccaggttcaagcgattcttgtgcctcagcctcctgagtagctgggagtacaggcacgtaccaccacacttggctaatttttgtatttttagtagagacgaggtttcgccatgttggccaggctggtctcgaacccttgacctcaggtgatccgcccgccttggccacccaaagtgctgggattacaggcatgaaccaccatgcccagccataactgtacatttcaaaaaaggctcttctgaggaaatactataacatgtctaaagctcttttttcttttttgatgtctgtagtttaaaaaatatcttcttatatgtaagcttcta

SEQ ID NO: 17023 - DNA, 1148 bp, Homo sapiens
ctactgggcaaggtaaggcagctgcgagtcggagcgcggacaccgtctccctggccggcgccgcgctcgccccgggccccgcggccgggtctgtgctcattgtggccacggacgatggtcgaggggcttccggaaactatttcctgcctctgctctccccccacccccgggtaccctgcttgctcccttgcgaaatcgctcttttcctcttgtagctggaggaacagagacgggatcgctttggggccgggctcaactgggtcgacacaactgcctgctattttacagctttttgagggtaggccgatgatcttcgaggtgcctgtttagggtcaagggatcgtgagtgtgttcagattttcccaaatttcggacttaacttgcctctacgggtttaaaaaaattcttttccttcaagcaggctgttcgtgatgcctactgctaaccaaatgttttaggctttcttgtgtccccgctcccagaagggggaagtttcacggagtttaggtcggtgaagagtttgcattgggctgttgacatgtatctcgattgcagtgtgtgttacctgaagttaggtgacttgtttactttttgggtctttttggcatagaaataccgtagttatttgtaaacgtgttctcttcctggagcctcatttcctgtgtgtctgacaggggaggctggggaggattcggggtgtagtctttttttatttgtgtggaaagttgttggcactgtcatttagttaagtaatggctgctcctatcggcccaagatggcgggacagggtgggaggagaaagtgaaggggggggttagggggagggtgtagaggtaaacatggaaataaatagtagccgtgaataagcctttccttcggagtgtgtagctcagtggtgtttaaaaaaaattacccaagattatttgcatatagaattcttatacctttcataagcttggaagcagcatgcataagcctggtaaatgcttatcaacctgtagcacatttagttatccatctgtaagctattgaacaaaggctggagtctcaatctgtatgcatcagtttatatttcctgaccaaaatctgattgcaatggtatttgaatactttcttcgtaattgggaccgtgaaagttggagtgtgtg

SEQ ID NO: 17024 - DNA, 1197 bp, Homo sapiens
ggtttgtttacattatttagtactgaggcaaggtttttagggcttatttagtttacaggatctggcatatatgtaacagaatgaaattttgagatgtcccctcttttgtgattgagagaaggacctataagttcggggtcgttttctataattttcagctgcttccttttgtcattactaatgggattttttttttttgaaaccgacttttgctttttcaaggaagtttattttaaaatgaacaaatacaatttcttgtttttaaagtatgtatttctcaacttagagaaattaagcatttgggtaaaatcacacattccctaattatacatcttcatattcatctggggattcatagagaatcccctatagattctcttccctatagattacacaaccagcatttacttttcctttgtttttttgacagatgagaccaacaggagttgcacaggtacgatctactggaattcctaatgggccaacagctgactcatcactgcctacaaactcagtctctggccagcagccacagcttgctctgaccagagtgcctagcgtctctcagcctggagtccgtcctgcctgccctgggcagcctttggccaatggacccttttctgcaggccatgttccctgtagcacatcaagaacgctgggaagtacagacactattttgataggcaataatcatataacaggaagtggaagtaatggaaacgtgccttacctgcagcgaaacgcactcactctacctcataaccgcacaaacctgaccagcagcgcagaggagccgtggaaaaaccaactatctaactccactcaggtaataggaggactagcttccttgttggcttttcacataaatgtttttactgggttttatacactttgagagaagaagagagaagtgtttggggaactggttttataagaattttgtggcactacaatgttactacattgtgattcattatgtacatacatgagtatatctttgttccctttgtacagtctctaccgacatagataacttagcaaatttacaaaggaagaaaatagatcatataaatcacccaaaatgcaccattaatttacagtggcatcataagcacatttatgtaatattacttagttcatttctgcataaactgcctacttaagatcaggcactaaactaggtgttaggtatttgct

SEQ ID NO: 17025 - DNA, 1271 bp, Homo sapiens
gtaggataatggtcttagattcttaggaagattggctgaatgggagatagtaaggtaggctgtacttttatgttgcatagcaggctgttgaactttttgagagttatttcccctaacttcacaagcagactatatgtttgtagccatgagctattaacaatttgtatatcaaaataacctaccttacttttattttcaggctcctccattaccatccgcctcatcttgatattgttccatggacattaaatgagaccttttctgctattcaggaaataacccagttctgcaccactggtttttgtagctatctcgtaaggctgctggctgaaaactgtgtctatgcaaccttccaagtgcggagtgtcaaccaactggacgggagagagtactgctcctactccaggactctcacaaagctgatgagctgtacttcagaaaaaaataataatttccatgttttgtatatatctgacaaaactggcaacatcttacagactactgacttgaagacaacctcttttatatttctctatttctgggctgatgaatttgttttcatctgtcttttcccccttcagaattttccttggaaaaaaaatactagcctagctggtcatttctttgtaaggtagttagcaattttaagtctttctttggtcaacttttttttaatgtgaaaagttaggtaagacacttttttactgcttttatgtttttctgtcttgttttgagaccatgatggttacacttttggttcctaaataaaatttaaaaaattaacagccaagtcacaaaggtaatggattgcacatagactaaggaataaacttcagatttgtgatttttgtttctaatcttgatgtaaatttacactatttataaatacatatttattgcttgaaaatatttgtgaatggaatgctgttattttttccagatttacctgccattgaaattttaaggagttctgtaatttcaaacactactcctattacattttctatgtgtaaataaaactgcttagcattgtacagaaacttttattaaaattgtttaatgtttaaagagttttctattgtttgagttttaaaaaagactttatgtacagtgcccagtttttgttcatttttgaaatctgattatatatattttatatatacttatgtatgtatatataatatatatagaaatctggatatatatgtataaatctttagaacttaaatttttctcgttttaagtttcacatctatggtagatttttgagg

SEQ ID NO: 17026 - DNA, 1202 bp, Homo sapiens
tatgagttgaatttttcatagcgcttttattaaaacaatcatttaaaaatatatttttgaccctggtactctacaaagcttagtacattttttacttttataaattccaaataggctaaaagcctactgacaatattgacagtagcaatgatgatgtaggtgtcacttgggttaagtcatgggaaaactcaaaccatagtgtcacagaggctaccctttagctttgcatgcccagaacacaatttaatagcaaagagaggggatctgtcttctgggaggtgtgtatgttgactaagatcataggttttatattattattgagagaaacaatttgtcctgttcattttgttactgtgtttcaaagtcattgagattaagaatttatatttcagcactaagaactgtgcctggcagccaatagtcctttagttgatacttgttgaataatgttaataatactcaaggtctgtgttttgttcctgcaggttgatccaaaagactacatgttcagtggactgaaggatgaaacagtaggtcgcttacctgggacggtagcaggacaacagtttctcattcaagactgtgagaactgtaacatctatatttttgatcactctgctacagttaccattgatgactgtactaactgcataatttttctgggacccgtgaaaggcagcgtgtttttccggaattgcagagattgcaagtgcacattagcctgccaacaatttcgtgtgcgagattgtagaaagctggaagtctttttgtgttgtgccactcaacccatcattgagtcttcctcaaatatcaaatttggatgttttcaatggtactatcctgaattagctttccagttcaaagatgcagggctaagtatcttcaacaatacatggagtaacattcatgactttacacctgtgtcaggagaactcaactggagccttcttccagaagatgctgtggttcaggactatgttcctatacctactaccgaagagctcaaagctgttcgtgtttccacagaagccaatagaagcattgttccaatatcccggggtcagagacagaagagcagcgatgaatcatgcttagtggtattatttgctggtgattacactattgcaaatgccagaaaactaattgatgaggtaaggagaaagagaagagaaatagtcatacacctagatttaaaaatgtac

SEQ ID NO: 17027 - DNA, 1227 bp, Homo sapiens
ctactaacagatgttggtatagctatttaaagactacttcgtaagtagtatgattatttgaataaattacacattgtttagttttttaatacaactgctatatgactcttctgcttcctgataagaaaaggtatatgcaatgctaaaactgtagaagcccaatcaccagcagtttttaaaaaggtgataacttttattagctcttgtgggctatcaagagaattggaacaaaaccttgtgacttttaggtaagaaataggcatgatgataagctatgcagattattaaaaagcttgatacatttgatttttcattagatatgccattcatatcaagtaatgttcaagtatgataaaattattttggttgctttaaagcactgtttcccaaatctacctgatcataataatttaccaggaagcagaggagagctacttgtttaaaaatccacattcttggacccaatcctcagatgcacggattcagtcttcaggggaaactctgttttaaggggtatgttgtaatctaaagtaattggttcaggaggtgtcaataggttgaacttgtgagaaggcactgaatctgccatccacatcacatatagcagctattatgaaatcagctttcataggcctatttttaaaaggaatctgaaatttaattctattttgataaaactaagactgaaaataaccacttgtaaacattcctatgattgttactaaaatgtattttcatgtttaaaatgtttttggatatttttgggttaataactactacattgaattgcatgttaaggtgcagaaataatacattaaaagattttcactttaaattaattagtaatattgagcgctcaccctgtgcgtggccttgtgctaaccattagcactgcatcatttcaattcttttataagggcattcaatactacaaaatcaacatgatttcataaggtgcaaataaaagttggtgacagatttaatataattttgatcacaatttacaaatgatctttgcaaatagtggtcagacggcattagtttttcccttagttaagctaaattaaagggactccatcctgttatgattatattattattattattattattatttttgaggtggagtttcactcttgttgcccaagctggagtgcaatggcgcgatctcggctcaccacaacatccgcctcctgggttcaagcgattctcctgcctcagcctcct

SEQ ID NO: 17028 - DNA, 2995 bp, Homo sapiens
ttaaagagaccaccaataggtgggtgaagaacacagaggacctccagtgctatgtgaagccaaccaagaatatgagccccaaggagcagttctggggtagacaggttctcaggcggtctgcagggagagctccatatcaggaaaatgatggctattgcccagatttggagctgagtgattcagaggcagaaagtgatgggaataaagaaaaagtcagggtaaggaaagatagctcagacagggaaaatcctccccatgactctagacgggattgccatggtaaaagcaagacacatcccctttcccacagttcaatgcaaaggtgattagaaacttccaaggatgacccaacctttgcctttgccccatatattggggaaaacccatacaccaaaaggattttagcatatgttaagaggaattgcagtgaaaaggataacatttttccatagtaaattgtcttgcagtttttgaaaatgtttcaagtctagtttttacaagcacattacagtaattgcaggttgtccagaggttggtttgtcagaggctattgggaacagctgggcccagggtatttgctcagtaaatattttggggcagctttccggttatataacacattgacaagtatatgtattaagagtccttgcattgttaactgatttgcaagagaccatgattatcagacactaaaactacttatcttttgaagctacagcatgtgactccccagagctcctgtctgtaggaagtttctaattccctggtatctataaacccttttcaggggagagaccggagaccccatcttagatactgtcaactcactactgtcttcctttgttctgcacaaggttgagtttctttcacagtatcttaacttactgagtcaatactcctcatgcttatcagtgtccagtgcctgttcctaaacttgcttgttggggacacactcataactatttcacctgactgacaagcataaaaggctaacttgtggatagtgtttacaaaagtacaaaagtactacttccaaggaaaatgctctgattctctgtttaggcatttgtgaaggattccagagcctttcccaaagtgagaccatttctggggtatttgtaccaggtcagggtttttgtgttgttttcaaataagtttgactaaaataagtttggctgacagtttttgtatacctgctttaatgtttataaaatttttattgaggtataattaaaatatagtaaaatgcacagaggttaagtattcttacctgctttaattttgaaacagatttttattgtcaaacagaatttgaaagcatgtgtttaacacatggatataatttagctttgtgtcacctttgaatctgaggcagtttcccaaacaaaaaggctggagccatttttcagaagttgcttataccctgttcccaaactatcagccttgattaatttctagtaggaagagaataattacatttgcgggggggggggtggataaaaaacatgtctgcttctcatttaaataagagagaaatgatgccgttttttaaatgtgaagcagactataattctcagctctcttttcttcttagccttaaattaatattctctttcttctagttttggaaagtgtagtgggaatattcagacaaaagaggccattttccatttttaaagcttcttactggtgaaacagcccagttgtagtaggtgccagtcagtcaaggcaggggccctctctccgtcaatatggaaaactcagcagttttcctctcccccagttgtgttcttgtaacgttgttaatgggttcctttgctttttgctttctccttttctgaaaatgtatgtgttttgcctctcttttggctacatcttcaaaatatttcttttgtgcctatgtacatgtgtaaacatgccatagcatgtgtggtaggtgtcctgtattttgtttgggaaaaaaactatcaaaatgaggaagagaatttcccctatttatgcactaggtttctgtgctttttctttgagttctctggagtagatattaatttgataccttcatggtaatgaaattatgatggagctgtgttataaattccttatgtcagaggccagtgcggtagcctttgtcccttcatgcctttcaattctgagtgggaggaaaagcaaacatcaaaacagtgcttcagccaaattccatatgtaatgccattgggagagtattgactaaaatatcattcgtcagggaaatatagttgtaatatttttacaggatattcctaggtaaatgaaggagccttcagttgtaaatttcaattaccccaaaatgtatttgctacattttgttgtttgaagtattacctcttaaccttctttgttaatttttttcattttgtcttatatagtccagttttccaagataagctcagtcctttttcaaatgtcccctttttaccaatactttttcattaaattatgaaaactgctacctactgtcagtgtgttttttattttggcatattggttacacatgttccttttatatttaaaaaattatattcactgaacaaaacagatagtgtggggagagggaggaggaagaggaggaattgaatgtttagaagcacacattcaacattcgagtcaataccggggacccaggagaactctggatacttgaactttacccagaaatcatgattttatcagactgttaagataaaggccttaggatcatcataaaacatcaccagagagatagatcctatctaaagtgacaagattgaaaaggcttcagtcaggcatctctatttggagtcttgtgagtatgttgatgtcatggggttatgtggtgtcaaggggggcttttaggcattataaacattttcatgattgaaaaatgtacttgccaaaggtcattgggtaaatcagtagtgaagataggtaaaaggtgaagttggttctctctctctctctctctctttctctctctctc

SEQ ID NO: 17029 - DNA, 1454 bp, Homo sapiens
tagataatataacatgagaatgtatgatatacagagaatggggaaagtatgctacttaggtaaacatagactagaaagagacagaaggaagagaggatgtgaagacaaagttaagcaagataagtggatagagaatgacttgggtgtagggggctatttcattagcttgagctataagaaattgccagtattcaaccatttgtgacctataaaaatagcagtttcctatgcttcaactttgaaagacaaggtaactagggagtgcctcctgaaggaagtggtgatgaatctaaaaccttgaatgaggagacagatccagccatgactagagctggaagaaaggctttccaggcagagagagcagcaagtgcagtggccctgcagtgggaaggagcttgacatatcccaagaatggaaacagaggaatttagtgagaggggcacatggagaccaagttatgcagggccagaataaggctttgtggagcagcaggaagccctcattgacctctatttctccacagaacccagactcccatggttatgacaaggaccccgttttggacgtctggaacatgcgacttgtcttcttctttggcgtctccatcatcctggtccttggcagcacctttgtggcctatctgcctgactacaggtgcacagggtgtccaagagcgtgggatgggtaagaggcagaggcagggatggaggttgaaggggattctgccaggagttttgttcctgcaccattgggaatggggagctgagatgagggattggtatcagttgaggctccctcacgtctacccctgctatttgcactaccaggatgaaagagtggtcccgccgcgaagctgagaggcttgtgaaataccgagaggccaatggccttcccatcatggaatccaactgcttcgaccccagcaagatccagctgccagaggatgagtgaccagttgctaagtggggctcaagaagcaccgccttccccaccccctgcctgccattctgacctcttctcagagcacctaattaaaggggctgaaagtctgactcgctagtgttgattgtgttgtgaaggggatatgggatgggggtgtcaaaagctttaaaagggctgctgcaaccttccctgggtgttctggctgtatattgctgtgtagcaaacacctaaaaacttagtggcttaaaaccacaattcagtcttctctttcatggccctgtgggttgactgggctcagtaaggtggctcttctaggggtctcaggtagttgtagttagatggtggctgggactggagtcatctgaaggctcaactgggctgggtatctaagatggcttcttcactcacatgtctggcacttcagtcctcttccatatggcctctctccagcagaacagccttgactttttttttttttttttttttgagatggagccttgctctgtcaccca

SEQ ID NO: 17030 - DNA, 1245 bp, Homo sapiens
ccacaccccttgcgaacgctcccctagtggagaaaaggagtagctattagccaattcggcagggcccgctttttagaagcttgatttcctttgaagatgaaagactagcggaagctctgcctctttccccagtgggcgagggaactcggggcgattggctgggaactgtatccacccaaatgtcaccgatttcttcctatgcaggaaatgagcagacccatcaataagaaatttctcagcctggccgaaaatggttggccccacgaagccacgacaactggaggcaaagagggttgctcaacgccccgcctcattggaaaaccaaatcagatctgggacctatatagcgtggcggaggcggggcgatgattgtcgcgctcgcacccactgcagctgcgcacagtcgcatttctttccccgcccctgagaccctgcagcaccatctgtcatggcggctgggctgtttggtttgagcgctcgccgtcttttggcggcagcggcgacgcgagggctcccggccgcccgcgtccgctgggaatctagcttctccaggactgtggtcgccccgtccgctgtggcgggaaagcggcccccagaaccgaccacaccgtggcaagaggacccagaacccgaggacgaaaacttgtatgagaaggtgagaggcgggggggggggggggggtagtggggacggaaccccgaaggggtcagtccgggatcggcagatggggcgctgtagaggacgttcttaggcagtagaggactgcgcggccggcgaaagcctagaagacttgggaattttgcctaccttgtgttcctcctttgtctctcggtatcttcgttccagggccagaggcaggattggttttattttgcagacagaaatcacacctcaagtggacagcgctcaaaacacgttagaagcagtatagtacaacgataatactaaacaccgatatggcacttgctcgttgccgtctgcattcttttttttttttttatagggacgagatctcgctatgttgcccaggctggtctcgaactcctggctcaagcgatcctctcgcctcggcctcccaaggtgctgggattacaggcatgagccaccgctccgggccccgtctgtgttctaaacacttgacatgcattagctcatcttatactcgaaacaaaccccatttcgaggtgggctctattattatactcatcctacagatgaggaaactgaggcacagagatgttaagt

SEQ ID NO: 17031 - DNA, 1146 bp, Homo sapiens
agtttagtcacttgcaggacgctacacgatggatggaagccaatcaggttgctttgccgcacttgaacccccccccaaacaaatactactttgtaatcgagcgctccccatcgcctgattcttatggacacagttccctgccctgtggccctgtgtcccatccccccgccccctctctccccttcctgaccctcactatctcctcttcccatctctcgctaccccactgggcttctcatccagagcccacactcaccactggccccttcctaccaccaggcactagtgctgccccttcacctctcccagctgagcgttcagagaaagagctgccagggtgggttctttcacctagcttcccactcccccggggctggtggggggggcacccctctctggggttagccagagccaggacctcattccaccctcaggaccactggaagtcctgccagtgaggagcttagctattggcacagtcactagcaagactcattttgtcagccccatccctgcatgtgaatttggccctttgattttcatgcaaggggacagcactgctctgttgatctcaagttcccgtcgagtatgatagttttatcgacaccctggcctcacttcgccgcccctacccttcctatcacatctccacactcgcaggaggcaccacctcaggcagctctgtcttctcggcaaggacctgtgcacagtcagccctggggggagcctgtcccccaagcctggcacgggatcccaactcagcagctttgggacctccgagacccaaagatctgcctggtcacccacccctgcccagatccctggtgtagggcactggagagcagtttcaggggaggaaggggcagaggtggtagaatgggggatcccggcagaggcagccctggggccgtctcctcggggttggtaggctagtgccatgggcccaggacccagccatccatgggaagacggcctcatggcagaaacttccatctgttcgaaatggctctttctttttccccttctccagcactagcgcacctgcgctctctttctctttttctcccctctccctccccctccctgtctcccctcaccccccaagtgtagcctgtgtagtcctggccctgggtgtggcctggcagt

SEQ ID NO: 17032 - DNA, 1150 bp, Homo sapiens
cctctactatgaccccaactcccaggtaatagggcagcccagggagggatgggatcgggtcaggtcgcgtcaggaacagctagccctgcaggttcccttcacaaggtcttccctcacatcccctcttccctcctcctccctcagtattactacaatgctcagagccagcagtacctgtactgggatggggagaggcggacctatgttcccgccctggagcagtcggccgacggacataaggagacaggggcaccctcgaaggagggcaaagagaagaaggagaagcacaagaccaagacagctcaacaggtgaacaccagggtccagcagtcactggctggctgtgtggtgtcttccagcaacggcactctgtcagctcttgccctctcctgccaagggagatggcgggcaggtgtggatgtgggcagtgactgcttagcagaccatgctcttgccccagctctgctctttgctgaatggccttgagccagagcagtctcctcagtgtgtggcagggttgcccaactccaggaggtggcttgtgccatccgagtgagccctgtcaggtgtcttctgtcccatggtggggaccctcacattctgctggtgaatatacatgtatgccagagaaattctcacaggccataagggggtgggcaggaaaaaagccctgcaatgttttgtgggagtgggcagatggagggcacctcagtgtctctctgtggagaaagggtgtgacactgtgagcgtagcgtttacaagcaagcactaagtgttaccttagcaacctgatgaattctaaaaatggtgctgtgctggggggaacatggaaatatagaatgtggcattgtgtcatgcatataaagttatacacaaataaacattcctatgcatttttaaatgataaaatggaaatgcacaacaaatgtgacagcgtgggtgtatgtcaggggaagaggagtgtcttcatccatttgctgctccataacaataccacagactgggtaatttataaggaaaagagattgatttggctcacagttctgtaggcagggaagcccagtggtgttggcatctggtgagggccttcttgccgcatcataacatggcaaagggcaagagagcatgcatgagagcaagagaaaattgg

SEQ ID NO: 17033 - DNA, 2265 bp, Homo sapiens
aaaagaaaacttcaaaaatagcttccagcctatcagctccctgcgagatgacgagaggcgggagtcagccactgcagatgctggctatgccatcctcgagaagaaggtgtgttggggccacccccctgcaccctgccccacaatcttgtccttcctttgggccctctgtggagtccctgaatttctgtgtccctccaccccagggagcactagccgagagacagcacaccagcatggatctcccgaaattggccagtgacgaccgcccagtgagtgcccaaggcagagaggggcgggggctctgatctggccaggcctgaccgcccaccctcaccctctacagagccctccgcgaggactggtggcagcctacagcggggagagtgacagtgaggaggagcaggagcgtgggggccctgagcgggaggagaagctcaccgactggcagaagctggcctgtctgctctgccgacgccagttccccagcaaagaggcgctcatccggcaccagcagctctcagggctccacaaggtaacagcggatggttggcagggcatgctggggcctggcccactgaggctcatcctcttcacttctcatcctgtccctcttgcagcaaaaccttgagattcaccggcgagcccacttgtcagaaaacgagctagaagcactagagaagaatgacatggaggtgaggtgtgacctgaccctgggctccctcccctgtgtcccttccaagtccccatcacctcaggcagctggagttcaatttctcacgtgttaaccccgtgagccttcttccccattttcctatcctggctgcttgtgcctgtgatggcctgaccctcaggacctgagcctcattagccagatggcatgccctgtgggaccccactccccatgcctgtgttgcctgagaaaagagaccagctccccaacattcacatacacatacaaactttcagcaaatgaagtaccgggaccgtgcagctgaacgcagagaaaagtatggcatccccgagccgccagagcccaagaggaggaagtacggcggcatatccacagcctctgtgtgagtggctgggccaggtgagggggtctggagcccggggccggggccggcaggccgaccactcatgctgtgcaccgcccctgcagagacttcgagcagcctactcgggacgggctgggcagtgacaacattggcagtcggatgctgcaggccatgggctggaaagagggcagcggcctgggccgcaagaagcagggcattgtaacgcctatcgaggtgagtctcaggcagtcctgtcccatcccccagcacccctcacagcatcccccaccagcctgacagagcctgcctccctcacacaggcccaaacacgggtgcggggctccggcctgggtgcacggggcagctcctacggggtcacctcaaccgagtcctacaaggagacactgcacaagacaatggtgacccgcttcaacgaggcccagtgagcagcttcaagagcaacttctccacatgttgggtgtccatcctggggcagggaaggacagagtgttggatggctgggacggggccttgctcttgtcggccagcccactccccagccagagagggcttgaccaaatcaaattgaggtggtgacttttgttggaaaattgggctgggatcacgtcctgttttgtaataaaagctgaaaagtctgcatgttggcctctcctctttctcgtgctctagcacagttgtatagcctatacagacacggggacccaagcagatggacaggggaccttatcaggccaaggtggatggcagtggtggcattcagtgtctggaacataatggctactagaacatggggttctgacctgtaccccgacccataatatcctggttatggcccctctcccttgttggttccagcaggttatgttgtaccaggaaatctagcaccaccaggcatgaagcgccccctgatcagagctaggactgggaacccccatcccctgtccttgctgccccctggctttacttagcctgcagtcccaaggctaaactgcattttgccatccctagatctggagacaatgccctcaggcatctccaagtagaatacaagaggtactcaggttccagttggcccagagccctcaacaggctgatgacagaggggtggaggtggagcttggcctgcaaatccaaggccaggtcccagggatgccctttgagaaccattcaggcctaccttctctgttgt

SEQ ID NO: 17034 - DNA, 1100 bp, Homo sapiens
acttgttcttttcctctattcctagggaatggccaagaacggcagtgaagcagacatagacgagggcctttactcccggcagctgtaagtggggccaaggccgggctgaggggtgtggaatgggacattgagaggataaggttgggtggggcaggccctgacctagagtaccccctaacctggcaggtatgtgttgggccatgaggcaatgaagcggctccagacatccagtgtcctggtatcaggcctgcggggcctgggcgtggagatcgctaagaacatcatccttggtggggtcaaggctgttaccctacatgaccagggcactgcccagtgggctgatctttcctcccaggtacctcttcctagcacccttccccctttcccccttcccgaggcaccactgttcccggtgccacagccatttcatctttttccctactgcacacccttacagttctacctgcgggaggaggacatcggtaaaaaccgggccgaggtatcacagccccgcctcgctgagctcaacagctatgtgcctgtcactgcctacactggacccctcgttgaggacttccttagtggtttccaggtatcttgggggtactacccagccttctgcccagttttctcagagcccatctctggtttattcagtagtgttcaatattgatttaatgggtcggcctgaatgtcaggttttgtgctgggggactagagtatgcaggcagcagttagcccctggccctgccttttcttttcttctttttttttttttgagacggagtcttgctctgtcgcccaagctagagtgcagtggcgcgatctcggctcactgcaagctacacctcctgggttcacgccattctcctgcctcagcctcccgagtagctgggactacaggcgcctgccaccacgcccggctaatttttttttgtatttttagtagagacggggtttcactgtgttagccagggtggtctcgatctcctgaccttgtgatccgcccgcctccgcctcccaaagtgctgggattacaggtgtgagccaccgcacccggcctggccccgccttttcaagtggggaagatgtgtacagac

SEQ ID NO: 17035 - DNA, 1427 bp, Homo sapiens
atatgttcctgggttctggccggggagttgaagggagaagacatggcccttggttcagagttgggaagacacatcctggtgtttgagatgaactacagacaatcctgtggggtccaataagagctggtgggcatgggggagaggtactgtgtttgagctattcctgggagaatgtgtccctggtatctgagctgagtggggaaaaagtctctggtgtttgaacagggcagatcagcggatctacttgtgtgtgagctgatttggatgggaagcagagaaggtcttcccgtgtagacttggagccagggacacagggtctcacggggtctgagctgagtctggggcacaggagagatggtttctgatgtccaagtggagcctggagctgagggaagacagcttctgatgtctgagctgagtcggggcaggaggttccttatcttgcaggggttgtggattttagggagaatgggtagactgacagctctcttcctgccctctgtaggtccttatacctttagcatctgtgacacctccaacttctccgactacatccgtggaggcatcgtcagtcaggtcaaagtacctaagaagattagctttgtgagtgtgtcgatgggatcagtgggctgtggggggtggttctaggcattccctagttctccattcctctcttctggttctgatgacctctccccccgccacagaaatccttggtggcctcactggcagaacctgactttgtggtgacggacttcgccaagttttctcgccctgcccagctgcacattggcttccaggccctgcaccagttctgtgctcagcatggccggccacctcggccccgcaatgaggtgggtgagtgggcgagccagccagcgcagacatgcctggcactgcaggctcaccatgcctctctgcgtgtccacactccctgccctcactgtggcctgacatatcctctcttggttctttctggcccaccaggaggatgcagcagaactggtagccttagcacaggctgtgaatgctcgagccctgccagcagtgcagcaaaataacctggacgaggacctcatccggaagctggcatatgtggctgctggggatctggcacccataaacgccttcattgggggcctggctgcccaggaagtcatgaaggtcagcacgggtggggagaggcaggattggggtgggccaggttcctccatgactctgtcacttgctctctgtctgtgtcaggcccctgttaaccactgaccaccccctctctcccttcccctctccaggcctgctccgggaagttcatgcccatcatgcagtggctatactttgatgcccttgagtgtctccctgaggacaaagaggtcctcacagaggacaagtgcctccaggtatgtgggtgggacctgtggggagggcat

SEQ ID NO: 17036 - DNA, 1099 bp, Homo sapiens
cttagcgccagaaccgttatgacgggcaagtggctgtgtttggctcagacctgcaagagaagctgggcaagcagaagtatttcctggtaagtggtccccttggatgtctgctcccctcatcttggcctctggccatcacccctggggcttccttcggcatctcaatgcaaccggtggcgcattctctttgccattctccttatcttgaagggaagcccagtgcatccctcgtttccccttctggtgcctccttcctcacatgactgcgtgtcatttcttagagtcctgcaacctgaagatgtggtgttagcccctctccccgtctctcaggggagtgaggggtgatgggtagcttcacactaacctgcatcaccctgaccagcctctgcctgtcttcttggttgcttcttaggtgggtgcgggggccattggctgtgagctgctcaagaactttgccatgattgggctgggctgcggggagggtggagaaatcatcgttacagacatggacaccattgagaagtcaaatctgaatcgacagtttcttttccggccctgggatgtcacggtgagtagggtaggaggttggggctttgtcgtctcactttcctcctttttctttttttttttttttttgagacggagtttcgctcttgttgcccaggctgtagtgcagtggcgtgatctctggcccaccacaacctctgcctcctgggttcaagcgattctcctgcctcagcctcctgagtagctgggactacaggcatgcgccaccacgcccggctgattttgcattttaagtagagacagggtttctccatgttggtcaggctggtctcgaattcccgacctcaggtgatctgcctgcttcagcctcccaaagtgttggtattacaggcgtgagccaccacacctcacccctcctttttcttgttcccattctttctgtcagagatctttctgcctctgccagaagcccttctttttggcctttctttccctcagcttctgttttttttttttttttttttttttttttgccttaacctctttttagtgctggttgggacagtgtgtctggggtcctcaaaactactct

SEQ ID NO: 17037 - DNA, 1178 bp, Homo sapiens
ccacttccagagtagctgtgcgccttgtacttgctttattcactgatggtccttctaataatgcctgcggaaacccattttgtcaactgtggccacatgtaatctgtttgctctgtctgcagtgggctcgggatgagtttgaaggcctcttcaagcagccagcagaaaatgtcaaccagtacctcacgtgagtaactcgagtgccctctcgccctgtccctgtccaccagccaaggcatcccggctgctttcctcatgacagtaacacttggcaccaggcacacttttcacatgaatgagtggctgttggggcctcatgttgtttggggtcgggactagttttccatggagaaagtaagattgctctggagcccactcttgaggctgacatgtaatcctatcctctgtcctcttcgattcctgatagagaccccaagtttgtggagcgaacactgcggctggcaggcactcagcccttggaggtgctggaggctgtgcagcgcagcctggtgctgcagcgaccacagacctgggctgactgcgtgacctgggcctgccaccactggcacacccagtactcgaacaacatccggcagctgctgcacaacttccctcctgaccaggtaatgcccagttgttgggtccatttggcagaatgtgtttccctgaaatgggagcctgcagtgtgggtcctcccactgtggagtccagctgtggcaggtgccctgaggcatggggatctgagaagagtgattgatcctgacctgctttttcctcaccctagttcctttgagcaaagaggcttggttgctattgcccttgactgtggtgtgggctgcgtcatacctgattcccagtcagggctgtagggattatgggggagaaattctggagttaagagcacaggaatcaatatgggttcaaatccaaactctacttgaacttaggcaaatcacgtaacttctctctgtacctcagtttcctcgtctgtgaagtagaaataatagtgatctatctcatggggggtttggggaggattaactggtatttattaaaatgaagttagtacaatgcctggtaatccatgagagtttgttaaatgatgggctgtttagcacaaaatggctacccagtgattggtaattgttctctcagccagatctctggttcaacctgtg

SEQ ID NO: 17038 - DNA, 1435 bp, Homo sapiens
ttctctcccaggatgtctctcctttccaaatcctttttgtacctgaataccttttgccccaccctgggctctcatttccatctcagaccttagcctgggatctaaagggctgacagtgtccctttcttcatgcagatgacagtcgtctagaggagctcaaagccactctgcccagcccagacaagctccctggattcaagatgtaccccattgactttgagaaggtatggggtggggctcaggacagggaaggaggatgggcaaagcatagacaggctggagaaaacaggagtatctggagccagccccgggcctttgtggggatcagattgtgggcctgccatatggctctgaatgagtaggtgttcccagccatccctttgtgatctgggagagtccagcaggcaattgcagtggaggatacacatcttctttatctgatcctctccccactgccttcacaccctccccactcataacaggatgatgacagcaactttcatatggatttcatcgtggctgcatccaacctccgggcagaaaactatgacattccttctgcagaccggcacaaggtgaggggaatctaaatctgatgttccaccctcctccaggtttgagttacccacacttagcccctctgtagaccctgaggctcttgtacttaactaccaccttcttttgtcccttctgtctctcagagcaagctgattgcagggaagatcatcccagccattgccacgaccacagcagccgtggttggccttgtgtgtctggagctgtacaaggttgtgcaggggcaccgacagcttgactcctacaagaatggtttcctcaacttggccctgcctttctttggtttctctgaaccccttgccgcaccacgtcaccaggtgggggcctgcatccgaagcagggtttgggtggggtgtatctgtgtagatctggttctgattcacgtcataccctgtcaccaggtgagggtttctgtctgtgtacctaccctttttgtgtatcctttttcacttattcattaatcacattatttgagtacgtgcgaaaagatgggatatttgaattgtgccctgggagattattagtaactacacaataatggcagccaaaatttattggacgcttcctacacttaagtgctttgcttgcttcattaatgaattcactcaaatatttattgagcaccttttgtgtgcagggactcttctaagttatgttcctcaagtagattatataaataacctattaaatgattttggaatcaaaaaaggataaaaagaggccgggcgtggtggcttacgcctgtaatcccagcactttgggaggccgaggcacgtggttcacctgaagtcaggagtttgagaccagcctggccaacatgatgaaaccctgtctctactaaaaatacaaaaaattagcc

SEQ ID NO: 17039 - DNA, 1588 bp, Homo sapiens
gcactcccgcctgggtgacagagcgagactgcatctcaaaaaaaaaaaaagataaagaggacttgagaataccagggggcgaggggatgtatttgagattttgtgtaggatggtcagaaaaggccttgctgaaaagatgacatttgagatcagacttggaggatgtaaggggacaaactgtgcaggcttggtggcgagtggggacacattccaggcagagggaccagttcttgaaagggtaccaagataggggtgtgcctggcaagttggaggaattcaaagtccccagagtgagtgtgagattgaggagggtaggagatgagaagaaaacagaatttcattgcttagggtgagataggaaccacaagaggatttcgaacaaaagagggttgtgatctgactaaacacgtctgcatgggggtaggggggatggagacagatgggggctggaccctctgggatggtctccatcttacactcccctctttgtcttgcagtactataaccaagagtggacattgtgggatcgctttgaggtacaagggctgcagcctaatggtgaggagatgaccctcaaacagttcctcgactattttaaggtaaggcccctcccttactctgtcaccccacctcagggggcgaggtgtacacggtgacttgctggcctgtccacctccatgaccctgctgttccccctccctctccagacagagcacaaattagagatcaccatgctgtcccagggcgtgtccatgctctattccttcttcatgccagctgccaagctcaaggaacggttggatcagccgtgagttggacactggccaggctaggggaggccctgtatgggttggggagcctcatcatccagctgtcccactccagttcactgcccctacctacctgcccatcctctcttgctttctgccctcctgaccctatactcccatccccctatccccaggatgacagagattgtgagccgtgtgtcgaagcgaaagctgggccgccacgtgcgggcgctggtgcttgagctgtgctgtaacgacgagagcggcgaggatgtcgaggttccctatgtccgatacaccatccgctgaccccgtctgctcctctaggctggccccttgtccacccctctccacaccccttccagcccagggttcccatttggcttctggcagtggcccaactagccaagtctggtgttccctcatcatccccctacctgaacccctcttgccactgccttctaccttgtttgaaacctgaatcctaataaagaattaataactcccacatcgcctgccctgctggttccagggaaggaagggacttcctggagctgtctggttcagatgataactcagagggctcaaccccaccacacctgccagttttctggacaaagaaaatgtaattgccacctcttcctgccctctctgcctaggaagagatggaggcaccagtgaggccatagtgagcaggtacttgggtccatgtgactgttaatttgagctgggttcaattctcaccttctccatgtcctaactccttgctctgtgaagaggaaagttacggtgaccag

SEQ ID NO: 17040 - DNA, 1624 bp, Homo sapiens
tggcctgtcaacccacccattggcctgtctgctgggtgctaacaaagctctcatcactccttcacttggtctgtctgtctctgtcttggtagttgccggtggacagcatggccgtgccagcctcccacactgaggccaggtctaccccccatcataccagcccccaggaccactaccccacggccagccaggggtccagagctagcccaggctggggatctcgactcagacaagatggtgacaatgccttgagtctgaggcatcctctgcctgctttcctgcctgccccacctgcctcatattgtgtgggcctttttttgtttgtttcattcattgtttttttttttttaattattttaaatgagatttttgttttttttaaatgcaatatctctgtatacagactggctgggccccaccccctgcgtgtggccctcccacagtattttgtgcaatgaagccctgctcccagcctttcagagacagggacacagcccctatttggaaccctgatcatcaccagaccctgggattggctatgggaaagcatgccacagccactcgccttcctacccccgcccgccatccccagttgcagggggatctggggactaccagagactctgggaaatggacaaggtggggggccccactctttctctcctgcagtcccgtagctggggcctccttccttctcagggtctccccagcccagtccccttgctcccatcccactcggtgctgttgggtaggggccctgccaggaactgaccagctcagcgaggagccataatgtgcatatgtgcacaagcagggttgggggaggggggtgtgaggggttgtgcccaggtgttgccccctatctcctggggagggtgaggcagggcagggacagtctccagggtcagtccctggatgggtggttacctccccttcctccaccctaagccctggggccctgaaatggggtgggagggcaggggtgggagccctcctagtgggtttggggggttgggttcctgaatgcaccataatcgctgtatgaaatattaaaaagtctaaagtgaaaagcctgcttgcaaatccctgtaggggtggagggtggccgagctggggtgattattgggaccttggagaattcatacctcatcaccactgtctaggaaaacactgggagtgggccagggacacgtcacgactatgaaaaaggcatctaaggtattgcatatgtaacagtagaacatggagttgaagcaggtagggcaggctgaatggtgttgatgggttgagaagcagaaaggggagttagatttgcccaggaatatgaggaagcctgataagagggtggaggcagggaagtggagagacgatgtttgaaagacactggacggcccaatagaaccatggatgggaagatgaggcaaaggcccagtatggccatctgactaggaaaccatgaagaggagggaatgttcaggacggtagggggtagattttggaccactgagtaggtagagaaatcctttaatacatggatcaaattaagcagtggggccatagatggacctggaaatttcaattattagtgtccaggaagtaacagaaaccatgggcatgggtgaga

SEQ ID NO: 17041 - DNA, 1219 bp, Homo sapiens
atccacctgaaacgcttttcctacaccaagttctcccgagagaagctggacaccctcgtggagtttcctatccggtcaggggccagggagaggatggctgggggaaggcagggaaaggagggggtgtaccagtattaaccctctccccacccacagggacctggacttctctgagtttgtcatccagccacagaatgagtcgaatccggagctgtacaaatatgacctcatcgcggtttccaaccattatgggggcatgcgtgatggacactgtatgtgccaggctgtgggtggggcctgccctgggggttctgggcaggggggcgatcaggaccttcccagtgagtgactagggatgtgagccagtggtgaggttatcgtggtgggaggagtgacaagagtgaatctggacacttctgagaggcaggaagggtaggcgaggataactctccttccctttcagacacaacatttgcctgcaacaaggacagcggccagtggcactactttgatgacaacagcgtctcccctgtcaatgagaatcagatcgaggtgtgacttccatcctacctcctccccttcttcctttctgattccacctccccacccccacaatccacactgactcctgtcctctccccacagtccaaggcagcctatgtcctcttctaccaacgccaggacgtggcgcgacgcctgctgtccccggccggctcatctggcgccccagcctcccctgcctgcagctccccacccagctctgagttcatggatgttaattgagagccctgggtcctgccacagaaaaaaaaaaaaaaaagccctctctgcaatctcgcttctcgtgtccgccccgcttctcttattcgtgttaggtgcccccgccaggcattgcaggcttagtcgtggctactgttctcctgtgccgctgcatcgctctctcccgggaaagaacaggtcgtgtctcctcctagcagtgcgcgccccgcctgtgtttgcccttccagcagtgaccctcccttctagtctttatttatggtcgtgcccttccctctcctcagcccagagtgttctgcgtgggtggtgatgggggttcacctgaacacagagtgtattttcttattgaggccctgtaccttctgctgtgtgtgtgtatatataaagcaccagtctgctccccactcagcagtgtggttttttcctccatggacttaactaa

SEQ ID NO: 17042 - DNA, 1119 bp, Homo sapiens
aggctgaggcgggagaatggcttcaacttgggaggtggaggttgcagtgagctgagaccatgccattgcactccagcctgggcaacaagagcgaaactctgtcagaaaaaaaaaaaaacagaaaaaaaaaaaaaaaaaacccaggacattctgttcgtgcttcttatgtacctgacggctcagtgcagtgtgtactgacttccccattggtccccagcacagagtcttgtgtgctcctctaccctccaagacagtatgctctgtcccccttccctgttctctcccccgcaaccctgtgcagtgaagctgagaccttggcactcaagagtgagacaagcaacaggagggcctgagcagagaaggaactggaaggacttcagatgtgagcaggatctcttggactgtcgtgtgaaaattaggctgcagggggcgacaggagcctggactttgaattttattttgtcccctgccactttgcttctagactatcattattggacctctgaattcttgtctgccttcttgtaggagccccatggcacctgcccagccccacctcagcccatcttgacaaaatctaaggctccatggagccaccacggggcccccctgccaatggggccgagccatcccgggcagtgggcaccgtcaaagtatacctgcccaacaagcaacgcacggtggtgagtcatggaagcgaaatggcaggggctgtggatggacccagttgtaactctgggatcaaaagggtgacaacggttgggggaggcctttgcagaaggatgggaacatcagctgcgcttctgttgggcattgaggacccctacatctgcacatacacacaggtgactgtccgggatggcatgagtgtctacgactctctagacaaggccctgaaggtgcggggtctaaatcaggactgctgtgtggtctaccgactcatcaaggggtgagtgtggcagccccacgcccacccactgggtgtcccacctcccatcccctcctcagtcatttgattccttctgtactttatcacagagtcttccattagtcttcccttagtctttagtccccccttatctgcagggtacatgttccaagacccccagtggatgcttg

SEQ ID NO: 17043 - DNA, 1141 bp, Homo sapiens
agtggtataggggcaccaatgggaacctcccaggcagggtgagaggcatggctattaggagtccctgtagtggtccttgaccctggcggacatcttcctacatgaggggctcacggtgaagatcggtgactttggcttggccacagtgaagactcgatggagcggggcccagcccttggagcagccctcaggatctgtgctgtggatggtgagttgggccaggctggatggggggcacatggggacgtgggctccgggattggggtgtgtggggccaagtggggacggggatgcctgtgccagatgtgggtgtctggactcctcatgtcccacctcgtgtgggtggctctgagttgtaccctgtgtggccagtgggatctgggactgtggaccagccatttgctgacctccgtggtccccctgcctggtctggcctgttgtaggcagctgaggtgatccgtatgcaggacccgaacccctacagcttccagtcagacgtctatgcctacggggttgtgctctacgagcttatgactggctcactgccttacagccacattggctgccgtgaccaggtgagccccacaccttacccacagttccctgggctgagggatcccctcaggcatccataccccacatcccctcctttgcactgataaatgccacactttccccagaaacctaaaattttctaggataaggactcccagaatcccttgggctccagacacttacaataaattctctgggtctcccctaccccaacttccctcttctcacatccacagccctctgggacaaaaatctttgaagtccaaaatgccccgaatctctatacctagaatcccctgaggcccccaaataccccaaagccctctgtatccctagacgcctatagtcgtctgctctgggtactcaaaatcccccagatcctcaaagcccagatctcatttctcccagcatcccatttttccccagaaacagaacccctttgtgcttctggaatagtcatggacacccacagtcacctaggccttgggtatctagcaggccccagggccgggatacctagaaccctctaggccccagacccccacagaagtacaagctcccccagacccagaactccatgttttcc

SEQ ID NO: 17044 - DNA, 1592 bp, Homo sapiens
cccagatcacccctttcctgcccccgtctgcccccagattatctttatggtgggccgtggctatctgtccccggacctcagcaaaatctccagcaactgccccaaggccatgcggcgcctgctgtctgactgcctcaagttccagcgggaggagcggcccctcttcccccaggtgggctgggtagggggctggacaccttgggtgggtgactctgggatagaggaagactgagatggaggcagatgtgaatatgaaagctcagaggtatagtgtgtgtgtgtgtgtgtgtgtgtgtgtgtgtttcaccatgaggctgggactgttgggggtgtgtgtgtatgtgtgtttcgccatgaggctgggactgttgggtgtgtgtgtgtgtgtgtgtgtgtgtgtgtgtgtgtttcgccatgaggctggggctgttgggatgcccacagggctctggacacccctcctcacccccacctgccctcagatcctggccacaattgagctgctgcaacggtcactccccaagattgagcggagtgcctcggaaccctccttgcaccgcacccaggccgatgagttgcctgcctgcctactcagcgcagcccgccttgtgccttaggccccgcccaagccaccagggagccaatctcagccctccacgccaaggagccttgcccaccagccaatcaatgttcgtctctgccctgatgctgcctcaggatcccccattccccaccctgggagatgagggggtccccatgtgcttttccagttcttctggaattgggggacccccgccaaagactgagccccctgtctcctccatcatttggtttcctcttggctttggggatacttctaaattttgggagctcctccatctccaatggctgggatttgtggcagggattccactcagaacctctctggaatttgtgcctgatgtgccttccactggattttggggttcccagcaccccatgtggattttggggggtcccttttgtgtctcccccgccattcaaggactcctctctttcttcaccaagaagcacagaattctgctgggcctttgcttgtttattttgtttcccgactcttctcttggggttcagagccgctgaggggtggggtgagtccaggcaaggagtgaaggtcagggggaggtgcggaccacataaacagcgtcactgcacgcatcaccacaggcggcacgatgaacgaggaccacatatgccaagcacggcacaaaaggaggccacgtcagtcacagacacagacaccacagcaaaggtggggaagcggagaccactggccttccgtgtgcaaaggattctgggaagatgggtggagtttgcatatttaaagacagctgtcagaggcaggaaactggggagggggtccctgggggaaccgaggggtcctggaagtgggaggggctcccaaggtattgaatgaggttgaggggagctggtgaagggaaatccttgtggggctaggtgttgggtggcatttgaagatgtggatcttcagagggatggaagatccatgggaaggggctcaacagtaggggtttcttgaggatttggaaaat

SEQ ID NO: 17045 - DNA, 1186 bp, Homo sapiens
gatctcgcctccctggcccaggactccacccactccacctgagtgctcccagccttgagaacctgttagggtccaggcccatggtggcaggtggggaggtcacaggcacagccccaggatcagaggggcagggctggggctgggcctggggtaacgttgtgtttctctccccttcctccccttcctcttcccccttcctcccacgcctccaccttgtctctctctagcaaatcccagtctctgaccaatgccttcaaccttccagagccagccccgcccaggcccagccttagccaggacgaggtgaaagctgagaccatccgcagcctgaggaagtctttcgccagcctcttctccgactgataccccactctgagaaccccaaaatccctgggcaacccttctctgggccctgaatccatttctcacttttggagtctccaaatcccttgagaacccatctcccggttctccaagattccacctctcattcctcaagatccccgagtaccttgagaaacctgactcctcctggccctaaatccggttctcacatgtggaatccccaagtccttttagaaccccactcgtggtcacttcaggatctacttctgttttagaacctccacattcctgaagacctccgcccctggtttccccagagggcgttttccttcctggaagtgcccaaataccaggcaacccattgcagaatcccttcctggagccctgaagttcctggaaaaccctatttttggtcccaaatctctccagcacacctatttcccatcataattttccaaatcctcaagaaacccctactgttgagccccttcccatggatcttccatccctctgaagatccacatcttcaaatgccacccaacacctagccccacaaggatttcccttcaccagctcccctcaacctcattcaataccttgggagcccctcccacttccaggacccctcggttcccccagggaccccctccccagtttcctgcctctgacagctgtctttaaatatgcaaactccacccatcttcccagaatcctttgcacacggaaggccagtggtctccgcttccccacctttgctgtggtgtctgtgtctgtgactgacgtggcctccttttgtgccgtgcttggcatatgtggtcctcgttcatcgtgccgcctgtgg

SEQ ID NO: 17046 - DNA, 1162 bp, Homo sapiens
caagcctgttccctgatggctcctgatggcctctgagcccagtgactatcttgaagccccactggctattcctgtgcttaaactccttagccgccaaccgggtggggccccttactactgccagtttttccctgtcctttgggacaattccacaggcgacctgcctgactgacccccagggcctattccccagccaccattccaggacactgatttactggcttactgttacctttcaggacccagtgacatttccctcaatgggaggggctgtcctggggtatgtacttaggtggggtgagagcaagtctccccagcggctcagtgttgaaagctgaggagaggaagttctgctccacgggggaggcagggagaagccctcagagatgtttccctcctcccttccaggtgtttccctgtttatccatcccctgcaaactgcagagtggcactcattgcttgtggacggaccagctcctccaaggctctgaaaagggcttccagtcccgtcaccttgcctgcctgcctcgggagccagggctgtgcacctggcagtccctgcggtcccagatagcctgaatcctgcccggagtggaagctgaagcctgcacagtgtccaccctgttcccactcccatctttcttccggacaatgaaataaagagttaccacccagcagacactgtttctgtgtagtgcctgggaacaaacccatgttgctgatgacctggtgtgagcaccctgggaccagtggggatgagggatgccaaatgttgggtttttatattttacttaaattctgatgtactggtagtaattctcaacattggcattagcactgatgatctgcaacagcagcaatggtcactgaacctgcattatcaaccgtaacctctgaataatttctccagccaatactttaaaacattttcctatactgattcctaattgctatttgcccagggctttctagttataaattatcccacagctgacaaatcactgccttactggaaattccccattcacacatcttgccagctgacagagtcattgacaaatgccctaccaattggcaaatgactatcattgcctcaagcacagtcctgatgttgtccagtgaggatgccccatccaaacacgtgggtgttactgtcctcatc

SEQ ID NO: 17047 - DNA, 1835 bp, Homo sapiens
acatcccttctatcagcgtggatggcctctcgacccccgtggtgctctccccagggccccagaagccatgactactaccaccaccaccaccaccccttctggggtcactccatccatgctctctccagccagccatctcaaggagaaacatagttcaactgaaagactcatgctctgattgtggtggggtggggatccttgggaagaattactcccaagagtaactctcattatctcctccacagaaaacacacagcttccacaacttctctgttttctgtcagtcccccagtggccgcccttacacgtctcctacttcaatggtaggggcggtttatttatttattttttgaaggccactgggaggagcctgacctaaccttttagggtggttaggacatctcccccacctccccacttttttccccaagacaagacaatcgaggtctggcttgagaacgacctttctttctttatttctcagcctgcccttggggagatgagggagccctgtctgcgtttttggatgtgagtagaagagttagtttgttttgttttattattcctggccatactcaggggtccaggaagaatttgtaccatttaatgggttgggagtcttggccaaggaagaatcacacccttggaatagaaatttccacctccccaacctttctctcagacagcttatccttttcaaccaactttttggccagggaggaatgtcccttttgttcttccccctgagaagccattcctttgtctgccaacctccctggggtcctgcctgtttcctcccaatggagggtttttttggggggtggtccccgtctggggggcccctccagccagtactccaggtctccctgtctctcccccgctgccattttgatagtataatctatttttaaatggggcttttcaataggggagagggagtcatctcttcctatatttggtggggtgggtgggaaggaagggatttgggggggaatcttcctgccgcctcccccactccaagtgtttatttttgataccaaacatgaattttcagttccctccctcccagccccccaatttcctgcgggcgggtacaaaggaccctttcaatgtccctggagttgggagggaggaatgggggacataaagcctgtcctgtctctattctaggcaagagagagtgggttcaaaagactcctgggctcacctgttagcgctggcccagcccaggccttgggacctgggggttggtgatttgggggacagtgctacactcgtctccactgtttgttttacttccccaaaatggaccttttttttttctaaagagtcccagagaatggggaattgttcctgtaaatatatatttttcaaagtgatgctggaggctgctggcactttttctctgatgttgtcaggactagctgagcgtgacacgcatgactgtgtgtggagggtgtgaggcagaggtcgattgtgagagaaacggtgtgatggcgtgtgtgagaaacaatagtagggactgcatatcggtaaccatgtgtgtgtcagagacgtggaaagctgtgattgtgtgtgagagtgtgcagaagttgtgaccacagacttttgatggtgtgtctatgtgggaaattgtggctgtgtttcagaaaataactgagcctggatgaatagtcaaggtactgtacaagaacctgtgatggtatgcacaaaataatgtctacgagaagggaacggggactgcagccctgtcactgtttgatggcgagcaagacagactgggtgaccaaaaccacatgtgagagactacgtgggcatgaaactacagtagaggt

SEQ ID NO: 17048 - DNA, 1183 bp, Homo sapiens
cagaacgagaggtcctgcttgtgaattactgtatttgtggccctcatgcttctgtggcttttcactggggccatctctttgctggaactggacaacttaagctgtgaaaaactagggatgggcaatgtttggatttatcaaaatgggtgggtgagttagacctgagaccctgcctgtgccctttcgggccttctttttaccctgagtaatcctgcaaggaaacaagccgtgggctcactttatgaactatttaaggtaaacctatcacattcagtgcctttccagggagaggaaacgtggggcagactggcttgctcctggtgcagtctccttgaaagatgcccaagggcactggaaataaagctatttttcctttctacttatagagaatcttgctagggtttcaggtccattgaaggccatcctatagtggggtgggggtgagggtcagatctcaccatttcaggtagatcttggactcctgcttcctgggacacaaatggcaagctgatggcccacatgtgggtgaatggaggtgagtgaagcacagacaggggaatggatggagatgaacatcagcatgtgaataaaaggattgggattggaggaagagagaggagggcaatgaagggctaagtggggagtgaatggagtaaagaggggcagaagggtggtgaacagggaagagtagggcgaaatgggggaaatatccagtgttgtgagttactggagaagaaacagttgagtgtaagtaaacatgagtagtgttggggagagaaggagggagtagactggcagtgagtgggtgcagagtggaggaaattgggagtgatatgaggcacagtgtgaatgacagtggttaatggggttgggtgaagagcagtgcaggaaagtggcaaagcatggcatgacgctaatgaatgaagaggggaagaatgccgggcagtcaaggtgggaagactgtgctggaatgggaggcactctgtgaggtgagtgatggggatctgtggtgtcagaggttataggttcttggggtctcagtgatgcatgaccttgcgttggtggtgatggggagttgggtggaggtgggaggtgatccctggggtttctgcacaaagaggagctgcgctgaagaccctgtagtgaccacaggtgtatgggatgggatcagcctgtgttctag

SEQ ID NO: 17049 - DNA, 1250 bp, Homo sapiens
agttcatggcacattagagagctaatcagcagtatctattatggacactgaaagaaagttgtgtcaattttactcacattttaaaagtatattttgacttgtggtttaaatatgggagtaaattcagcctttcttcttttcatctcagtcataacccaaaagctacgggagaaaaagcagaagtgtaatctctgtatctgacaaaattaggagacagctgcaaccctaatgagagggctgccacaggcagaggaaatgaagcactggtgcaggagatttcagagtgagagtgctcaaggctgcaggtgcaagacagcactggtaaggactcttagctgaggttcgggatataccccgaggcgcggaaccatagatataacagtggtaacagtgcgtgggcaggtaggaggtaggatgtttcctagaccatttggggtctgaggagaaacaggctggggcctcgagaaggagtcactcagacaagccatatttttagaaagtagtctactgatgggagcaacagttatggcatgctgggggaagagaagggacttttccttgtgaagagccctacagctgcccctatttactgacttgggagaagtaaagtcagaaagaacgaacagctgtggggggaaaaaattctcagttgtcaaaaaaaaaaaaaactgatctgcttagaatgtggccctggtttcttttcccacatgaacctccagcaaatagcaagtccaggaaaaactcttctcattcaaagaggaattattcaaaagtaatcaaaaccacaaatgcatttggtttttgggccagcaattccacttctaggaatgtacatactcacacatgtacaaaatgatgaacatacagtattcattaatgcagcgtttgtgaaaacaaaagattggaagctgtttaaatgacaccatatcagggttctggttccctaaattgtggtatattcatacagcctactcctgggtagacaacaatgaataaataaggagaacttggaaaccatttatgtagtgatgtgggataaccttcagtttatgttattaggtaggaaaaataaggttgaggacagtgactgccatttgtatataaaaaggagaaaaatggtaagtacataattgtgaattcataagttatctctggaaagagacatgagaacctggtaaccctgattaccttgggaggggaaggggcagtggtggctggggggatggaattgagagggagacaactgtatc

SEQ ID NO: 17050 - DNA, 1238 bp, Homo sapiens
aaggaaatgagtcctagagtgttgctagcagcactatctatagtatatgcccattaaatcgtggtacattcaccgtggagaactgtacaacaatgacagtgaacatcctgcaattacaccaaataacaccttgtagttattcattaaactgaacatatataggttttatgcattttctatatgtcatggttcaccataaaaggaggaaatgtcacaaaaatgttagcagcagagttagctaggtgtggtggcacattcctgcctgtaatcccagctacttgggaggctgaggtgggaggatcacttgagcttgggaggttaaggttgtcgtgagctatgatggagctccactgcactccagcctgggtgacagagcaagaccctgtctctaaaaaaacaaaacaaaacaaaaaaactttctttgacttttggttagctggcaaactgatacaactcagaaactgctcaatgtcaggaaaaccggaacttgttgatgaacttgttttcaaaatatcatctcatcaacgaggcctggacaaacaagccctgaggagggatctgcaacaaccctgaagacaacaaggaaagaaaccatgaaagtctgtctgtactgcagtgggaattcttgagtgaggtcttacctcttctttaaacctcttcaggagtgtcctgattatgtccagaattttccctaaaggcagggattcttaacctggatagaagccaggggtaaccatgaacttgatggaagaaaatgttacatctttattttcagcaatgaaactgaaatttagccttactcccaagttataaatgctggcaacaaatcacagtagtaaaagcagtacctgggattttcccaccaatacaaaccagttacagcaactgtaatgtaacataaaaagggcatcttgaagtattgttcatatttgtcacctcttggaatgatagcagatcctgtaagttgatgtattaattaaaaagcccatatattactgcatctcaattttgtttcaatttaatatatagtaataattgtaattcaatgtaattggcttccattgtaattgtgtgtgtgtgtatgtgtatgtatatacttttaaaaatattctgtgaaggggttcacagatttaaccagatgccaaagggttctgcagaacaaatttatttatttattttgagacagaatttcgctctgtcacccaggctggagtgcagtggtgtgatcttggctcact

SEQ ID NO: 17051 - DNA, 1181 bp, Homo sapiens
tcaccttctctggcaatttttctttccaaaaaattaatttttaggagctctttatatattagggagataacaggtcagagaatgggatcactttgtttttaaaatgatttttaaagaagaagacaaaaactatatctggtcacctttcatatgtacctaggcccttctgcggggcctcgcctagagcagtcacagaaatgtccttgggcaaaggatgggttttcctaagaacttctttgtccttgctaagtgggaccatcacctctttctctcccacagggctacggcatggcatacactgtccacaagtggtcagagctcagctgggccagtcactgggtcacttttggatgctggatcttctaccgtctcataggctgaggcacatctgtggaccctcataaccctcttaagacccctctcagggtgccactgatgggggatgagggaaggccctctctctactccttgaccccctccatccttgacccccaacacctcaacacacacacacacacacacacacaaaatcacaccattttcatgcctgtcaatccccaccccaccacaaggcaggaagggggtggtgcctgctggggcctagagggggatgcttggggaaacagagaaggggagatccagggcctccccgccttccttcttcctttttatatacaatttgttattgtcaaataaaagtaggaaatattcaataggcttcttcttcactgctcagaggggaataggaatgagtgaggaagggagcacagcatggataaaggtttggaagctggaaaccatgaagagagagcagactgtgattggttcatggttagtttatgattgattagatgatgagcctgaagatggcaggatcctggtcctgcttggtttgatcagggcagggacagattgcatagttggatgtgggggaggcctgattggctggaaaactgaaggatccccattctgattggttgctctgagtgggacacagaggagagaaagcaagagagatgaagggttggtgcctatttatccttaggactgagggttgtgggttctaattggatgggaggtctgggatgggtctggattctgattgattgctccatctgggggcccactggtggttaggcgtttgattggctttttagaactggcatatggagattgagggt

SEQ ID NO: 17052 - DNA, 1150 bp, Homo sapiens
aggagacccctctgagcgcagtgatggggacttgcaccagggtagtgacagtggaggagttggcgggggaatgttgggtcggacccccagggggttcactatgttaggctgcaggactctgctgcctcctcagggggcgatattcccaacccttctgtgcattgtgttgtttattaaaagcagggagcagaggtgttgagtcctggagccccaagctggtgcaggagcaacgggaagttaaggctgacctggggcctcctgctgtgtggcggaatctccatccctcagaccacccctgtctcctcccagccccatccagggtacaaattccagccctggaacagctcagagaccaaaaagtgatgttaagtatttgaggggagccccaagagaggagaaaaagctttgagtattgatgggggtaaataaccaaaatcacttatcagtggcctgcgtcaccagaaaatgtcaaagttacctgaagcagcaaagaggctcttgctccggcccctcccttccttctcagctccatttgttgccacatatgcgttgactggaactgcgactgacatcttgggaccttagggtcagtccacagcgtggtagagactccagcttggcccagcattgctgagctgctgaactcgcaccaacagtcttgttggagggaaataatctcccgtttgttcagtccagttatttgacagtgtggttacttgcaccccaagcatttctaactggcacttccatctaatagacctcagggtacatggtggtgagatagggacatcagtgagctggattgttcccatggtaaaggtcatgtatgtgtgtgtgtgtcatggtcctcaataccagccccaagcccagtgatttgctaggaggactcccaagactcagtatgtggttgtattcatggctacgattgacttattacaacaaaaagatatggagcaaaatcagcaaaaagaaatggtgtgcaggaccaactcccagagagacccaggcacaagtttccagggcttctctctcattggagtcacacaagatgtgctcggttcacagtaatgggttgtgacaatacatgcgaaatgttgctgaccaaggaagctcaattagagactcagcacccagaggttttttttgttgt

SEQ ID NO: 17053 - DNA, 1099 bp, Homo sapiens
ctggtgtggggtggacgtgggatgagccctgggggagactgtcttcagacttcctctgactttactgggctgccttggtgggagagggtcaggccctctctctctccctgggccctggtttcaggcctcccacccctttttctgtttgggtcacctgagttccagagtatgacggggattcagattgagagggtaggacaaacgtggcctcccccttttagctgagaccgtggagagggacaacatggaggaggacaatgtagaggagagcgaggaggaaggaccctgggagccccctgtgctcccaatcctgacatggccagtgctacagtctcgcacagggctggtctatgaccaaaatatgatgaatcactgcaacttgtgggacaggtaggcatttggagggctggatgagtaggtgttgggggtccctccccctcaggcactaagcctctacctctcgtttccccactgctagccaccaccctgaggtaccccagcgcatcttgcggatcatgtgccgtctggaggagctgggccttgccgggcgctgcctcaccctgacaccgcgccctgccacagaggctgagctgctcacctgtcacaggtcagaccccggtgcctggggtgggtggattcccaggactgtggatgaggtctcaggggctggaacttgggtttcccctcctggggagctgctgcaggacttgagaggggctgaagtccctgtcttaggggtggggaccagggaggggacagaccctcctcactgtcctgcgggtgctcctctctgtgcttccagtgctgagtacgtgggtcatctccgggccacagagaaaatgaaaacccgggagctgcaccgtgagagttccaactttgactccatctatatctgccccagtaccttcgcctgtgcacagcttgccactggcgctgcctgccgcctggtggaggctgtgctctcaggagaggtgtgtcctctgtgggctggggagaggaggacctggggggaatggaaaaagagagccatctgctgtttctggaggctctgagagagtcaagcagggcctgaggaaaggggccatggggaggggcacgg

SEQ ID NO: 17054 - DNA, 1249 bp, Homo sapiens
acccacgaaccagcccccagcattagctgcccaaggcccagggtccagttccctagcaatgacccagaagagcccagggcccagccccgagcacttgctcaggcctaccgggcagcccttgggaaccaggatcagacttttctccttaactgataggacccagggtcctgccactcagcactaaatgcccctgcagaccccaggggtctagcccagccctcttccagggcgtgagtatcgtcggttactgaggtgctgtctcctccccaggatcctgattgtggattgggatgtccaccacggtaatggaactcagcacatgtttgaggatgaccccaggtaagggctgcagtcaggggccgcagtgtgatcagggaggcgggtgagcacctcaggggtactggagcccctaaccagccatggtccgcttcccaccccctccctggcagtgtgctatatgtgtccctgcaccgctatgatcatggcaccttcttccccatgggggatgagggtgccagcagccagatcggccgggctgcgggcacaggcttcaccgtcaacgtggcatggaacgggccccgcatgggtgatgctgactacctagctgcctggcatcgcctggtgcttcccattgcctacgaggtacagctcaggatagatcgcaggacgtatgtgacacgcctgtgcaggtggcagcctggacctgcctccttggcatgtgtgtgtgtgactaccatgtggctgatgatatgagacagcgcatgggtgtttaatgaggctaccagggcagttggtggctgtgatcaccttgtgtatttgtgcacagatggctgtacatgactgccttctctgtgtgacactgtgtgagtgactgtcttggctgtgtgtgtgagggccttctgactatgcaccaatggcccgtgtcctggctggatctgtgttgtatgtgcgtgccatcacaagtgcttgagtatgtgcgtgtgcgactctgtgcaggcaggtatttctcaccttttctctgtgtgatgggtgtgatactgtatgtcactaaatgcaaccatctctgtgacagcctgtgtgggaccttctggatgtggaaggctgtgtgtgacagcagtcactgtctggctgtctgccctggctgtttgtgtgtatgtctctgactgggaggtagctgccttccctctgtgtgagctaggaggctggtggcttgtgtatggctgactctgggagggagggaaagggtgtg

SEQ ID NO: 17055 - DNA, 2363 bp, Homo sapiens
actcaggaccagccctcagaggcagccacagggggagccactctggcccagaccatttctgaggcagccattgggggagccatgctgggccagaccacctcagaggaggctgtcgggggagccactccggaccagaccacctcagaggagactgtgggaggagccattctggaccagaccacctcagaggatgctgttgggggagccacgctgggccagactacctcagaggaggctgtaggaggagctacactggcccagaccacctcggaggcagccatggagggagccacactggaccagactacgtcagaggaggctccagggggcaccgagctgatccaaactcctctagcctcgagcacagaccaccagacccccccaacctcacctgtgcagggaactacaccccagatatctcccagtacactgattgggagtctcaggaccttggagctaggcagcgaatctcaggtaaggctcaccacacccaggtaggggcaagaaggggcaagaatcgggcttctctgatacatctcttacttctgcgtgtccagggggcctcagaatctcaggccccaggagaggagaacctactaggagaggcagctggaggtcaggacatggctgattcgatgctgatgcagggatctaggggcctcactgatcaggtgagctcagggagaggctgggactgtggcttccttctcttgccaatttgtgtctccaggtaggagcatgtgatgaataaacatataatggggagatggggtcttcagcttacctagtttcacccacccactccaggccatattttatgctgtgacaccactgccctggtgtccccatttggtggcagtatgccccatacctgcagcaggcctagacgtgacccaaccttgtggggactgtggaacaatccaagagaattgggtgtgtctctcttgctatcaggtatggagcagaggaaggggatggggcggaggttggcccgggagcaaactgcagggggatgctgacccccacctgacactcacacccccaacctcaggtctactgtggtcgttacatcaatggccacatgctccaacaccatggaaattctggacacccgctggtcctcagctacatcgacctgtcagcctggtgttactactgtcaggcctatgtccaccaccaggtgggccctgggtagacccttcgacacgtgcacactcaccccccacacacacaccccttctgtgattgggtaaagggagaccacaggcccctctgcatggctgcctcatgtgattattttgcatggggcgggggctgtgggatagtccagaagacagagtggttgagggctggagtgggggcagccctgcagccgaggtagaggggtcctcactctctctcacctgccctattcttgcctcctcctcaggctctcctagatgtgaagaacatcgcccaccagaacaagtttggggaggatatgccccacccacactaagccccagaatacggtccctcttcaccttctgaggcccacgatagaccagctgtagctcattccagcctgtaccttggatgaggggtagcctcccactgcatcccatcctgaatatcctttgcaactccccaagagtgcttatttaagtgttaatacttttaagagaactgcgacgattaattgtggatctccccctgcccattgcctgcttgaggggcaccactactccagcccagaaggaaaggggggcagctcagtggccccaagagggagctgatatcatgaggataacattggcgggaggggagttaactggcaggcatggcaaggttgcatatgtaataaagtacaagctgttaaaaaacctggagaaagctttttgactttgagcaggtggagaaccccacatccctggccagcagagccgatgagtaatgaaggaatgagggagtgggtctctgtcaggtcaatcccctgcccatccattgcccccaaaaaactaactgaaaatagagcagccatcttgactggctccacgggatataaaatggtagaatccatgagaaaatgggtgcttgccttataaataggagcctcacagccagtcccagccacacccacaccctaggctgagaaggcaagaaaactagcaggaagtatccttaccaggcctgtttccccactgtctcattggcctgactggggatggtgggaggtccaggtttaacttgaatgtggtggtcatggtagcttcttggcagaaggggtgcctgccattgaccacaggtgggaaattggaggacagtctgagagctgaatttctcccacgtggtgagaattgctttggcagctcaagggagttgga

SEQ ID NO: 17056 - DNA, 1053 bp, Homo sapiens
gtggcgtgggcaagagtgcgctgaccatccagctgaaccaccagtgcttcgtggaggaccacgaccccaccatccaggattcctactggaaggagttgaccctggacagtggggactgcattctgaatgtgctggacacagcagggcaggccatccatagggccctgcgtgaccagtgcctggctgtctgtgatggtgtgctgggcgtcttcgctctcgatgacccctcgtctctgatccagctgcagcagatatgggccacctggggccctcaccccgcccagccccttgtcctcgtgggcaacaagtgtgaccttgtgaccactgctggagatgctcatgccgctgctgcagccctcgcacacagctggggggcccacttcgtggagacctcggccaaaacacggcaaggcgtggaggaggccttttccctgctggtccatgagatccagagggtccaggaggccatggcgaaggagcccatggcaaggtcctgtagggagaagacccggcaccagaaggccacctgccactgtggctgctctgtggcctgaaggtcttggccaagaaatgtagacctttccccaggccagggtgattgttcatttgacatgagacccctgaggcaactagctttgagggacacatcaggtatactagggaaagatggacatctctcttgttttcacttggtgaggggctttttggtaacatgggagtgcctaatgttgcttttgttatgtcaagttgaaagattttgtgcaaaattaaataaatggtgttttgggtttcaaagctgcctccatgccgagtgttgtgtgggtgggagtgagactgggtagaatgttacttgagttgtgagaattctttcattcaagaaattcagggggagcccactgtgtgctaggctccgctttatatataagggaggtagaggcaaacaagacacttaaaaatccttgcccttatagatatggcatcaggctagatagtgataaaggctacgtgttaaaggcaggtgaaggaatagggtgacaggtccaggaaagcctt

SEQ ID NO: 17057 - DNA, 1212 bp, Homo sapiens
gtgcgaacccctaagtcctggggcctaagagggagtgaggtcctggatccagggagtccaggcaaggatgcctggctgactcagtgggggaagtggaccccaggtcctgggaaggggagagggaggcggggaagccacagttttctgggatgaaaggcgatgacggctgtctactgaaagcagtgggctgaggacgccttcttggggagggaaccgtgtccccaggcagtatgtggttgtggatcctgcgttctgggccccgagcgtggggcgggggaacgccccaccgcggacaccgcctcactgctttgcgctcggccctgcaggtacttgctgggacggattcttgcgggaagcgcggactccgagggggtggcagccccgcgccgcctccgccgtgccgccgaccacgatgtgggctctgagctgccccctgagggcgtgctgggggcgctgctgcgtgtgaaacgcctagagaccccggcgccccaggtgcctgcacgccgcctcttgccaccctgagcactgcccggatcccgtgcaccctgggacccagaagtgcccccgccatcccgccaccaggactgctccccgccagcacgtccagagcaacttaccccggccagccagccctctcacccgaggatccctaccccctggccccacaataaacatgatctgaagcagctctgtgcttgtctgtgtgagtggcagtttctaggggctggtggttccccgcggtggtggttgcccttagaccaggagagaggagactctaccctgggtcctgcactttagagcaatcacctgctcagtctatgtctctcctaggggtggaggggaagacatccacatggacaatcgcggatcttgtgtcccccttttaggcctcacttgggtatggggatcccaggctttgaggccactttcagggcctgcaccatcatcttccaagggaccatcctcctgagggccaaggggtggctttgtggggcacgtgagtagagcttgaggtgctggctgggatgtcgcaggcacacatgaacacctcctgatgtggggaagagaaaaggagagagcggagagaaagggagagggcactgagggtcgggaggccccagtacaggcacactctttggcagacaggcacattctggcagggaactctgagaaggctgagaaattggagcctgggtatccaggtcactaata

SEQ ID NO: 17058 - DNA, 1089 bp, Homo sapiens
acctcatcacggagccctttctgccaaagtcagtgctggtgaagtgagggctggcagcaatggggggacacaagggagggggactggggtggagggtgttgggcatctgcaggacccaagtcgccaccctccggggcctggctcctctgggtttgggagatggtcttttctcccaggtcactgagacttctggaggggtgtgggactagagctgggtgtcacgtgaacccttcctggtagggtgacccccttcccctggagggggttttagagctgccgcctctgctccctctaacctctttggaggcagggttgggggtattgtcattcaaggccttttttttgtctgctccctccccgaccctgtgccctcttctggaggtttctcgtctgggagagtccctcccagcagtccctccacctccataaggacacactggacaaaactcccgcagctcttcaggaatgaccgatgcctacctgtggggttcagttgcccatagtttgaggccttctctcctcccttaccaccgctctggatcatgttactagttccgtcttttgtgtggccttgggccagcttccttgataccttgaagatgggcttcttgtgagtccccagggagaaagggacaagagctaagatttttgcatcagcccttctggcagaaggtgtggtaggggccatttgttttttttagtggacttgggatttgtggtgtaatcatatcattaatgatccagggtgtgggaaaaatggaggtccttgaagtggctgaatctcattgtatttaagacactgtcagttgccagatgtaggcttatttttggagatgtctaggagaggaaaaagctaccaatcatactcttgatatccgtctggctgtgtgaggcacccctacctcatgggggtgtcttgggattgatgaactgtggaacctgcctcctgcgctccccaaagcttattaaccccttaactgtatcggggcggggtgtgtgtgtgcatggaagatgcctgggctgtctttgctatatgtaaatagagccattggatctttatttttgattaatttgttctgattttttggt

SEQ ID NO: 17059 - DNA, 1678 bp, Homo sapiens
tttgccccagaagggtctggggtctaagtggggtttcacaggcctagcagatccttctgttttgagaaaggagtgagaagggccctatgggatttctccagagccccagatgtcggcacagggtgaggagaaggcaggctgagagcgctccatcatccttttcctcttcctctcgcccagcaggtctgaatgactgggatgatgatgagatcctagcttcggtgctggcagtgtcccaacaggaatacctagacagtatgaagaaaaacaaagtgcacagagacccgcccccagacaagagttgatggagacccagggattggacaccatctcccaaccccagtactcctgctctccggtgccacctcaccttctttggcttcttccctcttgcctccttctgttctttctgctctcccctcttttccctcctcctcacttccctctggctagcccacccctgcactctctctcattgccgctgccactatcacctgtctctctgccagctgatgtgccctgttgccccccaccccatcccgcacagaaccatccctgcattccacaggggactcgggcaagggtgccgaagatagacaagaggcacacagagacagaccaactggcagccaggcagccccagaggagagagacattcagacagaggaaagtctccctgcccctcattccttccaagatgagaaaaacttgccgccaccccccgacactgatgccagggaggtgggaggaagaagtgggaaatttcccttcccagtacccccaagaacgtctgagccttcaatgttgaattttttctttattaaaattacttttatcttataaaatcaactaatcaaaaatgatatagacgacagcactggctctgtgaaggtggcatctttctgggcaggcaggccatggggcatggaggagggtgcaaagatatgggttgctgtcttctggcctccagctgcatggaggccggcccagggtctagggtgtgcactgggcaagggcagggcggcaggtgtcaggccggcttggacaatgaaaccctgaccttgctgcattccttttgcttccaccaccactagcttctttggaatcttggggtgggggtcatctttggggattatggctgccacccgggatttgagtgtagggagtgtgggagcagccttggcagatggggcacccgtgccctgcaggtgttgacaagatccgccatctgtaatgtccttggcacaataaaaccaaatgtcagtttccctgagcgactctgttctgtgtggggcaggggttgggcgggcctctgggcagaggatgcaatggcacggaccttggcttgacctcagaggtgtgaatgctctccagcagggtctgtctgggggcctggagtttgtatttgatttgctgcttattaaacctccttctggacctattgccactggaaaagctgcgtctttgcctgctgaccccacccctgcctaccctatttcctgggggggggggggtgatggtagcagaggactgtgagcttgaacttcctgcctgaattccagcttctccgcctgcctctcaccatgaatgctgctctttccttatcatgatctgatgaagaaaagccttggaaaagtgcaactgatactttgtagcaacatgagtttagtggaagtaa

SEQ ID NO: 17060 - DNA, 1202 bp, Homo sapiens
gttggggggtactcggcagtgcagccatgactatactccccaaaaagaagccgccgcctcccgacgccgaccccgccaacgagccgccgccgcccgggccgatgcccccggcgccgcggcgcggcggaggtgtgggcgtgggcggcggcggcacgggcgtgggcggcggcgatcgcgaccgtgactccggcgtcgtgggggcccgtccgcgagcttcgccaccgcctcaaggcccgctaccaggaccgccgggcgctcttcatcgctgggcgctggccgtgccgcctggtgcagtggcgggtccccggccacaacaggcttctccacctccttgcgggggcccaggtggtcccggcggcggtcccggcgacgcgctgggcgcagcggcggcgggtgtgggtgccgcgggcgtggtggtgggtgtgggtggtgccgtaggcgtgggcggctgctgctccgggcctgggcacagcaagcggcgacgtcaagctcccggggttggcgcggttggcgggggcagtcccgagcgtgaggaggtcggcgcaggctacaacagtgaggacgagtatgaggcggctgcagcacgcatcgaggctatggaccctgccactgtcgagcaggtaagagctgtggggtgaggggtgagcggccacggcagatgggacccccagactgtgaagggactcaaggaaggctgtttgagatcgccccaagggatctaggcgttttcactgggcctgacagtcttctctggcggtagggatgtgagacaccttctttcctcccctccaggattttggggctagaggcctacggtaaggtgtcagacttaaagatccgaggtctcttttaaggtctatagtcgtcattccagtccctgggacctcatcatatagggccaataggtgggaattctccaagagatacaggtaggatcgcgcccctcttgagtaggagtctcaggtctcccaagagacttaggtatgtgttcagtggcttaagagctcttttcctctgggatagaagtttgagattccccttccaggaaagtcaaataaggtggagacctcggagatcggggctgaacatccccaaggagcctaagccctttcaagagtctgagacactctgcatataggacaatcctctcccgcttcgctgggtaacactgcacaggaccactgaatagccagacctgagac

SEQ ID NO: 17061 - DNA, 1493 bp, Homo sapiens
ccagacatttttcctggtgggagctgaagcactgggcttccacaggcccctggcctccttgccctagcacactgggactggccccactctcccagctggactcctgcatgctcctccccttgggctctcagatgaaggcaaagctttgatccgacatctgagctctagcctaagaaggagagttgagatttcctcctccctctggctgggatatggagctttggaggttcagagaagagaaccctcacctctgatctggcctctacgagaggtcctcatctccatctggcccaacaattcccagattctgaagcttggaatgcaaacacaggcttcatgggctgtggcctctgcagcgacctgccatccccaggccttgcctgaggggtcaggctgcctctcccaacacacactcagatagcacaaattctaccatccccttccctggctgctggaaatggaccccgcaaccctgtcctctgctgggcccccagcaaactctagcaatagcagctgctgccgtgtcattatgcaaagcctctgaccagtttgctgcagcatttacatctgccctaatcagaggggccacctctaactcctcctcctcctctcttctcctctggtttgcgtccttcctgggttgggctggagtctggactggctgagataagagcctggcaaccagcaagagctgggctgtatttggagatcatgggctgattccatgttcttgggcaacagtccagaagcatcaggggctccggcctgggatgtttctgaactttgggagttataggagacaggaggaacttctcctcctcctcctcccctacaattccttttcacatattcctttcttctccctcttgggtgaccttccaaaactctgctctcaggctgaaatctggcatcatctcaggttccctgtccccagcactgtccccatggagctggtggctgacaaagatgtagtttccatcagtcaataaaacctgagaggagagatgaggactgagagtatctcctggctctgtgggtttgggggctgggttgggcttgggggttgaaaacactctgatttcaatcccttttggctaggagaagggctggtatgggtcaaggtatgggagatggatggttggtgatgtattctggaagatggggatccaggagaaatgaaagagtgtggtttgaggagttcatctacagccaatgagacaggccagggggtcctgagacattcctccttggatatcatctgcgccagcttcctgattcacagatcgggaaactgagacccagagaaacacatagttagttagaggaggcttaaacccaggcttcctgacagcaaacaaccctgaatttaaccctaataaaagcatcactttgtttggtgaatttcccttccttgtggacgccccctacattctctcttctgggctactggctacactaggctagtgtgtggctgagttctatagagcactgag

SEQ ID NO: 17062 - DNA, 2741 bp, Homo sapiens
cacccagctaatttttgtatttttagtagagatggggtttctccatgttggtcaagctggtctcgaactcctgacctcaggtgatccacctgcctcggcctcccaaagtgattacaggcgtgagccaccgcgcccagcctaggggccattattatatacccactttacagtttgcgactctgaagcttcagagatgttaagcaccttgcctaaagttttggaactagtgagtagcagaagctgaattccaacccagggaacctacccttttcaacctttatactcctctgcctctgagggactctgaaccctacttatcctgcacccaacccctattttttacaggaactagaactgcaggcccagatccatggcctgccagtacctcccactccagggctgctttccttggccacgacttcggcttctgacagcctcaagccagagcagctggacattgaggaggagggcaggccaggcgcagcaacgttccatgtaggggggggacctgcccagaatgctccccatcagcagccccctgcaccgccctcagatgcccttctggacctgcactttcccagcgaccacctgggggacctgggagaccccttccacctggggctggaggacattctgatggaggaggaggagggggtggtgggaggactgtcggggggtgccctgtccccactgcgggctgcctccgatcccctgctctcttcagtgtcccctgctgtctccaaggccagcagccgccgcagcagcttcagcatggaagaggagtcctgatcaggcctcacccctcccctgggactttcccacccaggaaaggaggaccagtcaggatgaggccccgccttttcccccaccctcccatgagactgccctgcccaggtatcctgggggaagaggagatgtgatcaggccccacccctgtaatcaggcaaggaggaggagtcagatgaggccctgcaccttccccaaaggaaccgcccagtgcaggtatttcagaaggagaaggctggagaaggacatgagatcagggcctgccccctggggatcacagcctcacccctgcccctgtgggactcatccttgcccaggtgagggaaggagacaggatgaggtctcgaccctgtcccctagggactgtcctagccaggtctcctgggaaagggagatgtcaggatgttgctccatcctttgtcttggaaccaccagtctagtccgtcctggcacagaagaggagtcaagtaatggaggtcccagccctgggggtttaagctctgccccttccccatgaaccctgccctgctctgcccaggcaaggaacagaagtgaggatgagacccagccccttcccctgggaactctcctggccttctaggaatggaggagccaggccccaccccttccctataggaacagcccagcacaggtatttcaggtgtgaaagaatcagtaggaccaggccaccgctagtgcttgtggagatcacagccccacccttgtccctcagcaacatcccatctaagcattccacactgcagggaggagtggtacttaagctcccctgccttaacctgggaccaacctgacctaacctaggagggctctgagccaaccttgctcttggggaaggggacagattatgaaatttcatggatgaattttccagacctatatctggagtgagaggcccccacccttgggcagagtcctgccttcttccttgaggggcagtttgggaaggtgatgggtattagtgggggactgagttcaggttaccagaaccagtacctcagtattctttttcaacatgtagggcaagaggatgaaggaaggggctatcctgggacctccccagcccaggaaaaactggaagccttcccccagcaaggcagaagcttggaggagggttgtaaaagcatattgtaccccctcatttgtttatctgatttttttattgctccgcatactgagaatctaggccaccccaacctctgttccccacccagttcttcatttggaggaatcaccccatttcagagttatcaagagacactcccccctccattcccacccctcatacctacacccaaggttgtcagctttggattgctggggccaggccccatggagggtatactgaggggtctataggtttgtgattaaaataataaaagctaggcgtgtttgatgcgcttttaactttggcaaagagtctcctgtccttgttttacactgtgcagtgaacatagcccatgcaggccaagagggataaaagtccttgggagaaacagattccagaaggatggataaaagaatttagaaaggaagagggcatggaggaagacaatatgcaaacaaaagacagtatttttaaagaccaatcaccaggcacaattttaactgctgcaagtgtttcatctaatttatttctctaaagggatgttagtcagaacatgctgcttcttacttccatttggtctttgaagaagctgaggaatagaattgaactgttctgaagatatgcaagcctgtaaatgggtgaggcggtaaaacagtaaagtcaggtgagtgagggctcgattgaaaaatgccactgagggcagagggggaaagaagcttttcttgcaaatccacttttgaaactgataaagaagtctatgaggatatttcctggcagacaacagaggtatttaagatggtggaaaggacaaagacaaatatctgaaagg

SEQ ID NO: 17063 - DNA, 3183 bp, Homo sapiens
ttacggcttgacctcaggggcggggcatggagtttcctggagaaatgtgaccctcttgggcgctgacaggaaggaggtggaatccaactcggatccttgtgacagtccctcctttcttatctgtctggctactttgtgcttgagccgctggcaccgcccggagcagcccctgcggcgccccgcgcgggggtggatggcagttttaagggttgggagcatctcgcttcgtggcaaaggcttgatttcccggcagcctttgctgctttcctgagcggcgtgttagttgcttttccggtcacgtgcatcgccgcccctgcgcaatccacctaggaggttaggaaaaagctgcccagcccagactccatttcccggtgtgccccgcggtggcgaggggcgtaacggttgttgtagtccggccccctcctggctggtccagccacattaaccggcaggatgtcggaggtgcggctgccaccgctacgcgccctggacgactttgttctggggtcggcgcgtctggcggctccggatccatgcgacccgcagcgatggtgccaccgcgtcatcaacaacctcctctactaccaaaccaactaccttctctgcttcggcatcggcctcgctctcgccgggtgagggagggaggcgccggttggccagggacgtctgcagagcgtgggggtagacccacaggtctttgaggaccaggacggggaacctgagggaggtgcaaggccgggaagggcgaagtcagtagagatggacggcctgaggggcttggaaggggggccttgaaggaggtggagcctagttataaggagggcctcagggagatggagcctggctgatgaggagggcctgcgggggatgggggtctgcaaggaagatatggggaggatggagacaagtgtgggactgaaggggaaagtgggctggaaggtgaaccggaaaaaaaggagggcccgaaagggggacatgagagtacttgaggggcgtagggggggtgtgatgtgaatgatggggccagattgaggccgaccctggagtacttagggcagagaccgggaaatagacggtaaagttggagggtttggaagatgtatttattggggatccggtcttggaggggagcctggctatgattggaaggcgccaggggcaggtacctgttggggaacttgggcccaggaggaggatccatggttggaaagcctgagaccagagagggatggagaatctggaggaaggacttgagcagtgctgaaagttcagagtggggctgacgacctggaagaggtcctagcaatgatggagggaggaatctatagggaaatgggagcctggagggcggttctataaggaccctaggcctggggagaggggaacgtgtgaagacagaaggcctgaaagagggatttgcaggggctggtgttaaagggggagcttgcgggcaggctgatgaggggccctacgggggcagagtcggaaggaaagtccagggaagtgttgggagcccgggggtgtggggagtgtctagcaggatgggagggcctgaagcggggacctgaggaagacaggacagtggaattgacaaggaggaaaggaggggtctacaagggtgagtcgggagccctggcagatgggcctgctggagatagggctggtgggaggatgtgccaggctggagtgtccggagacgggagaccctggctcttggggcccagggtgggtggtggtccggaggccgtctctccgcccggccggctagcttggttcccttgtacccgcaggtacgtgcggccacttcatacgctcctgagcgcgctggtagtggcggtggccctcggcgtgctggtgtgggcagctgagacccgcgcagctgtgcgccgctgccgccgcagccaccctgcagcctgcctggccgcagtgcttgccgtcggcctcctggtgctctgggtcgcgggcggcgcttgcaccttcctgttcagcatcgccgggccggtgcttcgtgagtctccactaccccgagatagccaggaaagcagccagagcatgcttaaggcaccaggccagccctgccggtccccgggttgagagggggctgggaaacccgagggcctcgccacgcccccgctaaaagcgccttcccgggcttcgttcccccttctgggaacaccccttttattatcgcctttcctatctcactcttggtgttaagtgccttccactggccacgtccccgttaccgggcgtcttccctggccatgcccacgttgccaagccaattactcggccacgctttcagtatctgaggcgtcctggctgctcaccactccattggcctgcctgcgcgccaattcccttcggtgggccccggttggctgcaggctgaggtctattccactgaccacccctctcggtgccgcccacagtgatcctggtgcacgcctcgttgcgcctgcgcaaccttaagaacaagattgagaacaagatcgagagcattggtctcaagcggacgccaatgggcctgctactagaggcactgggacaagagcaggaggctggatcctaggcccctgggatctgtacccaggacctggagaataccaccccacccccagcccataattgggacccagagccctttcccagcacttaaaacaggagcctagagccccctgcccaaacaaaacaggacatctgtgaccgccctacccccacgccagccccaaactaagatatccctcacacccagcccccattacctagggacaagagtcttccccagccttgaacctaggaccaagagccacctacatccagccccaaaactggggcttcaggccagagcatccatggccaatttcaaattgtgaacccagagacactcccatccacccttctccatgctcatccccaaactggggcctggagcaaggcactctcaaatcttgaaccctggaccaaagcttttccagaccccaccctaccttccaacccaggtcaagacattgccaaatcttgaactcagaacccaagtgttccatgcccctgtgtggatggagtcgggtatcctgactgttggacccctggtccaggtgatcccgaccctcaccagtcccatttgcctccctccagctctgcttaggcattttgcccctcaccccaatgttccacaccatc

SEQ ID NO: 17064 - DNA, 3183 bp, Homo sapiens; identical to SEQ ID NO: 17063

SEQ ID NO: 17065 - DNA, 3694 bp, Homo sapiens
agtctttcggatttaactctgcctcggccgttttattcagttaaggaaactgagtcactccatcccaaagccagattcccgcggttctaagctgaagctgtctcgggtgcatttgcattccaaaaaggcgaagggtcccgctattactgctcctggtacctggagctgccaagcacccctgcgatggggcgccccgggggctgtgcgccaggctgggagtatccttggggggcggggcgagggggcttccggggcggcagcacctggcccggctccggccccgcccgcgtcagctctgcgcggtgattcactccctccttcgccccggggcccccttcccggccagacggcgggcaagacagctgggtgtacagcgtcctcgaaaccacgagcaagtgagcagatcctccgaggcaccagggactccagcccatgccatggcggattctgagcgcctctcggctcctggctgctgggccgcctgcaccaacttctcgcgcactcgaaagggaatcctcctgtttgctgagattgtgagcgttctggggcaggcgcgtgggcaaaagcgggatggggtggctggaccatgcggaactggatggtccgggtgaggcaggcacttggccggggcgctcggcagtggggtgcaggtgggtgggttcacggtggaggcccgaaacccggggcgcagggcgagtcggtggggtttgacgaaggttgttgagatctggtggtccccggggtgaagcaaggagcctataacgcatacggagggctacgtggggacagcctgcgtgaactcatcagtggacgcatcgaaggggtcccagggtgctgggaagtgggggcctcctgtggcagggcgtggcgcggcctgggcacaggagggcgggctggcagcgcgcccaggggcagggcctgttggggtggggcccccccgccccgcgctagtcccgcggtgtagagcgccccgcccttcgccagttcttcctcgcccttcagaggccgggcgggatgtccttagcttttcggggtttccacccttctcaaagtgggcgccgcctttgagtcacttgtaaaaggggtgcggcgcctttaacggagtcctgcctctctggtgtcactctcaccgcttcccaaaggggttgctgggggaaccgcgtgttccgccccggtcaaggccacaaagctggcgtcagcggggctcacaaaacacctggcagcgccactcccctcaggctgcccgtaacctagaagggaaaagaggaaactgaggcacccaactctactccttacttgttgggtgaccctggccaagccattaaacctctctgtgcctcagttttctcgtctataaattagaaagagtaataatagtacccagagcattagattgtcgtgatgattgaatttggaacacagtgagcacataaaaagtgtttagctattattgtatgtcatttccccagccctcgtaggcatcttagtatgggacccccaatttaaaccaatcttctcagccctggttgctgattgaggtcccctttcccatgtcacccttccagatattatgcctggtgatcctgatctgcttcagtgcctccacaccaggctactcctccctgtcggtgattgagatgatccttgctgctattttctttgttgtctacatgtgtgacctgcacaccaagataccattcatcaactggccctggagtgtgagaaggggtccacaatggcaagaccagggaggggtctgggcagttaggattgtcggggaactgtggttgctgacttccctcttctcctccctacacctcacaggatttcttccgaaccctcatagcggcaatcctctacctgatcacctccattgttgtccttgttgagagaggaaaccactccaaaatcgtcgcaggggtaaaggccatgggagcagctctgaagcacagagcgaagggtttgaggagccagggaccatttctgcctttgcttctggcagaaatcgtgtgacccacagcaagtcacacttgtcctcagacatggaggaaagtctggcccaggacttggttttgcctcccaaggtcttcatttgctgtgaagggaagtcccttgtcagacacaaggaccttggtgagaggtacaaacaggcggcccctttgtcaacgcactagactaccatctgcaagaactttgtcccaaatgtagtagaaattggggccgggcgcagtggctcatgcctgtattcccagcactttgggaggctgaggccgaggcaggcagatcacttgaggtcaggagttcaagaccagcctggccaacatggcgaaaccccatctccactaaaaatacaaaaatcagccgggcatggtggtgggcgcctatagtcccagctactcaggaggctgaggcaggagaatcacttgaacccagaagacaaaggttgcagtgagccaagatcatgccactcactccagccccagtgacagatgggtgacagagtgatactgtgtctcaaaaaaaaaaaaagtatgacttgaattgtgccccctacgggtagggccacagtgtggcctccctgtgttgagaggtataggaggagggagagtggggtaggatgcactctcttggcctttccctggcttaccaacccggtgcttgagtcccatcctgcgtggggcaggtgctggaggtggtggatacaagaagataagagactgagtaacctgaccagctaatctaaaccccctcactcctatcctgtcccccaggtactgggcctaatcgctacgtgcctctttggctatgatgcctatgtcaccttccccgttcggcagccaagacatacagcagcccccactggtaagtgtgtgtgtgtgtgttggttgggggtaagggggttgctgagagggcagagggaaaaaggaaagggatctcttaaaggcacgaatgccaactctggtctcgtattggtacttagggcttttgtaccaataggtaccataagcttcggtattcttgtgtgtaaaatgttcatggactttggatcttgttttaaaaaatgggcatatagattcagccaatgctttctctcttttcctcacctgcagaccccgcagatggcccggtgtaggcgaacttccctcatttctctctgcaatctgcaaataactcctccattgaaataactcctccccaccccaacaacaacattcccagcagaccaactcccaccccctctttgaggtaaaagtgcctttattgggagacttttgtcttccagcctgccaatcaaccctcctgggtgtggccaccatatgtgtgtgcctaggtcctccttctgcacgatccaataggagacaccagttctgactgaaccatgcccccacctaagtcacaaaatgagggaagtggggagttagatttcagagtccaggccctaggttgggacccactccaaataatctcctcggtgtgggtggtggttctatagagggataaatgaataataaacattgttaaaatatacgataatgaataaagtaatcctttcatcaaatgtgggtaaatttcaagcatcaggagggggaaatggagtggaaacagctggggcaaggaggcaaagaagccaggcctgttttacaacaaatattaaattacttcaataatacaaacgagaggcccggtgcggtgg

SEQ ID NO: 17066 - DNA, 1201 bp, Homo sapiens
tgtcttctgcctgtgggctcatggcagctggaatcttctcgacggctggcagagatccaagaactgcaccagagtgtccgggcggctgctgaagaggcccgcaggaaggaggaggtctataagcagctggtaaggcctgtgtgagggacctgggtagcttaggagggtggggggatggtcctggggcagtgcctgctatatccctgcctagatgtcagagctggagactctgcccagagatgtgtcccggctggcctacacccagcgcatcctggagatcgtgggcaacatccggaagcagaaggaagagatcaccaaggtacactgccagggccatggagggtgggtcatgtgggctgtcaggcatagtgtggccgcacagggacctcacaccctcaggcagagctgtccagtcacactctaacacagaatagtcacacacaatccatcccagtcacccctgacacagtgacacagtccctgtctggtacacatgaggaccctccactgctagccagcctgccccaggcaggggctcatggctgccatggtgtctgccagatcttgtctgatacgaaggagcttcagaaggaaatcaactccctatctgggaagctggaccggacgtttgcggtgactgatgagcttgtgttcaaggtgtggggcaggttgggcgggggtgagtggggtgaggctgggctgctgccttgtgcatctgctaattggctggctggggtccagacccaggccctgtgcgaggctggaggtgcactgatacccagggctggctttgtttcatggaggatgaagctagtggggtggtgggagagggtggccttcttagggcatggagatggtcaagggcagcccactgatacctttgaggtccctgtgtctggtcaggatgccaagaaggacgatgctgttcggaaggcctataagtatctagctgctctgcacgaggtgaggggagacatgtgcctggggtggggctgctgggggtgggtgggactgggtgcaagccttctgctcctgttgtccccagaactgcagccagctcatccagaccatcgaggacacaggcaccatcatgcgggaggttcgagacctcgaggagcaggtgaggcctgggggcaggatggggagccaaggcgggccggggggacagttcctcaggttatgctgacagaggctgtggagc

SEQ ID NO: 17067 - DNA, 1086 bp, Homo sapiens
aggaggcagaggtgggaggatcacttgaggttaggagtttgagaccagcctgggcaacatagtgaaaccccaattcgacaaaaaataaaaagttagttaggtgtggtggcacatgcctgtagtctcagctactcaggaggttgaggtgggaggatcacttaagcctggaagatggcagttgcagttagtagtgataatgccagtgcactctagcctgggtgacagagcacaaaacccgtctcaaaaaaagaaagagagagaaaaaagaaaaacagaaggcttcttgtagatgttattttgagaactctgaatcgtctccattgtgaccttgctttcttgcaatctctggggtctgcacagttgtaggtgagacctcattgtttttggtaggtcagcttttcctggaaaggcccataattgtaagaatcctgtattttgcctacctgagtagactgtgtctatttctttgcaggtggggtgactcggatgactgtttctcttgttgtcataatgtttgaactgactggtggcttagaatacatcgtgcctctgatggctgcagccatgacaagcaagtgggtggcagatgctcttgggcgggagggcatctatgatgcccacatccgtctcaatggatacccctttcttgaagccaaagaagagtttgctcataagaccctggcaatggatgtgatgaaaccccggagaaatgatcctttgttgactgtccttactcaggacagtatgactgtggaagatgtagagaccataatcagtgaaaccacttacagtggcttcccagtggtggtatcccgggagtcccaaagacttgtgggctttgtcctccgaagagatctcattatttcaattggtaaggatttcagaaaggggatagtggaatccactgtggaactcaataaatatgcctgaaatgggggaagacagggaaggggggactggttaggagccagaaggatagagctagcacgtccatcttcaatttgttttttccttctgtttgaatagaaaatgctcgaaagaaacaggatggggttgttagcacttccatcatttatttcacggagc

SEQ ID NO: 17068 - DNA, 1087 bp, Homo sapiens
ctgattataagacaatgctgctttggttaatctcttctaaatgaatttagagagattgacttttatagcttgcttgttgctggtactcttttgaagtgcacaaagataagttatagagctttctccttgtctgcaaaaacggtaattttccaggtggcatttgttagctggtagacaaggactttgccgtgaatttgttagtagcaaggaatgatttcttccagcttccttgaaatgaataattagtaaacttctaagcaaagtcaatgactaggagtttcacatgtttgtgaggtcctaactaattctcttacccagatgccacctccatgaatgatggtgctttaggcttctggaatatgtaaaaacagcaaagggaaccaagtctagactgcatactggtaaaccagggaagactcagaactgcatatgcatcctcatgcattcctttgtaaagaccaccagtactaaaataactggacactcattgtacctcccagcgataagtatgtgtaacaggccagtgtgttgtccccatgatcatgaattaggcttgggatgcttccaaatatattcaaggtgttggaacaggataggcagctgtgactccctcaagagtccttagaattctaaataaaatgcagagccatcctaagacacaggggtatggacaaggcctggtgacaccaaaggtgcttgtatccaattgaaaaggtgcctgtctcaatttcataccacctttattgcagttaaaaaaaaatcacactctggggacacttggtggaattacagagccaccatcatcattccaaccactatttcattttctgtagttttacctgtgtgcaattactccccctccattctgttccacttcttactccttagtaccaaatcctctgtttgggattgagcgctgctcctggttaatcattcctactacaaaaaaaaataactcccagggctagttaaattgtaaaccaaggctcagcagtctcacaacacatggaccagaggtgacacacagccatttcctttgccatgtggcccagttgctgctgccatgcctccatttccacactggatg

SEQ ID NO: 17069 - DNA, 2331 bp, Homo sapiens
aacaatgggtgttagcaactttaagttactccccaaacgtttgctggccacattctcatttctaaacatctggatctgggtaaaggtttgaatagatgtagggaacaaaattggtttttccatggtgtagtctaattttgccaaatcacccaagaaagaaagtatatgacgtgtggagtttgcatttcttggatgggacctatcgggtcacccagcccagtcttacagtcataaattcctacctcttagttcctgccaaagggccttcagcctctgtgtgcacacttattgaatgaatgctttgcctaaagtttggccttttgaagaaaaacagcatgtgataatataaaaatatgagagtttaaaaaaaaaaaagatctctgcctctcttctctctgcctcgtcccaccttgctgtctgtctcattgtctttctctcccctcaccatgcgctgaattcagatttctctttcttttattataggcatgttgttttgaatgtggactttgtgggagggagaggattgttctgagaacagaaactggaagatacgtctgagttgatgggaccaacagggctttgctcctctgtgagggccaaagccattgatacttgtcgggggtgatgagggctttagcatctcaaggcagacatatgaagtatttactgctaaactatattacttactagtacaaatctgttggaattcaggggcagtctaagatttggtgagtgaaatgccatctggcaaaatcgagaagagagtgtggcctgagaggggaatgttcagcctcactgtcacattaagggtacctcaaaatacatggtccttccagtgtgttccttttccttcctccatttcactttgtcccctcttcttcctttctctcccattttcctggctttttagcactcagcttttttttataagtatgtatttactttttattatatatttggtcctttgggactttgtgatgattaagaatttattccattcaggattttaaaatgatgtgtttaatattttgttctcttaaactcttttgaagctatgctgctaaccaggtataggccagaaaggaggtggcccagtcagtaccttgctcacgtcagctaagggggacagtgatgtcatgtgggtgactcttcttcatttgaccaaggccagcctcctgttcttacctctgcccattcatttctggctatgggaaaactaccacctgttgagtgagccaatgaggccaggaagatcagaggggctgggttccggcccatgggccactatttgaatttctctgtagtaagctctttgtagggctggctccaactgcagtagccaaagaaaacctgtctgactcgacattttaatgcctgagagttggtgaaagttcagctgaagctaatgtctagacatcagcagtaactaggcatccagaaagtagcttcaaccaaagctaatagagcccaagtttccgcaggaagtttggtgctgagctgtccagagcagttgtttatctgagtgttgctagcccttagccatgctttcttagctttattctcgcctgttcctaggcatagcctgaaccagagctatggctcactgctcgctttattctactccctagtcatgcggaacaacatagtctaaaaaggaagatgtggactggggagttaggagacctgatttctattccctatgcttctactaactagcctcgagatcttaaccgctctgtgcctcagtgttcccatctgcaaaatggggatagtgttaattgccctacctacctcacagggttgttgtgaggataaactgagacaatgaattcaaagcaagttgacaagtaagtgctatgcaaattgtaagaaatggaaacaatcatgttaaaagcaatggaatggacattggcagaagggttaatggattgtccagccctttctctgtgtggcttaaacccaggtcgccattgctttatacattttcacttagcacagatttgtaattatgcatgtaataaagcacagccttatccaccctggtgtctggtgtgtttctaaagaccctaaacttggtagctattgatttctgatcagaaaaccacaggggcagagtggaaggttcaggggagggtagcacaaaacacaactgcaaacccctactggcaggcccactgcttaaaaagatttattaaatagttattttcacatttacagactcagtaatactctttaccataaggaggcaaataagaggcagcttgcgtttttggagatgttccagatacccggatacctcattcattgtggctacttaaatgttcctgtctc

SEQ ID NO: 17070 - DNA, 1218 bp, Homo sapiens
gggaggaattacactgaaaaaaatgcaagcaaaggttgagtacccccaggtgccccttaggaaggaaccaggtttaaataggctctacccttacctttcccagcagcaagttcaggggaagaggcctactcttagccctggctagtgtgaccctcttcctgtcctaagactttggtcctaccacctcttgtttcatctttcctttacattgctgggggttaccgcaggtgcctaccccagggcttcaccatatgggccattaatagctctactaaaactgacttctagatgtaggtttcattattgggggagggggttcttattgttatattttaaatggccttttgattttatttatttttatgttttgattatttttttcttttttaactaataaggcgagaagagggaagttggagagggaaaagttagcccagaaggaaagcattttctgcagatcagcctgaatccaccgtggctaggtaagcaagtgccaaggcgttgaattgttcccaccatagctaccgatgtctaggaaggagttttccccttgaactcagagcctccctactgtggcctggccttgtgcttcccttaaagtctaagtgacttgagtttagcattccccagcagggtttaagtttttcttactgatttctttttgaaaccaaagaaatctcctgaaatggagaaaggttcagtcatttctctaccatctccaagctatgggatcagtagaggtgagctcagaaggaactcctctaaccattgctttctcagcctgtggcctggctcaagggaaccaaaactcaaggtagctgggagctccagccagagccagctccccagagcaattgaagacccagccaggatcttaggcatacaaacaactaaaactgctgctgttgccaaggccctgacaccagtagctagtttctatgctggaaaagcagccctcaggtggacgatggcaagaagggggttatggccaaatgctgccctgttatccagcttagctccctgttcctcactaactggggccaatccttggtatcacacaacccagccaaggcctggcatctcttctagttactgctgagttcctcagggtccttgaaggtcaactgtagcagcagggatgtctcattcaaccaaagaatttgccaaggaacttttgctgctgttacaaatacttgtcactagcttccatttcctctt

SEQ ID NO: 17071 - DNA, 1211 bp, Homo sapiens
ggagattcagatgaagcttctgttttttttcaagcccttgacccaacttcagtacaacattaggagcctcattcagaataagaaacatcattgatatatctctcaactcaaaagagttgcatagtaatgagctcttagtgagctcagatgggaaagggcagctttgaaggaggatcttgcaagagctgggacaggcaggaagaagcctcattctggaacaactacactactgtagtggcctcctcaatggtttctttccctttgatcatcccctcctccctcccttaaaattatttaatggttccctgctgcctgtagaatagagcccaaactacttttgcctggtattacagaccattctccatctggctccagtcttagcaatccttccaggccccaggttttcaggcagaacggttacctctctgttccccaaacccacctgggaaattctggcctccgattttctcaccatgatgttctttccagtggctagacttcacactgcatccttggaaggacttctcacttctctggccctctccataggacctaaccttcaagccctacctctaagcctctagggcatcatctttgattgctcctggtggaagcaatcagaacctcccctctgaaatgccggagttctgattttccagtagctgtctttgggtactttggctgtcttgtgtttggtttgctggatcaagatcttctagacgacaatggctgtatcttctatatattttccatagtcagcacagagtagactctccatcatggtttgctggtttagataatatgtaagaagagtcaagcaaaaattttttactccgtgattggtaatctttcccctttccacttccaagcctaaattagagaatatgactagatgatctggatatactggccaagtttcccaaactttgtgtgacaccccacctaagtggggtgagccttgaatgacacacacatgggaactagaggcagagggaacacttagaagaaaataatgttggggacagaagttgagaaggatcccagaggcaacccaggatgagaaggagcagtagaggatggggttggctacctgcttgtccccaggctgcctgaagtttggtttataacagttgaatttcatgctgctgctggagttcctgtgtgtaagctgtgttccgaggtttgcatgtgggagaggccggctggctgat

SEQ ID NO: 17072 - DNA, 2250 bp, Homo sapiens
aaaactctttcgtgggtgggaatcagcctgaattatttccatgagtctagagtctgtaacatggaatttaggatattttatgtcttaaatggtcactcctcttttacaaaacttctgatatcgctgctttcctgacttttttacatcatggtatacattggcttataacccctcagttgctgatccagactcattgattgcatctgcattagataattctgtggaagtgaagtgcttgatgcaaagtgattgatgtacataataagctcttggtacatttgtcagttggaggaattattaacataagcctgctaattgtgtgttggtttgtttttccagatgaacagcaaagatgttcagtattgtgctgaaagaaacattgatgtgaacccagtgatcagtggaattgtcaagtacaggtgagcacttctgtgttcccaagaagacagctcatctggtttcttcctgcatcttgggacactccttccctgtctataccactgactcttgctctggttgttgtactcttatacgtgaatagactcttaattcagcacctatagccttttgttgtgcttttttgatgtgtctgccttcattagactatgatgtctttgagagcaaagactatttttccttactctttgcatattctgcatctgagacactacttgaaatatggttggcatcactgaaggttctttgattcaattaatattttgtaatcaccgtgtggcaaaacattccccttccaatctggtgctagtagagtatatgctatctaggcaccatgtgtgtggcttttgtgtatcaggtgtttcagaaatatttcaagacagttgtaagatgtttgaggacaagaattattactcctatttctatgtcataccacacagtagctgcacagttttaagattatgccatcacctagggtaatgttttgtagaatcagtccttcgtgtaacaactctagtgtttttgtactgttgatgatttgcttaaattttattcaaaaactatcacttgctataaaggtaattgtaaaaataaatacagtggacgcaaaataatgttgtgagtttttataaaaataaattttaaaatgatatataagacatttttttgcaatgcctgccctaaccacttcttacatgtcatcttaacatctctttgaggaaacactgtttcctcattttacagatttaacatactgtattatttgatgccagagccaacaggctatatcataggcagtttccaaacttaattatgccatttagtttgtctagatttcttttgcctctctcactgatccatttggctgtagttttcatcccttttccagtacacacagctagctcctcatcctacctggtttctgcatatgagaatgcagagggctgagagagggcaaaattgttgtcatttagaaaaggcatttaggaaagaggctgctattagaggggaacacaaagtgaaggtttttttaaaaaagaggacttgcatcagctgcctccagaacaattttaagaaaataacaaagatgtttagaagaaatcttacggagtttgccatgggatgtgtgatatcagcagtcttcagctccttacaaattaccaaaagtggttctaatatgctagtttgtttgattttttcttttatattataaagcaattgcatcgataaaagcttggactccattttagtgtgacactcttcctcatgataccagtgaaatgtattgattgtgtccccagttgttacataatttgaaataaaaatataacttcttgatttattgttttttaagatgtgatatggtactgtggttatgttgttttaaaaaatgattatcttttagagaagtatactgaaaaatgtacaggtgaaatgatatgttactggtattcgcttcaaaatcatctgagtgtggggtaattgagtacatagatgaaacaagattggccataaattggtaattgctgaagctgtgtgatggatgtttgagagttcattatactattctctatacttttgtatatgtttgaaattttccataataaaaattgaaaaaagtattcttcagagtttacttgtaggccccctctctcctagacttaagtgcagaaggctgatcagaagacagatccacagcccagaaagattgattcctcctctccgaaaacctagcttttgttcttgagctaaacttgtttgcagactgctcttccgttagtgtgaatttttcct

SEQ ID NO: 17073 - DNA, 1047 bp, Homo sapiens
cagatctcagaggctccacctactaaccaggccaccgcagctgctagtccccagagttcacagcccccaactgccaatgagatggctgacattcaggtttcagcagctgccgctaggcctaagtcagcctttaaagtccagaatgccaccacaaaaggcccaaatggtgtctatgatttctctcaggctcataatgccaaggatgtgcccaacacgcagcccaaggcagcctttaagtcccaaaatgctaccccaaagggtccaaatgctgcctatgatttttcccaggcagcaaccactggtgagttagctgctaacaagtctgagatggccttcaaggcccagaatgccactactaaagtgggcccaaatgccacctacaatttctctcagtctctcaatgccaatgacctggccaacagcaggcctaagacccctttcaaggcttggaatgataccactaaggccccaacagctgatacccagacccagaatgtaaatcaggccaaaatggccacttcccaggctgacatagagaccgacccaggtatctctgaacctgacggtgcaactgcacagacatcagcagatggttcccaggctcagaatctggagtcccggacaataattcggggcaagaggacccgcaaggtgagatctctgctaacttcattttgctttggggctgtctcctttcttctctgagggtgttcatttgttctaaacaaaacaatgtatgtaactgtattcagctaggctatagggcatttgaagagaatgtttattcctgtcctccggatgttcacaaactgatggggagataatacatggacacaaataatatatacaacctgtatgtaattcagtttacattttgttatgttagtaaccaccatgtgttaagccttgagctaggcacattcacacaggttgtctcattaaaccttaaaggcacctcctaccaggtagggatcatagtgccaattttacaaagaaggaaattaagtgccagagaggtgaagtgacttgagtgatttgttcagggtg

SEQ ID NO: 17074 - DNA, 1177 bp, Homo sapiens
acacagaacccactggtgattctgaacttctctctgatgatgcagattaataacttgaatgttgaagagaacagcagtggggatcagaggcgggccccactggctgcagggacctggaggtctgcaccagttccagtgaccactcagaacccacctggcgcaccccccaatgtgctctggcagacgccattggcttggcagaacccctcaggctggcaaaaccagacagccaggcagaccccaccagcacgtcagagccctccagctaggcagaccccaccagcctggcagaacccagtcgcttggcagaacccagtgatttggccaaacccagtaatctggcagaacccagtgatctggccaaaccccattgtctggcccggccctgttgtctggccgaatccactggcctggcagaatccacctggatggcagactccacctggatggcagaccccaccgggctggcagggtcctccagactggcaaggtcctcctgactggccgctaccacccgactggccactgccacctgattggccacttcccactgactggccactaccacctgactggatccccgctgattggccaattccacctgactggcagaacctgcgcccctcgcctaacctgcgcccttctcccaactcgcgtgcctcacagaacccaggtgctgcacagccccgagatgtggcccttcttcaggaaagagtaagagctgtaactccccagtcacttttcccctctcttgctcttttctttgtcatcctctcatctgtaattcaaccaagtttttttgtaaatattttataagtttaatgatttcctttttccctcccaggcaaataagttggtcaagtacttgatgcttaaggactacacaaaggtgcccatcaagcgctcaggtatgcatccagtgtcccctccccaagctctgcccttcccttcactccatgctctgtcagcattcttctgcttgtagctctgcccttcccttcactccatgctctgtcggcattcttctgcttgtatgacccttccccttctatcccctcctttccatggttggctctttccacccttgaggaccttgactgtgctacccccagcagggctggcaaagggactgctgctctgtggcccccgctcggctcagatggctccctcctctctc

SEQ ID NO: 17075 - DNA, 1187 bp, Homo sapiens
tttcctcatctgccaaatgggggtctgataatgtgtacctgagacaatgcatgtgcattactttgccctgcacccggtccttagaaaattttcaataaataatgactatcttgactgaaaagaatattgtctctcttggtttctgtcttttctctgtctctgacccttcctccattggatctttctgaatgcttctgtctttctctgttactgtttttcctctttttacccgtctctttctcaaccctaaagaggttagaggtgcatagtttatagcaataagttttacccccgaggacatgagcttagcctggggctccgacctgttctgtgggtaaaaaatggagcctggctttgggttgcttctggtgtcattgaagagagaactctctttgctccccagcctactctgttaaacaggtagagacacccaaagttgggagcaacttagattaaaaaccactttttaatagccccttatcctatataatgttagtcaccacaggaagcccacagatctcctggttatgtctccatacagccctggacatcctattttctatttccatcctgaaatcctttgaccaggccttaaggaactcaccttcagttatcagcaaaattccctccattctcatcctggcttctgaatactccctttattttcttgctatgctttggtcgttctcatacctgttggacccaacattgctttttttttttaataaggtgtattttgaaatgcttcactattctaaaatgaaatggatagaaaatagaatctgtctacacccataattccctgaaaaccaatataatgccctaattgtaatatagagagtagtaaaggaagagtaatatataatattatattatacatatatcgcacatatatatgcaaagactgggatatgactccattagaagacatgatgaaatggtcttacacttaatgatagtgacagctacatgtgtgttgattggtgattcagaagccacaggtagagtgacacagttttcctaaataatgaacaattcttcacaaagttctaaacaaaacaatgtggaagagtttctcagtttatatggtcgttaaatttctggaaaaatcagtatatattaatatccatgatgagaccctcttaatctccctgaccttatctcccaccactctccccccttgctca

SEQ ID NO: 17076 - DNA, 1241 bp, Homo sapiens
ttcatgaaaggcagcaaatgtttgcagctgaactgtttccccagtttgcttcctgccagtagaattttgggggtccagtggctttttttcattttgtcttgtctgtaatcagctgccaccaagaaatagttccacaggggggcttgggttactgttctgttggcaggttgggcactcagcagtggcttatagccagattggtcgtggtggaagtccatattgtggagtccatgcataacctccatgcctgccaccatggccattttgttcaggaatccattgggcaaagaaaagggtgacagataagaggctgactgacatcacagaacaggacacctacctgtctacttgattgagctcctcttctgcagtggactctctctggtgcttatttatgtgggacgtgaatatctctgcccattccaagagggacagccatatgctcttcctcagaccttgtcaataatatttcagtcctgttatttccaagtccttcaccatttagccgaatcattaaaaactactcatgaaacagtggaaacctatctatacctctgaccagctatgtgaccaggcagttgttctactgggagaatttcccttctcactgtccttcaggatcaaccctaagtagggctgtaacactacagctagctacttcagcagggccagcatatcatgcagggctatgtataaaccaagctggaatagaatattgtatcccttagtcacctggtcacagggaattccccatgaggcttcaggtgtgggtgagagagggatggcagtacagcagttgggagtatgattcacttgctcaggcagcttattcatcatctaggcctgcttgtataactctattctattcggtggtggagtgctactgcacatagataacttcgtggcttgatgagacagttaacacacaactcaccatggggagctcagcttgcctgggtcacttggagtcctatgctcagccattcattcacaaaatagacccacttttccatttttatttttctctgctcctgggactcctgttgtcacgatattgccacctccaattttatcccccatttcttgaatctttaacttgctcttcagctgtagtcctcctcccctttatgccatctatactgtgtagattcgaatagtatatccaagaactggagaaatcaccacaggatttcttctgggcccagtgtaagaaagactcagatcaaaacttcatgtataac

SEQ ID NO: 17077 - DNA, 1982 bp, Homo sapiens
aacctgtctttctgcctgtctgtaatcacagctggagaaggcagagcgtcacgggagtcgggctcggggccgggccctggagaggcggcggcggcggaaggtggatcggggtggggagggcgatgacccagcccgagaggagctagagccaaagagggtacggagctcagggccagaggctgaggaggtccaggaggaggaagagctggaggaggagactgggggtgagggcccccctgcacccatccccaccactggcagccccagcacccaggagaaccagaatggcttggaaccggcggaagggaccacttcaggcccctcggcccctttctccactctgactccccggctgcatctgccctgcccacagcagccgcctcagcaacagttgtgacagtggctgagcctagcacagaccctgacagagacccccctcggcctcaaggatcctctttctgaccatcaagcctgcttcttggggggtgggcgggtaggggggtggccatccctgctacccgcccacccctgagtcccttgacttttgtattctgactccaaggtattgttcagacctcagctcctgggggccggcccctggagtcttccctccctggtagcctctaaccagcattcccagacacctgaggcagatagatggatgggctggtgggcaggggggtggctggggctgggccatcaccattccagagacaaggccagtgtatatgcaaactgggggactctcctcccttctctccccagttctggtcctggccaggccatgctacactaacccctgcccccactctcctcccctcttttccttccttcctacccccttctccctctcccttcccctgactgttccacccaggaggaggaaacttcacatagccgtgctcacagttttttattttaaaggaatttggctggggagctgaacagggctccctgtgatctgaagaaagcttttggtgcttgtcctcacaaccacctcagtcctccctccctgtcctcccctgtctcctttcctcctcctgggttcatgttgtaataaaagaagattgttggtgtgtaattaatttgttcaaaagaaaaaaaaaagcaaaacaagaaacttggttccaactgaagcctattttaattttattttattattttcctcttgttagaaataaaacccttagaaacattttttggaaacatgtttctgaagtgcatttctcttagacggggaagacagtgcttccatcaccagtcagtggagcagctgtagtgctggcaggagcactagggctgaagccagggagctctgggttctgaaatcaagttccaccagcttcttaaccttgggcaagacattctgatcctcccccgactctaaccccaagccactttccctcaagtccaaacagatgggctcgggccccctcacccaaactcctacactacaacctcccccagttgatgccctccagtttatcctcctcaagctcccaaagggatttttttgttaatggctttattgagatataatttacatactataaaattcacttgtttgaaatgtacaattcagtgatttggggggtttctaaagtgtagatctgattatatactgcttaaaaccttccatgatgctttattgcccttaagattatacatagaatctcgttcttcctagaatgttttcctgtctaacccatctactgcataattccctgatttttctccacaggttatgcccctgatgaatggggactaaagctcagatgtgtggtcatttgcaacccctgagttcacttttttaagacagcttattgatatatataatgtacataccatacagtcacccacttaaaagtatacaattaaatagcttttagtatattcagagttgtgcagccatcattcgaaaaaaaatttcagaacattttcatcactgcagaaagaaactccatatcccttaggcgtccttt

SEQ ID NO: 17078 - DNA, 1274 bp, Homo sapiens
ctgggtggccatgagcagaccgcttgtcccctgagcctcagttctcctggtttgggagtgggggtgttaagggggggcccagagaagggaaggggtaggctgctgacccactttgctcctgtcctgggtatggcagatcgtggccttcaaggagggggaacagaaggagaaggagggtatcctgcagctgcgtcgcaccaattcggccaagcccagtccactggcatcatcgagcacggcctcctctacaacctctatctgtgtgtgtgggcaggtgctggctggggcgggagctctgcagtgtgacctgtgtcaggactggttccatgggcggtgtgtgtcagtgcctcgcctcctcagctctccgaggcccaatcccacctcatccccactgctggcctggtgggaatgggacaccaaattcctgtgtccactgtgtatgcgctcaaggcgcccgcgcctggagaccatcctggcactgctggtagccctgcagagactgcctgtgcggctgcccgagggcgaggccctgcagtgcctcacagagagggccatcagctggcaaggccgcgccaggcaggctctggcctctgaagatgtgactgctcttttgggacggctggctgagctccgccaacggctacaggctgaacctagacctgaggagcctcctaactaccctgcagcccctgcttctgaccccctcagagagggcagtggcaaggatatgcctaaggtgagctactcagcccagctcttgtcctcagattcttgtctcctagcccctaccccagtttaggctcggccctgccccttgttctccaattttcagttttctttggaccagccttcctactccattctgcatctgtccagattcctagactctgctccctgctggcagcctgtgtcttccctcctcctccagaaggcggagggtctcaagtttggggttggcggaggaggaatagggcctggttcttcacttcagttgcccctacctattcttgctctcctccgcaggtccagggcttactggagaatggagacagtgtgaccagtcctgagaaggtagccccggaggagggctcaggtaagagaggtaggtctaggtgtggtgtgggtaggctgttgactgcacatcaccatagtgacccatgtagtcctcagctctgttgtagtggtggggataagaccaagggcagcctctaatgccgcttgttcctgcaacctcctagatctggagctgctgtcctcgctgttgccacagttga

SEQ ID NO: 17079 - DNA, 1136 bp, Homo sapiens
tgatctggatcttacctgatttttcttcctctataaaattatctgactcagcgcacactgatcttgccctggtttatctgattccccaagctttgagagtctagactttacaaagggcaggtatgctccctggggtttggcctcttaaaccccatgaccctcagcatagatttgaatctaaagtaggggtcggtggtggctgagatggaggattttgctacctggttctggttatatataacgcataggttaaatgcccttagggtatcacagaggctgagcgagaggctttcgagctgctcccagatgatgagcgccagtgtatcaagtgcaagactacgtgtttcctgtcagccctggcctgctacgactgcccagacggccttgtctgcctttcccacatcaatgatctctgcaagtgctccagtagccggcagtacctgcggtgagcatgggcctttctggaggaagtggggcaagaaggaggatggagagctgggccagacatgctcttgcctgccctcttcctccaggtatcggtataccttggatgagcttcctgccatgctgcataagctgaaggttcgggctgagtcctttgacacctgggccaacaaagtgcgagtggccctggaggtggaggatgggcggaagcgcagtgagtgatgggggggatggagggactccacaggcaagttctattccctttcttctgtactctgacccccttcctctgcctctattcaatactgcctactctttgctgccctcatttttcttccaggccttgaagaactgagggcactagagtctgaagcccgtgagcggaggtttcctaatagtgagctgctgcagcaactaaagaactgcctgagtgaggcagaggcttgcgtgtcccgagctctgggactggtcagcggccaggaagctgggtatgacagcgtgaggagttagggcacacataaggtgctgaggatccagcaccgaggaaaagtgctgcaaggggtagactgtgaataccatttggcagaatggacatcagcaggaagctgccaggcacaagagtgtgagatggcctggaaggtgttgggggggacaaggagaccaggccacctaaaaaggagaggagagcctct

SEQ ID NO: 17080 - DNA, 2301 bp, Homo sapiens
tctctactaaaaatacaaaaattagctgggcgtggtggcgggcacctgtaatcccagctactcgggaagctgaggcaggagaatcgcttgaacctgggaggcggaggttgcagtgagttgagattgtgaccctgcactccagtctgggtgacagagcaagactccgtctcaaaaaaaaaaaaaaaaagaatcacattttagctagagaggaaaaatggtggcagaagaacacaggatagcatattaaagtcagagccatttagataaagtcctaaaggaagaaaagagcatgagatgactccctggaagttgtgagactggaattgagttttgaggaaccaatgaaagaaagtggaaaaggacatttcagtagggaggaactgagcaaaagcatgatggggaatgaaaagactaagccgaagtggtaagagcaaaaggtacagctgtaaagtaaggcctgcctcaggggccttgagtgcagacctagggctcttctccctccctaccccttatattccagttccacttgggaggattcttcacctctttgcctctgttttggtgacatgttctcctttgggtttcaggagtgtaagcggcccccagaagcctttggctttgagcaggctacccgggaatacactctgcagagctttggcgagatggccgactcctttaaagctgactacttcaacatgcccgtgcatgtaggtgatggagggctgaggtagtgttgggctaggatcataggtattgatgccagatggtctcagctcacctggatcagtgggtccagggtgtgatgggccatagtcatctgctacctgtcttcccccagatggtgcccacagaacttgtggagaaggagttctggaggctggtaaatagcattgaggaagatgtgactgttgagtatggagctgacatccattccaaagaatttggcagcggtttccctgtcagtgacagtaaacggcacctaacccccgaagaggaggtgagtggatgattcatggttacgtgtcagctgtgtgagcttaggcaaatcatttagtatctgaaaaactcagtatctctgtaagatgaggataattatgcctgtcttatgtagccatgagatttagatgagatgaaagaaaacagtctggtacctggcatgtacaaacatgagatgggttctttcgcctctgtgagcccatttccttatctttaaaatggggataatatctactttgcaaatttgttataaaaattaaatgagaaggtatatgagatcctggctcatccataagtagtgttcagggagtggggtttgtatgcacaggagaaaatgagggcctagttgtgcttccaagaaagggtacattttgatccagagcaggatttttttaacttgcaggtattttggtaggtggatatatcggtaaacttcgtagaaattgaagtgaatacaattgaaattttgtgtgtatgctttttggtggagaggtagggagaaaacctatatgtttcttaagatgtttcaaaaaagtctctgacctcaaaattaaggttccctaggctaaagaaaatgacttaagatctcagttccttagcataaccctcatgccctttttacaaatacctgacctggcaggagtatgctaccagtggttggaacctaaatgtgatgccggtgttggaacagtctgtactgtgccacatcaatgcagatatctctggcatgaaggtgccctggctctacgtgggcatggtcttctcagccttttgctggcatattgaggatcactggagttactccattaactacctccactggtgagtgggaccctggggagccagggaatcaagtcagtgtgggctccctgcatgaccaaggtgtgatttactgtgtgtgtcccttttccacttgtgcaggggtgagccgaagacctggtatggggtgccctcacttgcagcagaacatttggaagaagtgatgaagaagctgacacctgaactatttgatagccagcctgacctcctgcaccaacttgtcaccctcatgaatcccaacaccctcatgtcccatggtgtgccagtgagtacccaggcaacagggacaagcggcaggagtgatttagtgatgtcctttgtgatggtggtggtggcggtggttgtcatctgtattctgcccctggcctttcttcattgctgttcttaattgggctacgggtttgactagtctagtagagacccaaaataatagtgattagatgcaccgtatgatggtatgccctctgggccatgtgtttgacggta

SEQ ID NO: 17081 - DNA, 1153 bp, Homo sapiens
cccctgtgctctgccctgttgccatgttttgttttgccttcaggtttcagccagtttcaggtgttaccttttcaatgaagtcctttctcaaggccatccctccttatctccagctgctttgagtgcttccttctctaggctcccacagtgccctttatggaccgctattggcaatttttaatttttatgaacacatgtctctagagtactgtatatacttggaaggataccatgtcttgtctttgtgctagagtccagcgtagttctgaatacgggtttagtaagtgtttattggatgaataaaaatgggaggattcaagactggatgataaaagactgctcttgcagctctacctgcttatttggggagatggtacatacgtgcagttgagctccagacctagcatgactagcctatacagggctgtaaatcattcagccagcaaacacagtggatttccaatggagaacttttgctcttctcccctggcagattgagtcatatgtctgccggatgtgttctcgaggggatgaggatgacaagctcctgctgtgtgatggctgtgatgacaactaccacatcttctgcctgctgcctcctctgcctgagatccccaagggtgtctggcggtgcccaaagtgtgtcatggcggtaaggcctccccactccacatctgcctcatagggcttccttgccttccttcatctggccttattgagggcagcctcttagctcagccatagtcttaggttttgggtctctgtggtgggattaggctgggcagagctttgggagaaaggagcaggagattcagcctttgcttctgtcctctaagagctcccagaccacctggagaggtaagcatcataattagactatatgtggtgacatataaacagaggctaaattgtgtgttagaaactctgagatatagaagttcagaggagaggaaaatagctaagggtaataatcagggaaaatgtcagaaatgagacttgaaggataggaatattaagaaaaaaatgttctttcaatttctgagtttttgttttgtttttttttttcttttttagaaagtttgaggccgggcgcggtggctcacgcctgtaatcctagcactttgggaggctgaggtgggcggatcgtttgagc

SEQ ID NO: 17082 - DNA, 1169 bp, Homo sapiens
atactgagtttccctcattacataactcatttattcatttctttacctcccttctcttacccaaacttttccacctttcaaagggacgttaggattggccactgtgctgatctggagtgcacacagcaagctagtctgcaattgcctcctcctcagtccatacagtctcattcagatagggtagggttgcatgggtacagaactagtgggctgtcttttttgtttgttttgagacagggtctcattatgttgcccaggctggtcttgaactcctgggcttaagctgtcctcccattgcaacctcccaagtagctaggattacaaacacacactaccatgcttggtattgggttatcttaaccactaggcaatacagttgcattcacttcctgatatagattctagtctgtccccctttccatactgggaattaggattcctgagccagcttccaaaagcttcatacttcagttttcccttcctactttactcagtacggccgcctcattgacctatgccagcccacacaaaagaagtatcagattgctgtaaccaaggttttgggcaagaacatggatgccattattgtggactcggagaagacaggccgggactgtattcagtatatcaaggagcagcgtggggagcctgagaccttcttgcctcttgactacctggaggtgaggcttgttggggattgggtcaggccagtgttcaagggcccctcctctagtactccctgtttgtgttctgccactgactgagcttctccccacaggtgaagcctacagatgagaaactccgggagctgaagggggccaagctagtgattgatgtgattcgctatgagccacctcatatcaaaaaggccctgcagtatgcttgtggcaatgcccttgtctgtgacaacgtggaagatgcccgccgcattgcctttggaggccaccagcgccacaaggtgtggattcccttgcccaggctggagctggacaggctcagtactggagattcatttgttcagcttctccccctcttctctcttccccctgctgtgtgtagacagtggcactggatggaaccctattccagaagtcaggagtgatctctggtggggccagtgacctgaaggccaaggcacggcgctgggatgagaaagcagtagacaagtt

SEQ ID NO: 17083 - DNA, 1610 bp, Homo sapiens
tggaggtgatgtttgagatgagatgtgctagacacagtgggggctggggagacactgtcaggtaaacagcaccacaagagagcatggtgtattccagggccagcgtgactggagcaaggaggagttgcagggagcaaaagtctaaagagctcagcagaggtccgattaccagtgactctgaaaaccaccttcaagtttgcactttagcctatgggcgagtgaggccagggtgtttaaggaggagtgacagggtcagatttttggttttggtgcctgatggccagtttgggagccagataaagggggacatactgggctgagacaagattgggagtcatcaagaagcagggagttggtttcttcagggaggggaggggctggtgggcaccatgggaacacacagatttggttatctgtcatccctcaccacaaactgatctttcttctttccttagttttaatcagctggatctgcctgcctatgagagctttgagaagctccgccacatgctactgttggctatccaggagtgctctgaaggctttgggctggcctaataaggccctgcccaactccgtggggttttttttaccattgttggacctggggaggggggagttaaaaaaagaaccagaaagaaattgtcaaaaaccaataaatgaaatccaccaactcaccgtgtgtgtcccagctgccccatcttccccagcgcatacctgttcctcttctcattctctccccgccgcctgtttcctcaccttctctcccctttccatgccgtccatgatccccaccccatgtgttttaaaaaggcagtagcctttgcagggacctgtctgtcccaactgtttgaacagtgtgctcctcagattctgtgttcagaaggatttgctgcattgagacttgaaacctttggataggggaaaaaattatatatatatatatttttttgttctgtttgcatttcttaatttgtgcttggaatgtgttgatgtgcacagctaatgattcaatgcgagacaagattggcgtctgtgttgtggaggtttcaaataaagagcactcttcataactcacttttcacaatggagtttttttcaaacttaaaaaaaaaaacaaaaaactcttaagcacatgctaggcatctggagaaaagatggattctccaggaaaccatccctgccctacccgcttgcccacctgcctccaccactggtgcaacttcctccttcagagtcagtttctgcagtcaggagagatgagcagttcaccaggaattgggggtgggggcatctgttttttttttttagaatgggagctgcacttggggatggtgatggtgttagagattgcagcccaggacaaagcatcaccttgctcaaggggaacaaactgcagcaggttgtacaaaacattcagagagctcacttgacccaaccgagggttttacttggtgagcctttctagtagtcttgagtctggggctcagttttagatttttatttcattaatgtttgtttatttctaataaattttaataagcgagtaatttaactaggtcgccagaagaccattatttttgtttgtctatttttgttgtcgtcactcc

SEQ ID NO: 17084 - DNA, 1153 bp, Homo sapiens
cagcctggccaacatggtgaaaccccgtctctactaaaataaaaaattagccaagtgtggcagcgtgcgcctgtagtcccagctactcgggagactgagacagaagaattgcttgaacccgggaggtggagtttgcagtgagctgagatcgcaccactcttctccagcctgggcaacagagtgagactccatctcaaaaaaaaaaaacaaacccagcttaacttcactggacacagtggctcacatttgtaatcctagcactttgggaggctgaggcaggaggatagcttgagcccagggggttgagactagcctgggcagaattaaccagttgtggtggtgcatgcctgtagtcccagctaacagtggtagatgggagccagatgggggatctctgacctctacggttgtgtgagtttagaagtcatttggctttttggttatctcaccaggagccatccgcaagcagttggcggctttcttagaaggcttctatgagatcattccaaagcgcctcatttccatcttcactgagcaggagttagagctgcttatatcaggactgcccaccattgacatcgatgatctgaaatccaacactgaataccacaagtaccagtccaactctattcaggtgagctgctgctggcatccctcctcatatggtcctcttaccctaggcaacgctagtttgtgtgataccaaataaaccagtagtactcttagaggaagttgcatgtagaagacagtctacctatatctaactctttgttctcctgaagcatagcagacttctcttggccgtcttatgaatgaaaggagctaaagctcatcccacagaagggacttgcctcagataccaagtccagtcctgtttcctagattccatcccccccaccctgcttctaggagctttctacctaacactggcttcatgggtcccttcctacagatccagtggttctggagagcattgcgttctttcgatcaagctgaccgtgccaagttcctccagtttgtcacgggtacttccaaggtacccctgcaaggctttgctgccctcgaaggcatgaatggcattcagaagtttcagatccatcgagatgacaggtccacagatcgcctgccttcagctcacacatggtaaaaggaa

SEQ ID NO: 17085 - DNA, 1071 bp, Homo sapiens
acctttagagaatttggactctgggcttatccctctctaataccacttttctcccctccccacttcacctaagcaaggcctcatttatttctctgatacctttcctattggtgttttctggaatatctgttaaccttgactattttgggacatctcctctgtcagtggtgcttttgtttgctcccagatctccaccccatttctgggctgtcctggcactctctgtttacctcttcatctgacactgcactccccagacactgcttcacagtctctcactcacacaaatgactggatgtatcctgggttttctgcacagctcttttctgcttctgctttcttatgcaggtatatagtatttgaaggagaagaagggcaggatgctggtgggctcctgcgggagtggtatatgatcatctctcgagagatgtttaaccctatgtatgccttgttccgtacctcacctggtgatcgagtcacctacaccatcaatccatcttcccactgcaaccccaaccacctcagctacttcaagtttgtcggacgcattgtggccaaagctgtatatgacaaccgtcttctggagtgctactttactcgatccttttacaaacacatcttgggcaagtcagtcaggtgaggatgaggcatagtcctgggactgtcttcagtcctgggggtctggtctttttgtgtcccatccttgtgctccttcttcccccccactcgcaaaccatgaccctgtataattgtgtttttctagatatacagatatggagagtgaagattaccacttctaccaaggtctggtttatctgctggaaaatgatgtctccacactaggctatgacctcaccttcagcactgaggtaggtcaggaaatcctaatcacagcacatcccagccaatctggaagatccattccaggttcaccttagaactagcactgcgtgaccttctcatagttctaaggaagcatcttgacttcttaaagctgtagcaggtgtttgtgagtgacatcacaaacaggaaaaccagaatttgcaggccatttcctagtttcacctttat

SEQ ID NO: 17086 - DNA, 1138 bp, Homo sapiens
ggccatcatacctaaatactcctgggcttctccaccccatctgcatttttcatcagcaaaacagagtcacatgatttttgaaccacacagtttctaaagttctgttccatccgttgggggtagtacaggaggcacaggtggccatagaacacacacagcagggttccaggggcttccacaacactcctggagtcatccctatgcctctccttctcctcgtgcatgtatacatgcttacctgcttgtggcagaaatcacatgtcacaatctttgtgggcccttactcagtggaggtaagaaaaatttagagttggtaatgagtgatctacctctcccaactactgggcatttcccaaacaggtgtggagcagagatcaaagtgtttggaggatagaaggagcatcattgtgggtcttcttcctaatcacacaaacaaatttgttctgccacccttaatcctatcttccttccttttctacctcccaagatatttccgccaagagctggagcgtttagatgaggggctccggaaagaagacatggctgtgcatgtccgtcgtgaccatgtgtttgaagactcctatcgtgagctgcatcgcaaatcccccgaagaaatgaagaatcgattgtaagggcccaggaacggagaaaagatggcgggtgggaggtggggcctcctgcacagtagcgatggcttgctctagcctcaaatttagggaggtgctgccctccctaataggaattccccataggaatctggttttagataatcttactgagttgtctcctatcttctgggcctgccctgctggctggccctttagctaagctacccaacaattcccagacagacaggaaagtctttggtgtttataaggatatacctgctggctttgcaatgagagctttaatattgctatactaggaatgaccatgtatgagtggcctccaccaaactggtaactgctcactggtgattctgaagccacctagaggagatcagcagtttgtaatactgagcgtaggagctgatgagatgaaagacctattggagttgtttaatgattcctccccatctcttgtggtgtgggctctccaactgtgtaatcacaagaagtcagggagtctccctagacag

SEQ ID NO: 17087 - DNA, 1239 bp, Homo sapiens
tcttttaatagttggtgtctttcactttatagacaaggggaatctttataactggttagctatcccatttttctttggcttcaaggaagttcctctgtgacttgattctaccatatttccctgcaagttctcattgtttcttttttttttttttttttttttttaaatcagaaatgaggtctcactatgttgcccagactgatctcaaactgctgggctcaagcaattttcccacctcggcctcccaaagtgctgggatcataggtgtgagccaccacacctagcctagttttcactatttcttcttccttatttatttttataatttgtttatgatggcaaagaggtttgcatgttgaagtttgcagagtaaaatgttacttctccatcattcctaaccctagtgctacagcctgctgtcgaggccttctttctggtccatgccacagagcgggagagcaagcctcctgtccgagacacccgtgagagccagctggcacacatcaaggacgagcctcctccactctcccctgcccccttaaccccagccacgccttcctcccttgacccattcttctcccgggagccctcatctatgcacatctcctcaagcctgccccctgacacacagaagttccttcgctttgcaggtacagggaacttttaggctgccaggtgtagaaggcttcattttaaacaggattgtttcatacagttaatccttagttgatgagagagagagagagagagagagagagagtgtgtgtgtgtgtgtgtgtgtgtgtgtacatacacacacccgtgcacgtaaaccctgcatggtttcccttggcctcaggatactcaggtttagaatagaaatgctcagattcacgttcacacctcaagggctggcccttggttttgactagtccttttagagccctgaaataaggaagaggaaggaagagagagttgctagctggttggctgtcttacagcttctggggcagatgatgtgcttaattcctgctgtcacttctcccctcagagactcaccgcactgtgttaaaccagatcctacggcagtccacgacccaccttgctgatgggccttttgctgtcctggtagactacattcgtgtcctcgactttgatgtcaagcgcaagtatgtgtcctggatattggggggtagaggggtggtgagaactccccaaatggtaactcgcctctgaagttactcttgaggccacaaattt

SEQ ID NO: 17088 - DNA, 1164 bp, Homo sapiens
acctgagattcagaacattttattcattttgtcttatgattagaaagtgatggagctggacctagaatttagtgttctttcaataataagcattgctgccatctatcaaaggcctgccttgtgccaggcactgtgcaaaatacatcatgtcgtttaatctccaacaactttgcaaggaagtgtagttatctccattttataagtgcgagactaaagctcaggaaaagtttgctcgtgagtctgtattgctacaaagccctcattcatttctctaggctgctttactgtctgttggataaaactcttatatgacatatcccccaatatttaccaaaattgtctgaaggagtctgggaaccagttgtcttttccctatcaggaaggctcatcctctgtgaagacgtcctagaccaagccttgtcctccttttcccggcaggtatttcccagccacttcacacagcagcggaccaaagaaacaaactgtgagagtgatcgggaaaggggcaataaggcctgtagcccatgctcctcacagtcctccagcagtggcatttgcacagacttctgggacttattggtaaaactggacaacatgaatgtcagccggaaaggcaagaactccgtgaagtcagtgccagtgagcgctggcggtgagggggaaacctctccatacagcctcgaggcctctccactggggcagctcatgaacatgttgtcacacccagtcatccgccggagctctctcttaactgagaaactcctcagactcctttctctcatctcaattgctctcccagaaaacaaggtgtcagaagcacaggctaattctggcagcggtgcttcctccaccaccactgccacctcaaccacatctaccaccaccaccactgccgcctccaccacgcccacaccccctactgcacccacccctgtcacttctgctccagccctggttgctgccacggctatttccaccattgtcgtagctgcttcgaccacagtgactacccccacgactgctaccactactgtttcaagtaagtgtggatgtagactgggagctgtggggtatatactgtggcacccacttcacccccttttccatccagatagttctccctcagtgatagcaatcagcttggtttgtgtttgtgagaacaga

SEQ ID NO: 17089 - DNA, 1214 bp, Homo sapiens
acatggcaaacccaatctctactaaaaatacaaaaagtagtcgggtgtggtggcgcgcactagtaatcccagctactcgggaggctgaggcacgagaatcacttgaatcctagggggtggaggttgcagtgagccggtatcacgccactgcactccagcctgggtgacagagcgagactccatctcaacaaaaagctggtgggggtggggggcttcattctctaagctgtacagcagccctgaaaggatgatgtacagtcattgtaaagtgcctggtacatagtagacacctaagagggcagctgttactatgaagagcccttggactggacacccacctttctcaagcctccttggagatacctagctcattcccctcccccattcttatgcctaatcccagagctctagccactgaagtgttacccaaaaaccatgttctgtttccaggccttctggcagtaatgtagatactctcctccgcctccgaggacggctccttctggaccacgaagccctttcttgtctcttggtcctactttttgtggatgagccaaagctcaatactagccgtctacaccgagtactgagaaatctctgctaccatgcccagacccgccactgggtcatccgcagtctgctctccatcttgcagcgcagcagtgagagtgagctatgcattgaaacacccaaactcactacaagtgaggaaaagggcaaaaagtcgagcaagagctgtgggtcaagtagccatgagaaccgtcccctggacctgctacacaagatggagtcaaagagctccaaccagctttcctggctctcagtatccatggatgcagccctaggctgcaggactaatatatttcagatccagcgttcaggggggcgtaaacataccgagaagcatgcaagcggtggctccaccgtccacatccatccccaagctgctcctgttgtctgcagacacgttttggatacactcattcaattggccaaggtgagggtttcaaacccaactcctggggatggaagaagggtggcagcaagagcctgggtgaaagttgaacactaagcaggctagcgtgtctttttgctcttattttaagtgttgagccctgtattgtttctaggggattgtcctatatatttctggggttttttcttcattcttttccatttttatgtatgtcttatttagtcatcaaaacaactgg

SEQ ID NO: 17090 - DNA, 1159 bp, Homo sapiens
ggaagactcgagcccaggagctcaacactgcagtgaggcaagggttgcaccactacactccagcctgggcaacagaccaagaccccgtctcaagcaattaataaggcgtgaatccctttacatgttatatctcccttcaggtatcagtctccctgaaggtgtggacccctcttttctggctgccctgcctgatgacatccgtcgggaagttctacagaaccagctaggcattcgtccaccaacccggactgccccctccacaaatagctcagcgcctgcagtggtggggaatcctggtgtgactgaagtgagccctgagtttctggctgccctgcctccagccattcaggaggaagtatgtgagcgggaaggtggtggggccaggctgcctggcaggagaaatgccctcattgactttttctgctccataggtactggcacagcagagagctgagcagcagcgacgagaactagcacagaatgccagctcagacacccctatggaccctgtgaccttcatccagactctgccctcagacctgcgccgtagtgtcctagaggatatggaggacagtgtgttagctgtgatgccacctgacattgcagctgaggctcaagccctgagacgagagcaagaagcccggcagcgacagctcatgcatgagcgtctgtttgggcacagtagcacctccgcactctctgctattctccgaagcccgggtacagagggaggcaagtgggagggctctggaaagctttagccagatgaggctatgttttcttacctttgtattacctatatccagtttacaccctctccacaatctcagttttctttttctttccttccagctttcaccagtcgcttaagtggcaaccgtggggtccagtatactcgccttgctgtgcagagaggtggcaccttccagatggggggtagcagcagccataacaggtacctttgtctatttttaccttaccatatcaccactcaagtctattagcccagctcccttagttttataggtggagaagctgaaatcctgacaggcaggatggatggtctctctaagccatttccttgaataagtgagagagccagatctttggactccccattcagaaaactacaccttttggttagtcttgctaccaaaga

SEQ ID NO: 17091 - DNA, 1053 bp, Homo sapiens
cccagctcctcaggaggctgaggcagagaattgcttgaacccaggaggcggagattgcagtgagccgagattgtgccactgtactccagcctgggcaacagagtgagactccatccccctgccaaaaaaaaatcccttacctggtttgcctagggaagatgtttcacaggcatgcctggaacacagtaaatgttcaagaattgatagaaagggcttcagctgaaccttagaaatctcaaagtgagattgagagggggacagcaagggagaagtgagaagtctgagctgagatgcccctaaggaagcagccctatcaaagaccttatctgtcattttgccccggttccagatagaaacctaacctctccctgcaacttcttcctagcctcactttccccagagagagctgaggattctgatgcactgacggctgtcagcagtcagctagaaggctctcctatggatacaagcagcctggcttcctgtaccttagaggaggctgtgggtgacacttcagcagctggcagttctgagcagcccagagcaggcagctccactcctggggatgccccaccagctgtggcggaagtgcaaggcaggagtgatgggtcaggggaatctgcccagccacctgaggacaggtaagcatgtgtgggcaaaagaagggtaggatatattggagggtctttcaaagcacatttcatactcgtcaactaatggacatgcttgttatgctggggagataaagctggtttctgtgagaaaggggtattgtagcagtgttttataaacgagaagacataatacagacagcaacctgagcatgatttccctcagctccccacctgcatcctctgagagctcttccaccagagattctgccgtggccatttctggagcagattcccgaggaatcctagaagagccgttgccttcaacaagcagtgaagaagaagatccccttgcgggtgagttccgtgtatgcccaggtcatcctgggattgttttggcttctagtagcccttggcatggaaatgcccaccagccaaacag

SEQ ID NO: 17092 - DNA, 1141 bp, Homo sapiens
ttctgtgtacctataggtcagagacatttagcctcaccctatatggcctgaaatcttcccccttccacctgcagggcacagaaaggattttattcttagaatccacagagtcagagctccagttcttgcattcttgggacagagatagcactgtgccttaaccttcatccttagtataccagaccagagatgttccttggagtatttttgttgtggggatgatcactggctgggtgggatacttatcaggccacatttgctgattggggtggctcccctcatcattggctggttgccccttaaccactattattgttctttccgagaaagatgggacgcctatgcctgacagctacccaacaaccccatcttcaactgatgcagctacatctgagtccaaggagacccttggcactctgcaatcctcacaacagcaaccaacactcccaaccccaccagctttgggagaggttcctcaggagctgcagtctccagctggagaagggggcagctctacacagctattgatgcctgtagagccagaggaattgggtcccacaaggccaagtggggaagcagaaacaactcagatggagttatccccagctcccactataagtgagtagaatttcaacatttggggaggatgaaacaagagggaagaaaggatgtctttgtagcttctctttgctcttttgcttgagagaaatagtaggagttcaacttctcaaataataagatctcgtcttgcgcattcactttcttaagtgaagttgaggtcctgaactggtgatagttgaatgtctaatgatattggtgatgataccaacagttcattgaggcaattactctgtttctgggctatcaccccaggcttattatttaaaaacaactctccagctgggtatgatgactcataatcccagcactttgggaggctgaggcagggggatcatttgagctcaggagtttgagaccagcctgggcaacatagaccccatctctattggggggaaaaaaaaactctccaaaatcgatggtgttatttacatgagtaaactgaaactcagaaatgaaataattagcccaagtcactctgtaagtggttgaactagaattaaaacccagatctgtctgactt

SEQ ID NO: 17093 - DNA, 1915 bp, Homo sapiens
aggcattacattgcactatagtaagagagcacagaggtaaagagttacctaacccaatctgtggaagtcaggcttcacagagaaagtgacatcttaggccaagaagagaagagcaggtaaagaagcgggagaggagtcttcaaggtgaagggagcagcatgtatctgaggggcctagaagcatcactgtgactgtagtgtggaaaatggattgggagaaggtactatttaggaggccgttgcagtatctaagtgagagatgatggcataagctatggtagtgtcagtgattgtagatgagttgtgggaatgagggagaaaggacaaagctcaggtttccgtgtgaggaagtaaggcccaggagacatgattctgcttgaacaaacatggaagaaatttctttttgacactgacccttttacatattgtccttgcagcagacatccccccatccccaggaaatatccctaccacccatccactgatggtgcgccatgcagaccacagttctctgacactgggcagtggctcttcaacaactcgtctcacccagggcatcgggcgcagtcagaggaccctaaggcagctgacggccaatactggccacaccattcatgttcactaccctgggaatcgccagcccaaccctcctcttatactgcagaggtgagttacagagatctgttggattcatcggagctcttgtaagaattttcactgtgctttagcattgtcttaaccttgggggaaatagtccatcacttaatgttcttgtcatacacacaaataaggtatttgttccatttctttgtggattacatgtgtagccttttggggagtgcagccttttggggaataccaaattatgtcaatagttctgcgcatgtatttagcaattattaagtgtctcatgccaagcacttaacactttagatatagacgggacaagatccctgccctcaggcttagagtttagtgagacaaacaatcttaagaagtaaaagaaaggcatataagtgttgtaatggttggtgtacagacgacagagagggtgtagtggaggcaatgtgacctgacgcagtgcctggcacgtgggagcttattgacacccacttggtgccaggaactatggaataatatacaacttaagtacaaaaccagggtggtattcagaaaaataacttagacttgtgtgcacatcatcaggtttataatcatgttctgcatttaatagaggatgcatgaagaggatctcatggtaacaggttgcagggcacctctggacttaacagtgatcatggtacccaccattaccctacaggttgcttggtccctcagctgctgctgacatccttcagctgagcagcagccttcccctacaaagccggggtcgggcccgcctcctggtaggcaacgatgacgtccacatcatcgcccgttctgatgatgagctgctggatgactttttccatgatcagagcacagctaccagccaagcaggcaagtttgtgtggtgaaagggagggtagaatttgtcagattctactttttccctgctgaggaaaagcaagacagtgtctgccctatagaaaacccccattttataggagccagaaccactcagtgacttagccatgggcaacaaaaactttattgtctctaggtacttgttatgttctaaacattgtgatagaccttgggtccttttagggaaatactgcaatttttggatcggtggatcagttaatgcttgacaaggccaagaatctcattcccctttgctgtccctacaggaaccctgtccagcatccccacagccctgacccgctggacagaagaatgcaaagttctcgatgctgagagcatgcatgactgtgtttcaggtgcgtggcagcttggttatcagggcaatagtg

SEQ ID NO: 17094 - DNA, 1391 bp, Homo sapiens
atccactttatcctcagccagtttttcaaataacatgttactactgcttgcccaaagtttgtcacttcttacttggttcgctttcttctcacccacctgctatcatcgctccaggttccctcttgccaacaggatatagtcaatagcaaagtagggctgaaaaggcaagggggcaccagcagacttggccaagtcctagaccatggctcctcaagcaccaccctctagccagcctccacattcagccaccctgctcagtgtgttgatgcattgattggcactctcaggaaatcgggtctggctcactaagtctgtacatcaccccagatctggttcttcctctcatagagtcagatatcccatcaccttcccactcagcctgctggcctgcacagtagcctgttttctagctactcagtttagtcctccaatgtgctccctttgttttagattccatgaatatcctggaccctgaggatgaggaggagcacactcaggaagaggacagcagtggcagtaacgaggatgaggatgatagtcaggatgaagaggaggaggaggaggaagatgaggaagatgatcaggtgaggggggactgcgtttgggttggttcagatgacctcttccatgggaacatagagctgcagaaaaccaacagtctgggttgctagcctcagcgtctccctccctcatgtgcacatgtggccatggcaccaggcttcagaaaacccttacctccagcaattctccatctcctattttcccttaaggaggatgatgaaggtgaagagggagatgaagacgatgacgacgatggctctgagatggaattggatgaggattatcctgatatgaacgcttctcccttggtccgatttgagcgctttgaccgggaggatgatctcatcattgagtttgacaacatgttctccagtgctagtaagatacaggggctcagctgggtttttctctcttgattcttatacccttctctagggtaagccaagcagtggaccaaaccgatccgatacagacagcacttcttttcctatgctgacttcctggggcaagggatatctgaatccatctgtctcattagtgtatacttaggagaaggaatagtgagaggctgcttttgttcccttcacctcagtaaataggcagccattttagagcctggacaacttgatgatttgcttgattaaaaaaaagaaagagaccaaggctgactgcatcaggcacccatgtgcacaccacagtggcagggcaatcaataatccttatgtccataacacaagatcttgagggtttgaatggtcacctttgagcttggctttggggagcagatttgaacatactcactctattcatccaggatgcgtcttttcggg

SEQ ID NO: 17095 - DNA, 2484 bp, Homo sapiens
actccagcctgggtgacacagcgagaccctgtctccaaaaaaaaaaaaggaaaacttttatcatgttccttcctttgagcttttagggtttggggactaaatgctggtggtttaaaaaaaaaaatcctgagtacatccgagaagtggcttgcttgcatgtggtcatccagaatacattctgatttccagtcaagaatttgttactcatgtgctttccatggccccatgaaatatggcattgatttaactcttgcttttagggtgggttccttgaagacatttaagtcaaaattttttttttctaaacaaaagtagagtgttagttgtacgaccttatgccccttttctcttagtagattccattgtaagaagcttagtgtcatttagaagatagacacctagtatttctgtgctcagtccatctctttatcttcccttatctcagtcccaacatggccaacacagtcaatgctgctctgaagcctttggaaacactttcccggattgtgaaccagcccagtagcctttttggcagcaagagtgcttctagcaagaacaagtctgagcaggatgcccaaggagcctctcaagattccagtagcaaccagcaggacccaggtagggaatcagagccaatggactggagaggtgggagtagttgctttatgggcctgggatcacaactgttctggcttggtggtgtttccctgggaacttgctggccttccagagatctgtcatagtggcgtgggaatctgccccacaaagaattccttcaaaatgcagccttgtttggctatcctcacacgtagccttgtcttttcctttgtcacccattcgtttattctctgagaacttacaaacttgcccaaggaagggaccttattgtctttgcgcttgcctcatggtgcccagcacataggcactctttgattattttgctggttggttgattgtttcaggcgagcctggggaagcagaagtgcaggaggaggatcatgatgtcactcagacagaggtggcagatggggatatcatggatggggaggctgaaaccgactcagtggtgattgctgggcagcctgaggtgctcagttcacaagagatgcaggtagggaggcagatcacccagcatttccctgttgcggcgctgaaccaaacccttgccaggtggtgtgggtgggtgagtactttagatccttgcctcaatgctggctgctttgcagaggagcatgggtgatatgcttagtagatgctcagtaaatgtgtttgtactgtattaaaagaggggtgggggcagggccaggatgccatgtactatgaaatgatatagatcccaaccagaaaacttaggcacaggtgaaatgttgaagtagaaagctgacctgagaccgttgggccccgggtctttgatttactttggctctggtcattattggaagctccttaacaccaccttatgcctatagcaccagctcttgctggggcattaaaacagcagtcttctaaagaccctaaaggaaagcattgtaatttctggagctggtagcattgggtaagaaattgggcctgtggtcctaagctgctggctttaaagagatctattatgtcttcctggacagtataaagacaacccagtatcagataactgggatggacccatttgaaggatagtctggttgtggattggtagcacgtggtagtttctgtgctaattagcaccgaatgtgtggtttcacgtaacatcctctgtcacatgttatcctagaaatgtatgctgctttgctggccttttttagggtttcggtgctagcacaatgatagacttgtgtgcatccatatatatgttctatttctctccaggttgagaatgagctggaggacctgatagatgagttgcttgagagggatggcggatctgggaacagtacaattataggtgagagccccagaactgagtatagcctcttcctttgcctcagtctctcttgggaggaccctttttctcatcatctgcttgctcagctctgcctaagggctcatagccagcctagatcgctgcttgtcttgatgttgacggtcttacagatgagaaattcacaagacgtctacaggcctgtggcagtctaaagtgttgcctgtgtgggggaggtggtgggagtggccattgatacagatgatacatcaagcacatcaaaagagtgtttattcatggaggcctagaggaggctgtagggtgagaaagcgctgcctttcagttcttcaatgaagtccaggggctttctgcccctgagtctcagtagtgtaaaaagaatgatcattccctgagggtggccctttataaatctcagagggaaaatggcaaaggtaccctactgtcacctggctctgagggtgtatgtgttacttgtttttactttgttgatcaaggaaatcaaaggataaatggaagtagacacgtattcttaagttttacaaagcttt

SEQ ID NO: 17096 - DNA, 1223 bp, Homo sapiens
gttccctgtacttaaagtactttgtccagtgactgagacctgcaagagttataatgcaggataactgccagaatgaaggcatacttggataagatataatggacatgtaaagtatctcacagtatgtctagatgagacaggaaagcatttatggaggaggtcagcatttgagctgaactagataaaagtgtgccaggcagacggaagaaagaagtaagggagcaagacaagtttgaagaactgttagtagagtgtttctggagtatgtaaaaggagggaaatggagggagatgcacaaatagttggacaaagcatccctgttgtactgtaaccacataaatctgagacctgagttatcctggttctctgctcttgcactgcagtgtcacgagagcattcagtttgtacaggtggcttaaagtggaggagaaatagcattcttttccacctaagacttgattttgccagtgttccagtgtggaattgaaccagtgtttgacttttctcaacagcttcaactccagaggagtctcgagatgggaagaaagataaagaaggggaccgggcctctgaggaaggcaaacagaaaggcaagggcagcaaacctttaatgcctacctccactatccttcgtcttctggcagagttggtgaggtcctatgttggtattgctaccctgattgccaactacagctacactgtgggccagtctgaactgatcaaagaggtaatatttccaacttctatttaagatgttacactgtacttccatcatttgggtaccgcctgtgtcagacactgctgggaagctgtgcatgctaagtgctaacccaagtaatgagtgagaagaggcatcttcagacatgcaaggccgggtgcggtggctcacgcctgtaatcccagcactttgggaggctgaagcaggcggatcacctgaggttaggagttcgagatcagcctggccaacatggcaaaaccccatctctactcaaaatacaaaaagaaattagccaggcgtggtggcgggcacctgtaattccagctattcgggaggctgaggcaagggaatcacttgaacccaggaggcagagattgcgggaatcacttgaacccaggaggcagagattgcgggaatcacttgaacccaggaggcaaagattgcagtgagccaagatcgcaccatcgtacacctgcctgggtgataagagcaaaactctgtctca

SEQ ID NO: 17097 - DNA, 1106 bp, Homo sapiens
tgagaagagcagaagcatagctatatgtaagccctgtgttatcaaggcaaacaatatataaatagttcagtatctccagtggctatcattatctcagactgatggttgactttgaggcataaagaaaatatttaattgtgttcctgtacactaagtggattacagtgttacatgtttttgaaccattctggtttaaaattgtgacagcatttggagaggctcaggagctgacattttaatgtggaagttatgtggggtttatagtcttgacacatctcccagtttctataaagatcacatgcagtctggtctaataattgatagttttgagacatgctgcaacttttttataagccaggttttttgaatcaagaagggatgggacgggacttaaaaataaaatgtcattctccccaaaatcaaaagcttttagtcttggtaactcttgactgcagttgtatttttagaaagtagtgtttaatcgacagtgtttctttctctctttactaggttgttcgctcagcagctacaagtggagctggtagcactacctctggtgttgtgtctggcagcctcggctctcgggagatcaactacatccttcgtgtccttgggccagccgcatgccgcaatccagacatattcacagaagtggccaactgctgtatccgcatcgcccttcctgcccctcgaggctcaggaactggtaagtttcgcttgctcctggcctttgatattaagtttgtggcctggtataaatccagaaatttatttatgaggaggtctgtaacttgaagagcctccttaggcaagtattaggacatttgctggctaattgattgtttgggtcaatttattaggtacttcagtagcttctctgggccttgccctgttgtaatccctgccagagacactgaggactcattcattctagtccttcacttcaaagagctcattttggtggggcagtaggctttacatatagttaatggtttacaaatcaagtgataattaagggttaaatggatgtatgtctcgtgtaacacagtgcgaaatagacgtcatctgtgtattcctgccaagaaatgtttgacctgtatttaatt

SEQ ID NO: 17098 - DNA, 1659 bp, Homo sapiens
gttagtgtagtttatgtgtggcccaagacaattcttcttccagtgtggtccagggaagccaaaagattggacacccctactgtaaactttatcaaaaagaggggtatgtgttttggttttcttctttctgaaccagcattcctaacgtgttaggaggaggagagttaccattacctaattaagtatagatttcagaaaatcgagtcttcctaaggtcattgattagaccttgggtctgtagcaatttgatactatccctcttagaaatgattttaagtgtttagtcaagggctagggagtggttagggatggtatttgctctgttggaaggtctacagttcattataaggccttgtgtatgccacttgccttctggggactttcaggttttttctctgtaaatgataaaggtgggataaattgccagagttccttcctgttgtagcattttacctgggagatgtccctcccctcccccacctttataattcatttttggtagaggtttttttaatgtctgtttgaattcctaggttaatgaggaaacagggaaccgacgccctgtgatgctgactctcctcagggtacctcggctgaataaaaattcaaaaaacagcaatggacaggaactagagaagacgctggaagaaagcaaagaaatggatatcaaacgtaaagaaaataaaggcaatggtatgtaccaagagtgttttacctaaagctaatgtgcctttgtggcttaaggtctggccaatttcattgtgagttattttcatcagcttgattaacagattaaagatacgtaggcctcccttatgctttttcatctgatcttaaaattggtatttggcatgcttctcttaataggacccaagtgcttggccaattacttaggagggaggcgtgggaggaaataaacatcaagttaaactgtctaaaactgttattttcccattttatagatacccctttggccctagagagtacaaacactgaaaaggagacaagcctggaggaaacaaaaatcggggagatcctgatccagggcttgacagaagatatggtgactgttttaatccgggcctgcgtgagcatgctgggagtccctgtggacccagatactttgcatgccacccttcgtctctgtctgaggctcacccgggaccacaaatatgccatgatgtttgcagaactgaagagtacccgcatgatcttgaatttgacccagagctcaggcttcaatgggtttactcccctggtcacccttctcttaagacacatcattgaggacccctgtacccttcgtcataccatggaaaaggtgagtgtgttttgtatcagattctggtttagctttacatcatacctatgttctccttggtctgagaacaaatagacttctggttcttcttagggtatatagctagatatgtatactgtatactccacccaacagaattttccaactctatgcttgggagcttgcttaggtatggtaggatgatcctattgctagaaagtcctctccagcaatctggttttcttttttttctttttttctttttttttttttaatctaggtttcattaaccaagccaaaaaccgttagtaaagaactgggataccttcccccaagttcataccttcagaatcattcct

SEQ ID NO: 17099 - DNA, 2027 bp, Homo sapiens
gcccgccaccacgtccagctaatttttgtatatttagtagagacgaggtttcactgtgttagccaggatggtctcgatctcctgacttcgtgatccacccgcctcagcctcccaaagtgctgggattacaggcgtgagccaccgcgcccagctggtttaggtttttaagactctaaaaagtaacggaggagaggcggaacaaaagaaaaaaatagtatagctgaaaactgttggacagattagacgtaatagctctaagaagagggacgtgtagggccaatatagagattggggaccttttagatgtaaaccccccttgccagggtaaaatactaatattctgtctacttttccttatttgaatttagaactttcaactgggctctgtccatgggaggtaaagttcctgtttctgagggattggaacactcagacttgcctgatggcacaggagaattcctagatgcctggcttatgctggtggagaagatggtgaatcccaccacggtgcttgaatctccacattcgctgcctgccaaattgcctggaggtgtccagaactttccccagttcagtgcactgcgcttccttgtggtaactcagaaagtgagtattcagtattctaaaatcaaaaggaatttctcatgctaagtcgttcccactctattttgtcctgcttaatgaaataacatgcttatttaagaaccactggatccaactcccagatagggctgccttacgtaagggaatatagaccatttgagaattttccgtgataaacatttgagctgtaaatttcagattggtacttgcattaggccgttcttgcattgctataaagaaatacctgagactgggtaatttataaagaaaagatatttaagtggcccacagttctgcaagctttggaagcatggtgctagcatctgctgggcttctagggaggcctcaggaagttcacagtcatggcggaaggttaagtgggagcttgcatgtcacatggcaggagccaggaggtggagggggtggtacacactaactcactatcatgaagacaacactaaacaatgagggatccacccccatgacccaaacacctccagcattggggattacaattcagcatgagatttgggcagagcaaatattccaaactgtatcactgcttaaggttgagtaaaatgcctcttctctgtgcctccttagacctcctcatgttggccaattattttgttgctggtactagttgtggaaggactgttccataggtctttaacttaatccttctgagctttgaattgaagcaaaatgattttcacacacttttcaaattacttacaggcagcctttacttgcatcaaaaacttatggaaccggaaacccctgaaggtatatggtggacgaatggctgaatcgatgctggccattctatgccacatcctccgaggagaacctgtgattcgagagagactaagcaaggagaaggaggggtctcgaggagaagaggatacagggcaagaggaaggtggctcccgccgggaacctcaagtcaaccagcaacaactgcaacaggtagggtactggcctcacactccagggtccagactttgcacccaatggagtgtgatgcttacggattttctaagctcacataccactgagtccctggtcacattaaccaggagacagtttagatttcctccttctcttagtatttattttttttctcctgaggaaaactggagtatagtcctgatgctctgcacaggtaatactcctttcaagcatgttgatgagtattctcagtagcctcctgctgcctcagtggaggcaaactgtcctcagttactttctggttaacctgtaaagagaatggatattgtgaaccagatttattctccaacaagagctttctgaaaccttagtcacctacaaaacttttgttttcacttgcaaataaaatgtataaggggcattttaaaaattgggaggccagaaagaggagaggggaaaggcatgtaaagtcc

SEQ ID NO: 17100 - DNA, 1181 bp, Homo sapiens
gctattgagcaggagtgtgttctctgttaattgtgaatcaatcaaatctgaagtttaaaaaagcacaagtataaaggatttagaaaattaaattacttaacaaagcttagggattgatttttatgacttctttattaaatgaaataaaatgaaaatgaaacattcaaggaattaaataaatctaggtacttactgaagtaaagaaattgaatggaaataataatacccctaccaaataatttagaaagtagttaatgaacctgtaaaaccatttctttgattcagaaaaaaagagtagcctctgatgcctttctttcactttataaaaaacaatgagaacggatgttgtggaaatagtttgtaaatattgtaagaggataccttgtggaactgtcgtcttgagtgtggacattttgatgaggtggataactctgagaatagcaatgaagaaaaatcccttacccttataaaactgttgaaggtcaatttttttttttaagtataattgttcagagaacatcccaaaggtgaaattcttgttatgattgcagagtgaaattcgttccatctccgtaaaccagtggggctctcaattgggtctgagtgttttgagcaagctgagccagttatactgttccctggtgtgggaaagcactgtcctcctctctctgtgtaccccaaacaggtaagagaatggctctctctcttattactttgttatctaagttcggtgagcctggaggattgctttggttggggataggagggtatggaagagagttcagaggcctccttgtccttccctcttcccagcctaggaacttgatgacaaatgctttgtcgtcatggtagatgtttaaaatgtgttcctgttattagccagatacaaaaaattgagttgtggctggacacggtggctcacgcctgtaatctcagcactttgggaggccaaggtaggcaaatcaagaggtcaggtgttcgagaccagcctggccaacatggtgaaaccccatctctactaaaaatacaaaaaattagctgggcgtaatggcgggcgcctgtaatcccagctatttgggaggctgaggcaggagaattgcttgaaccccggaggtggaggttgcagtgagcccaagatcatgccactgcactccagcccaggcgaaagagtgagactgggt

SEQ ID NO: 17101 - DNA, 1165 bp, Homo sapiens
tccagagttcagtgtttcatttgcattatgcgtttcatttgcattataagcacatttgggggaaattttccatgatgtttgcctgcaggagagaggtaggcaaggagcactaaatagcaaattaagagattaaacatgattgtaccactaattcataatgtggccctgagcaagtcacttaacttctctgttatctcgaaatatctgattcttggtgtgcttgaaaatggagattgggcagaaattgtagatattctttacttcctggatgttttagaatccgtatcatacatctggtttatctgaggttttgatactctatagaaaacactaatatcatgactagaaggctaccccatccttattccaggctggccatttagttccacctgtcaggctctaacttctttaaaaaatttttattacctagatgaaatttgtggaatctattctgagcaacaatacaacagatgaccactgccaggaatttgtgaatcagaaaggactgttgcctttggttaccattttgggtcttcccaatctgcccattgactttcccacatctgctgcctgtcaggctgttgcaggtgtctgcaaatccatattggtaagaagcatctggccaaatgttttcatttctttctggaaatcaattttgcgatacttctgtatatatgtttttactatggtctcccttcaactaaaaaataatgaataaatttgtgttatgttgtataagtgaattttgtgactaatatatagtgtgccatgttatttctcattgaaaagtcaaagtattttttctttgttcatcggttgggtatgtagttctacatcattagagtttattggagggaaaagtgtatctccaagaaagcttttctagttgggttttattagtacctctcccttctttgttataggtgcattttaaacacattttatgtttatggttatgtttaaccatgtattttcctcccctttcaagcttggtagtcatgtattttaagcataattgacatgtagttcattgccgatacttaattccccccttttcaagcccgatagtcatgtattttaagcataattgacatggtagttcattgctcatattttgccaaaaatgaagcttctttattttttcatagtggtaaactacacataa

SEQ ID NO: 17102 - DNA, 1065 bp, Homo sapiens
ggtatttgattccagataactttttttggaggatattttactctctcaaagattggttcttttcatactattctggcacctgttgttttacaaggcagtctttggtaaaggccatgccattttcaatagcttttagttgttttgtgtcacttttcctagatgtaagtgttgcttagctattttcataatgatttaccctttttttccccttttccagctttcgactctgtgcttaattccgtcttattacccctttctgactcttaagtgtttgtgttctttctttttttaacccatgttagaaagcctattgcatggacaaataataaaataggaggagacaactgggggccattagattagaattaacacaggctttgaggaccacagtgtgataatacataacatatcactcaattatccccactcctcacacctttccagactattcgtattctccataatgttcacttttcttttagtgatggatggttctctgcctacctccctgaaacacatcatcagcaatgcagaatactatggcccatcactcttcctcctaggtaagtggagttgatagttggttataacaatttgggataacctggcagagctctctctctctgtatttacttacttacttatttacttatttatttttgagacagagtctcactctattgcccaggctggaatgtagtggcgcaatcttggctcactacaacctctgcctcccgggttaaagcgagtctcctgcctcagcctcccgagtagctgggattagaggtgcctgccaccatgcctggctaatttttgtatttttagtagacaaatatgaatagtaaaatcctgcaaggatataaaacacagagaggccgggcatggaagctcctgcctgtaatcccagcactttgggaggccgaggcgggtagatcacctgaggtaatgagtttgagaccagcctggccaacatggcaaaaccccatctctactgtctacctggacagtagacaaatgtcaatagtaaaatcctgcaaggatataaaacagagaggccgggtagat

SEQ ID NO: 17103 - DNA, 1099 bp, Homo sapiens
actaccaactagtagtatatgaaattgcacattttacttaccactctccccctcttccccaatttggtaggtgagaaatattgaaggacttctgtaggattgttaatttacacacacacacacacacacacacacacacacacacgtgtatgtatgtacgtattaatacatgcaactagtgatatattttcattttggggttcagtattcctgatcttcatttttatattcatttcacattaatggaagaaattttctcaaacaaaatttttctttttgtggtaccttttattctagtaagtttctttatcataacttgtactttagttgcagatgtggctatggaaagcagtccaggctcatccatctctatggagcacaggctggatgttgaattaagggcatcaggttccagcagcagcactaacatctcttctggccccagccctggtcccagtcccggcaccggccccggccccggccccggccccggccccggccctggccccggccccggccccggtcctggtcccggccctggccccggccctggccctggcccccgtcctggtgcgtacacacatagatgtgcagtctttcagagtggtagagttattaaactattgaagaaggcggctttaggcagaacttaaatggtacatttggaggttagcatcccatgactattcatgctccttcaccattctggtgttccattttcttatattaacatgtctttcatagcattttatacttttccaacaatttgcacattgattatcaaaacagccatgttggagggcagataatatccaaaatgggaactgagtgaggtaaaaaaaaagttgaacctttttactttgtaatttttcttttttactttagacttttagtattggtaaaattaaaagtattagtaatttttccaatttcaaagcttaattaagtattcttcctaacattcagagacctcacttcgaatgtcttctaattttattatagtgtatttggatctcttaaaattttgttttatgtgcttgatcattgtggtttaatggcgaactcagcataattcttttgtctttcttcattgccagga

SEQ ID NO: 17104 - DNA, 1435 bp, Homo sapiens
aaacacgaaattcattgatgtttcgtatacacattatatacgtagtcttaaggcaattgtatacaatatttcaaataattttgtgcattttaactgtgacctgtcacatgagatcaggtgtggaattttccacttctggcatgcaggtattcccaaagttttggatttgggaatatttcagatttttgaatcagggatcctgcattaatgttctctgtatatcaggcttatacttgtttgccttttggtttttcccagagggttagaaagaactcccagtacttccctctttgggtattaaactgcaaaactaacaaatactagattttcattgttgctctcaacagacctccatcccctcaagcagttaccagtagaatgacttatattttaaagtttggatattagcaactggaacttggttcagtcatcttattatatttgacacattatgtgtttaccttctaatttaataggagattaaagcagcttctttacgaacattaacatcaattgtccacttggagagaactcccaaactcagcagtattattgactgtactggaactgcctcctaccatggatttttgccagtgcttgtaaggaactgtatccaggccatgattggtaagttttgatggtgattatcttaggcaagaagaaacatttgccctctgcctttgtctttttaatatcctgcctgcttaacagcaattttgagcttgtttttgttctccctctccccacctcccttgtagatccttccatggatccataccctcaccagtttgccactgctctcttctcttttttataccatctggccagctacgatgctggtggtgaagccttggtctcctgtggaatgatggaagccttattgaaggtgctgtactttttttttttttttttttaaactacatggggaaatcaactaagggtgtagagatgcaagtttggggtgtttcacagtgagggcaaataatataagaaagcttatccagaaaaagttatacttaagtagaaggccagtttggctttctagttatctaattaacaatgtttaagagcagctacttccattattgagacttttatcatagtgtagaatggtcaggaggtcatgggttctggttaaaacattgccacatgttatcatgcctttacacaaccatagggaaaatatatgtcagggtactttgtaagttgtgttgtagtagtaatagcctttactatgtgcagggcaatgagcaccagcttttttctccctaaatatcttacttaatcctgcaaagtaattgatgtccccattacctcagaggttgagtcgcagaagtcatagaactgtcatttggcaggcaccaaaaataaaacacatgttttcccccatactgtgctgccttactgaggccccagactacatgtatacaaaagc

SEQ ID NO: 17105 - DNA, 1165 bp, Homo sapiens
aatctgctttgtaactcagctcatgtcaaaaagagaggaactggaaagcatgatttcctccctagtgctttcctccctagtgcggaaggtgagtaggcagagcctcaggcaaggcctgataggacaggagggacctgtcagcacacgtgactacaggggtatggaatataatggctggcagttgctgcttgagttcttcctaggagcatcctcactgaacagtgaaattgatctcattgaagaaatcacctttaggcagaccatcttgccttgattcttaagttcttatttctgttcgttttttcctcttgtttgactttcacattggatgtcttctcaacattatgttccaagcagccacacactcttaaatatatatatgtatgtgtatatacatagagagaaagagagataaggtctcactctgttgcctaggctggagtgcagtggcgcaaagtcaccataagcactgtcttaacactatctttttcctttttcaagagctggggtggaaaggagaatggctttggacttgcagaatgttgcagagacttgcatatgatggtaagtaactctttgggatatgggtgtcttttgacagagctgtggcctctctgtgaaccttactttacaatgaattgtggtatatgaagtgacgccttcacatcgagacctttgaggaacctaagatcagttcagacatagctgaaccacgtctataggaagcagtctagcagtgcttgggctcttgatgtgctggtggtagataaaaaaatctgagaaatagagtgtgtgttcatacccagttcttgagtaggtagctgtatttgttgaattaattttaatgtgattttttttaaatcccagaaagtatgttcgcttgcattctcacactggaactattgtatcagaactctggacagtgtggtgtgatttaggaatggctgcttggagagcagttctaccattaggtttattgagaacttataatgttttatgtgctttccttgtttatctctctgcctttcacccatgtttaagttatgagctcaggccatcctcctttctgctttgatatgttgctgtggagctacaaaacacaatttgattttcaataattattttgcatctggaagcaactatattttccacgtgggatttgtct

SEQ ID NO: 17106 - DNA, 1261 bp, Homo sapiens
agagaacataaaatatctttctttcacaatacttttagtccagttagagacttaatgttcttcttgagtcccacatgtgtatttgtctcttttccttcctgtgggaaaacctgcgcaattttgaaccactatttacgttttttacttttattgcactttatagctaactgccagattttaagctccttggggataaggttgcatgttgtagattatcaaatacatatatatatatatatatatatatatatattttttttttttttttttctttttttgagacagagtctccctctgttgcccaggctggagtgcagtggcgtgatctcggctcactgcaagctccgcctcccgggttcacaccattctcctgcctcagcctcccgagtacaaatacttatatattttttgtattgttgtgactaaacttcttgatagctttgtaaatgttgacaagtacattttgttttgttttcaaggccagttgtgcctgataccttgagctttgcccttttttgtccctttagcatttgacaactttattggcttcctctgatatgcaagtggtgctggcagtcctcaatctcctatatgtatttagcaaaagatcaaactacatcactcgtctgggatctgacaagaggaccccgctgctaactcggctacaacatttggcagaggtgagtcttgggtgaagagttggaggggtgcaaaaattggagcatatggttcctttcaacaggtgtttcttggagtgttaaaatatattagaatccctaagttaacttcactggcctaattgagttagaactattggtgccctgttttaaaacctaagtattctcagttattaagtaattttgaaggaattctttaatctctgctcaccaaacaaaatctctctgttcaaaagtggcaatttcacttctgaaaggaaagttcaaaattagattcaattctgtgtgagaaggaagtataatgcaataataagatctagatttgagtcctggccctgcttactagcgccgacactggtttcctcttctgggaatttaacatatctacttcagggttgatttagaatgaaatgaattgtggggtactcagtgctgtgatcagtaagtcgtagtgattgtaattgaagccagaagctctcatataaaagttcagctctaccaaactattgtccagtgttcccagaggcaacttcttaatacatacttagctttgagaggtaacccactgttggaaagctttctta

SEQ ID NO: 17107 - DNA, 1136 bp, Homo sapiens
tcttttttttagccttgtgatggaacagtaggtctttttcagtcttttactattatacatggtcatgcagtatggattcttgtggttaaatatttgtgtacatctttacgactttctttggattaattcctagaaatggaagttatcaggaaactgcagggctatggtgaatttttccatcctgagatgtgttgcaaacattgtacactcttattttcaattaagagtttgagatgcttgtaaaagagaaaaaattttcattttgacctgatttggtttcagtcttgtgcaacatagggatgtgggccagtttgatctggagagattctttacctctctctacctgatagctgtgcctctgagttggcatagcatcataactccagtgtttttactttaagcattttgcattgctcttcattctgtattgtctgtgtccaagcttgtagagctcaagattgtagctttaagttctcacttcttttgggattttcttttttcagatcgtaaagctgaaaattgaaatcatgaaagtagacaggactaaactgaagaagacacctactgaggctgtaagtatccaaaagtttactttgcttattttttcttcattaaaaaataaaaaaatatttgtgaacagttcatccatgctcttcaaatctcatcacccatatatacaaaaggcagtaaaacaacaacttgtctagaaacagtaagattttcttttgaacttccctggatcaaaaaaatggatagccaagagaccagtggaaagtgaacaccgatcagttagttcttcgtagctgtgtgtgcctgaagtcagctctcaggctgctgtgcaattccttcctatgcagaaaggatgtgtggtataatggaaagagcagatatgggttcagatttttaatgtacttctgggatcttgcaattttgttttttagaaaatgaaagtggtaacatctttcttactagtttttttgttaaggccagtgttttagcttgtctttattactgattcttaatcacacaattcagcttaacttgtgtattgggtggtcatatcaattaaccctttgtcgacagtagaaatcccagctttaatctagtaatattccaccagctagcttgaactgctt

SEQ ID NO: 17108 - DNA, 2715 bp, Homo sapiens
ggcacggacccctccaccgactccttctagttcccttccccactttcactagagcatcctgcctgccttctccactgaggagcaggtaaatgggagaggtttccagctgactagaaccctcttttctactcgtccaaaccactcccgtcacctgccttgtctgttctttattcttcatcccccgctagagctggaaggcaggatgaggagaggtatgaaggagcctgagccatgaagtgggaagcccagtgcttgacactttctgcaactctagccctatatccagaagcctgcccacctccacccattctgtttgccccatttccccagtccagtggacatgccccacctccagacttgctcatgggagaaggctgtggtctctgccccctcttgccaaatgcttcatggaaatgaagaggaaggcctagagcctccttcctgccccactgtgggccatttccagaagtggcctagaaatgccaacttcacttacctttcaaaagaaaggtgattcctatcacttgtcaaggtagggagaggtcagatgcccaagcctttgaccacggttttgtagcctgttggaggaagctacttttagctggctacacatgaggccacttgttttagggtgagctccagggatttgcctggattttgaaatcatgtagaacattatccacgtggctgtggctgtggctgtggctgggccctggcaggtggaaaaccatctcccagaaacctgaaagcacctgccaatgacgcagataaccctggccctacagcctgcttgctccgcctataccacagagcacagcctggacattatggagggtgtggcgggacggcccacacctgggtcctccatcgggaacttttcatgcttctttctccacctgaggtcttggtctgaagaagacctcaggactcacatcttcactcctgggcctttgcacttccagacgacaggtcatcgttcaagcagaatgcagacaggccattcacgagcccaagttgaagagaagagacgcccatccgtgaaggagcagaccatccatccgatcctccccttcccctgtccttccttcgtggattgtctccattgtccagacagtgcccccacctcccaccgccttgcctcactggcaatctggactcgatggagaacatccccccacctccatttggcactacccaagtggagtgtacccttgccctttccacctgtaccacccactccaacctcaccccagcttgcccaatgcttctggggaatttaatagctaccatgcaggccacagggaatttgtgaggcttcttttgtcatctttgtatctccagtttgtctttcttttctccatagccctgcctctactttccttccttggaatcaggggttcctttagcccatttgctttctctaccttggggaccccaggggccaagcagttctccatctagtcacaccaaaggcaaaaagcctggctacctcccccctagcacgtgagtccctactcccctcccctctgtttctgcccagctttgcttattttggggatttcaaggcagcagagggtagtgaggggagagcaggagaagcctctgtcctgtataggcaactgcctgactatgcggtgactgctgtaaccaagatcaggtccccagcccttttgtccattaacaccccttcttgatctttcaaaggcagctaattgctagcaaatccccccgattccggccttttccctctatttctttgttagaagttttctgtggagctgaaacccagcctctgtttgactgggtttcatttagcttagttgggttcttagagccccctgtttgttgttttgtgttgtttccaatgaaaagcaagtttaccctcagagttatgcttttccaaagaggctgatgtctttgtttttgttttttttaatgtttcaggttctaagtgaagtgagttggggaggggttgggagtgttagtaatcaaggtttagaacaccatgagatagttacccctgatctccagtccctagctgggggctggacagggggaagggagagaggatttctattcacctttaatatatttttacaaaaaaagcaaacaatttaaaaacaagcccaccgcttctgtacatgtctaaatatatttttagaagtgggtaggattgtgaatttctgatgcagggcctttttataaataggttagggtagcatcattcagacttctctgttgtttttgtccctgtctttttcttatgttgtgttactaatgtaatttatattttttttagatcctccctttcctatagagataaaagtgatttatcttggcaattgctttgcttggcattctttttttttgtgatgagggtggtggtgtggtgcagggtctgggagtgctgccttctccttgtactctttgtctctccctcagcaagttgtcaggcatttccctggtgctcagccttatgcttgaagtgggaagggtattcccaccctcaggagggacacgcttcacacacctgaagtagatcatcagaagcagactgagcagaaaagaaagggtgcaataattcaaaggggcctaacaagttcaatgggagggctttccagagactgctttttcaagtgtgtcctctttctgtgaatgtgggattttttttttctttccctctctcttccatgcacttgttgtgcaatctggact

SEQ ID NO: 17109 - DNA, 1623 bp, Homo sapiens
tttgggctttgtgatattcttgcccaagaagtaccatttctacagaaatacaactgactaatcttctagcagggttctttttgaaaaaccccatgcaccttaacccacagcaggtccttggtgatttttgcccagacaaccagaaggctatttgcttactgcccacttacaatgaccagatcataggaaattgaaaacagtgtcagactatttagtcctaatctgtcccagattaagagaatccatgattttcagggggagggagccctgcaatgccttgacccctgcccagatacttcttacataaaccaaagaaaaatgacaagagtgtacatctaaccagacagaagtagaaacaaagtatagaaaaacctcctctttggaatcagctcccttaatgtggtcccccttctcttggacctgcccaacctttcacaacgtcttgaaggtaggacttctatatccagcaaaggaagggatagtagtaaatttacatggcttggaattttctttctggagccacagagggatgaatcctttggagctctaaaagcaaccagtatcactgagctgtgagatacctatatctccattttctaataggaagcacttggacttaaaattgctaagatattttttgcagttgctatttctgtgcatcttgaatctatctgacacaatcaaatgacagtattgttaactctcacaccattaagaaaatttcttattttgtaggcattcactgtgagaggtaaaattgctgctttggcaggtatgattccagtttgccaaacggcttttcttccttccacaacctctttttcccctagcccagggtgaaacaagtgggtcatctccaaccttgatttttatttggattcagcattttgggtttggaaggttacaagaaggaaccataaatggccatattcctagatttttatttatctgacaaaatacacaacttaaaagccaggaaaactaaggttcattacagggagatgaactttttctaattggaggacaaattgtggaaggtggggtctgatctttgcttcaccacttgaagagactgtcatccttcacctgaggttccatttctagcttttatgtgacctctcttgaacaaagtcatttgggaacccccagaaatgacccctttacattgtaggaccataagcaaaacactggttgtgtatagtcactgatccccaaggacttgcagttttttatttctgctggtgtgtcttgggatcagcttataactcctactcttacttagtcagtgaccagtccagtctggtctggaccaggcctgacaaacttctgctcacttgcatcattttcattctgagccagtaggactttgggtagactttaaagcccaagaattggtactcgctttggctagtgacatttgatttttgtctccatcttgatttctgacatcattggccaagtcacattaactttttttgatcactgagaaaaacagtcgaacaaggcattacagagggtggttaaggtagagggtggggggcaggaatgcttatgtaggatagaaagaatgtgggggtagctgtttggttatggtgatccagtcctttggaaccttacaaggct

SEQ ID NO: 17110 - DNA, 1145 bp, Homo sapiens
tcctatagaaaagctctagctttggtttttctgagcatttataatgatactcattatcaaagacttatatgataaacctatgaggttgtggggacagctgtggcctcctgaggtttttttttgttttttttttttctctatgaagtggtatctacctcttcttcactccttccaacttacctacccctggattttgtaccaccacctctagctttggcctgacaatcagataggtagatgttttcagaaaagtaaggtagtattggttattttaatttttattttttattttatacacttcaaaaaaactatcaatggcctttgtactgggggattcaagtgaatcagaaaagtactgggcagatttttcctgcctctcaaccagtgcattgtttgtaaaatagaagatgtggcacagttcattcactccctattgcccacaccatgaaagggtgggaatcagtgtaatgaacttgagtacgaaagggactcaagagactgtgtgtgtgtgtgtgtgtgtgtgtgtgtgtgtgtgtgtgtgaatgtgtgcttgtgtgtgggtgtgggtggatgttgtgtgggtgggtgtatatatgaatgtgtgtatatgcatacacataccctttatataaagagacagatctatttatctatacatattttatatatatgtaagtgtgtgtgtatgtgtgtatatatgtgtgtatatatatatacacacatatatacacacatacatacatacatacatacatacatacatacatggtgatgtcccagaggatttactcaatttcccagaaatgcttccactgctatggagtggaaggtttcaaaagaccacacttttaatctgaaattcttactaagtcacagtgcattcacaactatgagaagttggatgggcttctctaaatcagacaaaaagtactttccagaaattgcctgttcagaacaataaactcttgggttgttacaagcttaatcttgaacagagccctcacatcccatatggtgaaaacaggaggttggaatgggattgggaagagttgggcatttccttatgaaggtttggagagaaaaggggggatgggaggtgactaccatttgaaagggctttcagccaatttggaggaaatctcttc

SEQ ID NO: 17111 - DNA, 1942 bp, Homo sapiens
cactacctgtgaaacttgcttttttgccttgattctcagtattctttcagattataaatctggtctgcctcttttttcccagtgctagccaacagtttgagatgagagggatcatcactctcatctgtgtttaagtggagagccatgtgcttctgtgaaatatgctttggggatttgggggtggagagcagaagaataattgaaattggtggcaatataggatttaggtgtaggagttagttataaaataaacaaatggtaagaaagtacctgaattagacaatccagtgcctataactttgcattttttattagagatgcatttctcgtctgtgtgcctaaagggcaatgggttgaaattgctttaactaccacagcgaaatatttgacaaatccttcagcaatggcctatcattcaacatatattagcacagtgctaggtatttgcagtggtattttgttaccttaaaacggccaaatgcatttagttgaaatgtagttgatagtaagggttttatataactttatccaatctctaaagtttatggaagcattgactttcttctttgctgtcttttctgagtgatgaaaatgatgcattccttttttttccttgaaaactcagcaaatgtttgtaaccagatgttccttgtttcacatgtttactgtgtaacactacagcatatttaatattggtaaatactgtatttcagtcattatgcataagtacattcctgaggtatatttgccatcattttgggattcagttattttatcttctgtttgggtcagaaaaacttgaactatctgaggtggtatgcaggccattttctagaagattgttttttgaatctgtagtttatcaaggacttgttccccccctccctttgtttagaagaggaatcagaaaaggggggtggtgtgtagaaaaggcctttgatttgataggtgtaatttctaagattgaaattttaaaaatgcagatcgtaagatagtaacactcaaacttgataaaatcctttgaattgaaattagtatgaaatttttatggaaccaaatgccttcaggtcaccctggaaatagtctttgtatgtgaaagatcaacacaaacattggtcaggaaccctgacagccaatatatgaaggagcctgggatagtaactaggttacactaaagttattttcaactaagatagctagacgagtgtacaaaccaatagctcctattctggaaggttttctttttattaaaaaaaattcaaacaaggttaaaagtcaagcaagaagggaagagagaaactgggttctgagaaaaaaatgtgccagtataaaataaactcctaaatgcgtgcttgtcatcctctagtttttttttaagttgaatttcttttccactgtaacttaagatttgagattgaggtttgcggtccagaacataccctcagcagatacagtgactaactggaaagtgcagttgttcaaggtctgtcatgctcaatcacctaaagctataatttgtttgatatattaagcatgtagacctagtgcagcatgggagccactcaggaagtttatgcaattaataaactttcagcataatttactatgaagtatgcagaatttcaccctcttctccacacttaacatttagttgtatatgtgaactctcctttcttaattggggaatgtagcattatatagaatgttgttaaagttaattttaatcctttttgacattaacctttttttttttttggtaaaccaagtgatctgcctttcagcaactgtcttattttggttctttgaaactgtgatttttatttcatttgtacccaaccattgtaagtattttgttttgtttcctggaaattctgttttgaaacagaaaataaaggctgtgttaaatgagtatgttatcttattaaaatgctgccatagtcac

SEQ ID NO: 17112 - DNA, 2333 bp, Homo sapiens
ctggactcgcaaattaaaaagctgggcatacaggctacggcagtcaaccagctttttcaagagatcaaaagtccgtcaaggtagtgtgcttacagtcagggacatagactaggtaacatcacttttcatttacttattttttttgttgttcatatacaaatcttgccactttttccacatagcccatgtatgtgacatgtcccattaatgtcattgccattttattttttccttttgtaactaatttggttttccggttattcatttcatatagatactaagtcttgggataaatcttgcaatgtctgatttagacttagggacttaatacaatgttgcttattacattaacaccttttaattgtctagcaggagttaagctttttctacttttcttcatttttggtaatgtaaacaaatttagtcttaacaaacaattttctcttttttacttacaatttggcaaaacttgcagtggaaacagaagagatgagatcagcaattgctcctgatcccattcctctgacacgggagtccacagctgatactagggctttgaatagatgtaaagcgatgagtggatcatttcagcggggtcggttccaggtttgtgtctttgattgaatccttatctacaagggcattataaaatataacagccagtggagatcttggtctgtagatgatacttccatttttgtttttatttttttttgagatggagtttcactcttgttgcccagttggagtgcaatggtgtgatcttagctcactgcaacctccgtctccttggttcaagcgattttactgcctcagcctcccgagtagctgggattacaagtgcgcgccaccacacccggctaattttttgtatttttagtagaaacggggtttcaccatgttagccaggctggtcttgaactcctgacctcaggtgatccgcctgcctcggcctcccaaagtgctgggattacaagcatgagccaccatgcctggccgatgatacttactttaaatgtagatcattgtcatatttaatttgttcatcttgcatgcatcccctcaccttttgaagccatcagtaaagatgaatctaaagaaatggagattttcatagctggtagagagcacagaaataggttttcttttggcgggtgggtgggtcctcttttataaatgtaatttcacgtcctttagaatctcagcaactctaattgtggaattttatttgagcaatatgatgcccactctctttacccaaggggcctgattgaaagagtgaatttgggggtatagattaaatttttaagttttgctagtatcaatacatatacatcacagcagagcatctacttgtctgtgctatgctaaccacttttacgtttttatatctcaggtgattacaattcctcagcagcagtcagcaaaaatgacatcttttggaatagaacacatatcagtgttcagtgagacaaaccattctagtgaagaagcctttattaaaacagcaaagtctcagttggtagaaatagaacctgccacacaaaatccaaaaacttcgttttcttatgagaagttacaagctcttcaggaaacctgtaaagaaaataaaggagttcccaaacaaggtgacaacttcttatctttcagcgcagcttgtgagactgatgtatcttcagtgaccccagaaaaggaatttgaagaaacttcagccacaggaagtagcatgcagtctggatctgaactgttgcttaaagagagagagatattgactgctgggaaacagcctagctctgatagtgaattttcagccagtcttgctggcagtggaaagtcagtggcaaagactggtccagagagtaatcagtgcttaccacaccacgaagaacaagcttatgctcaaacacagagttcactcttctattcgccatcttccccaatgagcagtgatgatgaatcagaaatagaggatgaggacttgaaggtggagcttcaaagattacgagaaaagtaaggactgtttctcttttgtcacaaatctggttgccctaggttttatagaacttagtattggattggtaactaatttaggattggtgacattttaatgattgaaaactacaaagaatgctaatgctaaacatttatgaatgagaaaaagttcttatatataaaatgttttcatagtctcaagactattacagttgcttatttaccaatatgatttaactactctttttgctaacctttacaatccttattcttcaggacttttggttttagattttacaactattcttatataatttcacatttgataagtaaacagctga

SEQ ID NO: 17113 - DNA, 1151 bp, Homo sapiens
gttacctaatcttgagcattacaaattacactctatcagtatggaaaattaaataaattatttcagtgctttatgtagatatagcaaatattcaacaaattgtatacttaaaaatttgcggccaggcatggtggcccacgcctgtaatcccagcactttgggagcctgaggcgggtggatcacgaggtcaggagttcgagaccagcctggccaacatggtgaaaccccgtctctactaaaaatacaaaaattagccaggcatggtggcaggcgcttgtaatcccagctacccgggaggctgaggcaggagaatcacttgaacccgggtggcagaggttgcagtgagctgagatggcaccactgcactccagcctgggcaacagagcaagactatgtctcaaaaaaaaaaaagaaatttgctttgggggagtagaaattaacacagataatccttataggaaaggggatgtgatcttggtggatacgtttttctcttctataagaatgtggtggtggtgttattttgtaggaactcctgagtttatggctccagagatgtatgaagaacactatgatgaatccgtagatgtttatgcttttggaatgtgtatgctggaaatggccacatcggagtatccttattctgagtgtcagaatgcagctcaaatataccggaaagtaactagtgtaggtataacttttttctttttactttatcagttgccacgtttcatgttgaaattagttaagtttgacttactcaaaactaattttggtttagctctaggtaacagtattaaaattaacaattgtaatgcaacaagccttagatttataccatatgactatgcttcattggagtcatataaaatgctctgtattagtatctttgggaaaatgtacaggtatatcatctatatatatttgtttgtaaggaatttttagttatctattagatggatcttatttttcaaagctgaataatagagaccgactacatggtttcttctaggtctaaaagcctttttatgaaagggcattcaaaatatagttcaatagatacagtatttgggtccctgctatgagtaaatttttgtgttagaaattgtaaggaatgcaaacatgagtaagaagtgtttgctaccctaaag

SEQ ID NO: 17114 - DNA, 1232 bp, Homo sapiens
attgacagatggagctgagaactaggtttctaaccaatattcatgcaatatgaagacagattgagctatatactaagtagtctgctagacactgaggactaatggtaaacaagataagacacagtccctagagtctgctggttcctaagattggacagaaaaaagaataaacttcttattaaggaaaaagggattaaaaaatcaggtgatttgttttctccttaatgatttcctttgtagggtgattttaaaatatctttttcccccccttcaggttgctatggaaatacatgaccacgcaaaaggaagtccattctgataattctgatacctgagatgtaactggactgaagagtagaaacaggaaaaattttagtgccaactttaattacaatggccactgattcaggggatccagccagcacagaagattctgagaaacctgatggaatttcatttgaaaacagagttccccaggtcgctgcaactttgacagtagaagctagactaaaggagaaaaacagtaccttctctgcttctggggaaactgtagaaaggaagagatttttccgaaagagtgttgaaatgacggaagatgacaaagttgccgaatcatcccccaaagatgagagaattaaggctgcaatgaatattccaagagtagataagcttccttcaaatgtgttgagaggtggacaagaagttaaatatgaacagtgttcaaagtcaacctcagaaatctcaaaagattgtttcaaggagaaaaatgaaaaggaaatggaagaagaagcagaaatgaaggctgtagctacttctcctagtggcagattcctgaaatttgacatagaactaggaagaggagcatttaaaacagtatataaaggactggacactgaaacatgggttgaggttgcttggtgtgagctgcaggtaggtatataatcttcttggttataataaattcaagttttagctggcctggccttctgtgtgattcatgattatccatgtatcatggattaaaataaaataaagggcttgtcccccacatcctagaaattatggtcctttcctatatcctcttaggagctcactccaaacttttttttctcctgttgttttcttttctgttttaaaggggaagaaaaaaaaatctatcatggctttgtttttctttttcttttttctttttttttttttttgaggcggaatcttgatctgtcacccaggct

SEQ ID NO: 17115 - DNA, 1171 bp, Homo sapiens
aaagttacacagccaatcctggaaaagctggagcagagcctgggtctccagtggtcagtgtattcagctctcttttaaatctcccctccaggtcacagctacgaatgatggggctgctacagatggggtctgcccccagcctgaaccctctgatccagacgctcagactattaaggaagaggatatagtggaagatggctggaccattgtccggagaaaaaaatgagtggggatgattggaaatggctttgggcccttatttgctgttctaagagttgtctgtaggggttttttttttgaggattgcagacctgtggactggttaccccatctccaccctctcccctgttcctctgtctggctccctccagggcaaggaaaacctagggtccttggtcttgggggtggggggaccttttccagcatattcccctgggcctttagttaacatccgagtgacgaagccgggttccccagtacagtgtcttttgggtgcggtcattgtgaggaaggggatgagtgagtgtgggtgtggctggaggaggagctagatgccggtggacagtgggcaggtggatttggggaggagaggatcagcagcagcagcagtactcagtgatagggggctggctgggtcaggaatggtgagatgaacatgcaagtggaagagagaatagttgaaaatgtgaatgaaagtagctctggagcctctcccttaccccaccccacacacacgcaacagctctgtacccctgcccagaacttggaacctcccaggaatgctgccttccttcagcccagcctccagtcctgggttccctcaggaattcgaagaccttggctaggtggtgagcttggaagagctgggctttgttttctgtctcctctaacctctttccttactccttatcccatcccatttgagttcaggggtgaggcttaagatcttaataaataataccttactgcttaatctgtggcttgacctgtgagtagtagccttagaatcagccttctgggagctcagcttcagagtttacaagggagcagtttctgggcccaccctagcagcctggtactttggacaaccaaacagatgaacgaacggagcacagcagtgctatgaaagttactgtaagcctgaaataaactgtatttttcttaaaaaaaa

SEQ ID NO: 17116 - DNA, 1284 bp, Homo sapiens
atggctgtgcttggccgggcgggccgaggggacacgttctgcccggggcccacactgtctgaggacagggagatggaggaggcaccggtggctgctttaggagccactgctgaaccccccgaatccccccagacccgagacaagacctagagggtttgggacaaactgggagcccccaccccacactctagttgcccatgtctgattgggggctctagccccttccctcccagctcagtcaatacttgaactcccatcacgggcactttcaatcccgaatgctgggtcttgggttttttaattcatcttttcacaaaacgtgggcttttaaaaaatatattcctacagtgatgtcaatttttattaatccctgtccccagggagggtgggagccgttgccagtcctacctgaattaggtcgtttttctccctcatccctcaataccctaccacagatcctgcctccacccagttccccacaaagcaccagaggtaggagacctggattcaagtgccagctctgccactgaccctggggccccgacccagccctgcctcctcagccagtgtcttcacacgtacaactccacgtggggtggcaactagacctctcctgcctctcccatggcttacagcttctacccggccccaaggctacccagtattttatcgtccagacccatggcagggccagcgggcaggacagggaaacaggggggaggacaatggatactcagttttttgtgtttttttgtgtgtttttttttttttaagaaaaatacagtttatttcaggcttacagtaactttcatagcactgctgtgctccgttcgttcatctgtttggttgtccaaagtaccaggctgctagggtgggcccagaaactgctcccttgtaaactctgaagctgagctcccagaaggctgattctaaggctactactcacaggtcaagccacagattaagcagtaaggtattatttattaagatcttaagcctcacccctgaactcaaatgggatgggataaggagtaaggaaagaggttagaggagacagaaaacaaagcccagctcttccaagctcaccacctagccaaggtcttcgaattcctgagggaacccaggactggaggctgggctgaaggaaggcagcattcctgggaggttccaagttctgggcaggggtacagagctgttgcgtgtgtgtggggtggggtaagggagaggctccagagctactttcattcacattttcaactattctctcttccacttgcatgttca

SEQ ID NO: 17117 - DNA, 1213 bp, Homo sapiens
tttgcatatattaattcatttaattctcacatcagctctctttgctctccaagtcaatacattttcatctagagctgggattctaagccagacttcattaaccacccacatacccccttaaaaccacaatgctagattacctctcaatgagtgtaggaaatggatgtgatgaaagacagaaaaaagcatgaggcctaaatgtgtgaatggcttgaggaatgaatgctctgactgaagaaagaatgcctgagatccgcacactccttccactggcctgtagaggcagcagccgttgcccaaatgaggcagacgaacctagctttgaatctcagctctagctgattcactgggtggcactggacaaatcactcctgccacctgagcttgagcgtcttcatctgagataggaatagcagtccctacactgaggaggtattaaagctaggaggagccaggctaggccttctgtcaacattgatgcccggtgtctctggccacagaaacaggcctcagtggctgcagagaacagcgtcatctgcagcttcctgcactacatggagaagggtggcaaaggatggcacaaggcatggttcgtggtccctgaaaatgaacccttggtgctgtatatctacggagcccctcaggtatgcatcctactccttcgggtcctttcagccacctggcaaagccagatccagtccttgacctctccttggccttggaagataaggtgagccttggaagataaggtgagcctatctctaagaggaaatcagaaccccaacccttgagagacaaagactggctagagacaaggagtggttgtggtatgtagggaaaaccaggatgagttgtgggcctggcttcctggaaggagtagagatggggaactgctaggtccaatttggagtgggtaagagtatgcagatgggaccgagcgcagtggctcacgcctgtaatcccagcactctgagaggccgaggcaggtggctcacctgagatcaggagttcaagaccagcctggccaacatggtgaaaccccgtctctactaaaaatacaaaaattagcctggcgtggtgacgtgtgcctgtagtcccagctactcaggaagctgaggcaggagaattgcttgaacctgggaggtagaggttgcagtgagccaagttcatgccactgcactccagcctgggcaacagggcaagactctgtctc

SEQ ID NO: 17118 - DNA, 1218 bp, Homo sapiens
aggtcaaggactggatctggctttgccaggtggctgaaaggacccgaaggagtaggatgcatacctgaggggctccgtagatatacagcaccaagggttcattttcagggaccacgaaccatgccttgtgccatcctttgccacccttctccatgtagtgcaggaagctgcagatgacgctgttctctgcagccactgaggcctgtttctgtggccagagacaccgggcatcaatgttgacagaaggcctagcctggctcctcctagctttaatacctcctcagtgtagggactgctattcctatctcagatgaagacgctcaagctcaggtggcaggagtgatttgtccagtgccacccagtgaatcagctagagctgagattcaaagctaggttcgtctgcctcatttgggcaacggctgctgcctctacaggccagtggaaggagtgtgcggatctcaggcattctttcttcagtcagagcattcattcctcaagccattcacacatttaggcctcatgcttttttctgtctttcatcacatccatttcctacactcattgagaggtaatctagcattgtggttttaagggggtatgtgggtggttaatgaagtctggcttagaatcccagctctagatgaaaatgtattgacttggagagcaaagagagctgatgtgagaattaaatgaattaatatatgcaaagtgcttagaatagttcctggcacagagtaagtactcttttaagtgttaaataaatacctagatttgtttttaaaaaaatctccaaaatgtgtgtttgtgcatatatgcctagaaagataggataagccctcacaatggtaacttttgggtagaagggatacggtattttattattttttgtttatattggtctacttatcctactttgtaataacaaaagacaatttttaaattttttttttttttttgagacggagttttgctgttgttgcccaggctggagtacaatggcgcgatcttggctcaccgcaacctctgcttcccaggttcaagcgatttgcctgcctcagccctcccaagtagctgggattgcaggcgtgcgccaccatgcctggctaattttgtgtttttagtagagatggggtttctccacattggtcaggctggtcctgaactcccgacctccggtgattcacccgcctcagcctcccaaagtgctgggattacagg

SEQ ID NO: 17119 - DNA, 1092 bp, Homo sapiens
cgaaagaaaaagtgcctggtacccattgaggtgctctggaaatgtgaagctccattcctgtctcttgggacctggaatggactgagacattctctcaaaaactctctaatgttgccttaggctttttcacaaccacttcaggtccacttctcgattttccttcttacccctatcggtgagtaaggtacccaagtcacagaaagctgatatttgccaaaaggatgtcagcagaggtggcctttgacccagttctcctgccctgttgaagactcttccagctcacaggagctgggtgtccaaaagtatagactgcctggattcaaatccgagctttgtttcctttttactgtgtgatgctaaacaaattacttcacttctttgtctcaatgatgtcatctgtaaaatggggacagtaagtccacccgataaggtagttatgaggatttttttaataatgtaaaagacatttagaacaacagtgcctggcatatagtaaatagatgctcagtaaatgttagtttttattaagatgattatttgctggggaacagagatgtgactctcagaaactcctgagaatgtttgccctcctcagatattactctctgcagccctggcttgtggctccctgcttcattctctacactgcctaaggaaggtatccagtgccttctgggcttgtctgtagacattatggggtagttgaggaagcgttggctagcctggcttctagattctctgttttttctcttgaggtccagtagttttccttctctgggtcttttagtgtccttgtgttacacacgaggttaagaggacttgcctgctttctagtttgtatttcatgtggctttgagcaagtcagccccctttctgaatttgtttcctctttttgtttttttttgaggcagaatcttgctttgttgcccaggctggagtacagtggtatgatctgggcttactgcaatctctgcctcctggggtcgagtgattcttgtgcctcagctgcctgagtagctgggactataggtgtgcaccaccacgcctggctaattttttttatttttagtagagatggggttttgccatgtt

SEQ ID NO: 17120 - DNA, 1314 bp, Homo sapiens
tcacttgaggtcaggagttcaagaccagcctaaacaatatggcgaaacctcatctctaccaaaaaaatacaaagattagctgggcatggtgtctcatgcctgtagtcccagctacctatggggctgaggcaggaggatctcttgagcccaggaggtcgatgctgcattgagccgagattgtgccactgctctccagcgtgggcaacagagtgagactgtctcagggggaaaaaaaaagaggaaaacaaaaaagacgttgggagtgcagtttctctacctacagcatatctcaaaggttttttttaaaaaagtattttcttaactttttaccttcatttttcaaaacaattagggtacaatttacatatagtaaagttcactctttatagttttagttatgtgagtttgtacaaacatatacaggagtgaaccactaccacaatcgaaatatagttgcatcacccccctaaaactctccaggcccttttgtagtcaactcctacccccgaccctcagattctgctaaccactgatttgttttctgcccctatagttttgctttagtatgactgtcatatcaatagaatcatacaatgagtaggcttattttatgccttcaggttttaaaaattataaacatttacattacagtaaaattcactctggtatacagttctataaagctctgataaatgtgtagagttgtgtaaccaccaatgcaaccaaggtacagaacagtcctcttagcctctccctaccaaatttattcctgctactttgtagtcaaaaccagtcccctacacccaaaccctggcagtcactggtttttttcttcgttctcttttttttttttttttttttgagacagagtctagctctgttgtccaggctggagtggtgcagtggcgtgatctcggttcactgcaacctccgcctccagggttcaagcggttctcctgcctcagcctcccgagtagctgggattatgggcgcccgccaccacgcccagctaatttttgtatttttagtagagatggggtttcactgttttggccaggctggtctcgaactcctgacctcatgatcctcctgcctcagcctcccaaagtgctgggattacaagagtgagccactgcgcctggcctttttctttgttcttatatttttgtcttttttttttttttttttttgaaacagagtctcactctttcactgaggctggagtgcagtggcgtgatcttggctcactgcaacctccacctcctgggttcaagcgattctcctgccttagcctcccgagtaacagggactaca

SEQ ID NO: 17121 - DNA, 1172 bp, Homo sapiens
gggtgcagtcttgagtgtgtcctctgtgcctgcaaaacagtgcccacctctgtgcacccgcttcctccctgagtttgcaggcacccagctcaagatccttcgcttcctagttcctctcgaacaaagtcctgtgttggagcagtcgacgctgcagcacaacaatcaaacccgggtacagacatgccaaaacaaagcccaagtgcgctcaaccaggcctcagcccagtcaggttggctctagcagaggccagaaaaacctgaagagctactttcagccctcccctagctgtccccaagcctctcctgacatagagctgcctagcctaccactgatgagcgccctcatgaccccgaagactccagaagagaaggcagtggccaaagtggtgaaggggcaggccaagacttcagaagccaaagatgagaaggagttacggacctcattctggaagtctgtgctggcggggcccttgcgcacacccctctgtgggggccacagggagccatgtgtgatgcgtactgtgaagaagccaggacccaacttgggccgccgcttctacatgtgtgccaggccccggggtcctcccactgacccctcctcccggtgcaacttcttcctctggagcaggcccagctgaaccaatggaggcctggggacatctggcatggtcacccctgcacatgatctgaggccagctccccttccctgagctgcctcctgcttctccctcaaagtctcctacccttctcttcctcttttaagccctctcttcctcgctttccttcctacctagctccttgttggtgagcttcttgtgccttaatcctgtgacccagccccttacaccactttccaccttcctgtccgaagtacacggacactagctgccccaggaagttgtgtgattttaaatcacttctgtctttgctggaaagtgtatttgtgcataaataaagtctgtgtatttgtttcagggttgcactttggacattgtggaggtactccataaagttgagtcagagaagctatctcaatacttggtttgccggctggctgtagcccaatgatgtaattcccagagaaaggggaggagggaggggggaggagggaatagtgaggcgtgagcagcagtgctcaccataaagggttctctgctcagttgtaggaatttc

SEQ ID NO: 17122 - DNA, 1157 bp, Homo sapiens
tagaagatatatgagctggttgtagcagaatcaagggtatgctcttagaattcataagaatagggtggttaaaagaagggtcttggtaatgaaatttatggtatagagttctggtgaatatatggtatgtagtgctcctaggaagatagtggtagttagggcatttattatgataatattcatgtactctgctataaagaagaggacaaatgagcttgtggcatatttgatgttgaagcctgagacaattctgactctccttctgttagatcaaaatgggctcggttagtttctgctggtgtggggataatcacattatggctaggggtaatgatggtaggagcagtcagaggagttcttgcattgtgatgaatgcatataagttaaatgaaccacttatcagtaaaactgataacaggataatggctagggtgacctcatttgaaattgtctgggccacagctcgtgatgcgccaattagtgcatattttgaattagatgctcatcctgatcatagaataaatggctaggattgatatggctagtataaataggaggcctatgttaaaattaattagaggatttggtatagggaggggagttcataagaggagatcgataggaagggctaggattggagcaataatataaagggtaatagtagatgttgagggctgtaagggttctttggtgaaaagttttattgcgttagcgaatggttgaagcagcccgtagggacctacaatgttaggtcctttgcgtagttgtatgtagcctaagatttttcattcgatgagtgtaaggaatgctatagcgatgaaagtagggataataagtaggagaaggttaattataggtatattgttaatgagaggagttgaacctctgattataaagttttaagtcttatgcaattgccgggctctgccatcttaacaaaccctgttcttgggtagggtatgtgatgatttgttagattgagatagcatcatctgtggagcgagggcactttatgaagtgggccctatttctcttgtcctttcatactaggggaaatgttaaatagatagaaaccgacctggattactctggtctgaactcacatcacgtaggactttaattgttgaacaaacgaacccctaatagcggtgacacca

SEQ ID NO: 17123 - DNA, 1179 bp, Homo sapiens
cggtcttcccagtcaaaaaccattaccggtaaccagcagtaaaaaagagaagctcagaggcactgaaattgcaaccggctcctttaattctccatagcggatgggtggggccaggcccacccacattagagaggctgaaggctcccagcgccctaccccgcccgaggggcggagcctgagccaaggccacgtgatgatgacagacggcactctggctttcctggagctgtctctatggtattcttcccagcccacccgtccctttggtagcggcagtcacgtgacagactccggggtaaggcagatgcccacgtgatcctggcctgcagttgggtggctgcggtgagatacctgggttcctgaagggcgggtggttaggtcgtaactactgcccccgccggctgactctccgagcggccgggctcggaagccacgagccagctgaggcgttctccgcttagtgcctacggcatgggtcagctctttctgccacctccgccttcgcggtcctcacctctttgcgggtgaagttacctttgggtttccagaccttgggggcctgaggcccaaactcgggacgaacccctaacccacctctcttttcctgtcattctccaactcttactttgtaccacggaatcacttggccttaaagctagccagctcggccgtgccttgaggccaggttcgagagataaaggtaaccgtggggaaagcggccccccagtggacaaaggcggaggcaagaatagagcaggcctgagggccataggcgatgagaataggcagttgaggggtgaaaaagaaaacaaacaaacaacaacaacaaaccctgaagagtactgaagatttagaagggactggaaaggacttgttgcgcaatggaagaatctgactctgagaaaacgacggagaaagaaaatctggggccgagaatggatccaccactaggggaaccggaaggatcgcttgggtgggtgaagggtatttgtgaaacctggaagtgggggtgttcaaattgaagagagtattgtgaattagaacacttctccccaccccgcaccatgataaattgctttgatttaccagtaatgttgattgggattatgctttggacgacaggataaactggaaagcgaattggtgctaactgatcagaaacaacccttgggaaggggc

SEQ ID NO: 17124 - DNA, 2666 bp, Homo sapiens
ttcaaagcacacatagacatataagtaaggagaaaaatgttccaggagagtaggttgggcagtgacaggaacaaacagacctaggatgatcctgagaacaaatagaggggttcctttacttgtataggatatcaaaagtgctgttaatcacaaacctcattcaaatggcaggctgtcgagacagtgtcttgaggggctggctgtactgtttattttttcgtttacacaaagaagcaattgagtatattgcatgatgagaaatcacacactagggtcatgttatacagaagtaaggggttggaaaaatggaatgttgttcactccatggaattattggcattcattcctgtgtttcaaatgaaacatagatgcttttcatgaaaactgacctacaaaaagcaatttgatgttctgcaactgctatgaaaacctaagccatttattttagctgatagcagattgcataatatactcatttagctgcccaatcagattgttttataatattacctggggtacaaaatcctctgttcctggccctggaccacagatctacctccacatggcatatttcctttctggggtcaggggtaggggagggggctttgcatcacttgaatttagactcagcctctctttaaaagattgtctttatattgaacacctttttcttttcaaccctgcttgaatactttaggttactatttcctgaggctgtccattctcactatattgtagaattctagcaccaagaagggatcccgttaaccatctagtcctatccatccctcatattttacagatgagacaaatacgggtcagatttttttctccagatgtttctttgagcccttatacacctgcacgcttattctcctggggatcacataattttatttatttattttttgagagacggtttcactccatcacccaggctggagtgcagtggcgtaatcttggctcactgcaacctccgcctcctgggttcaagtgattctcctgcctcagcctcccaaatagcttggattacaggtgcgtgccaccacacctagctaagttttgtattattagtagagatggggtttcgccatgttggccaggctggtctcaaactcctgacctcaagtgatccccccacctcggcctcccaaagtgctgggatcacaggtgtgagtcaccacacctggccaggatcacattattaaaccaaattaaagtttatgtgattggttgcaatatttgtctaattttatatgttttcttcaggaaaactttagaactcaaaaatcatttacagctgattaaatagcaagtaaaatgtacttgtggtcattgccgtataacattaggcacacgcttctaacacttctataatatctagattttatttacctcattttaacttgcaatgtctgtctatctcatgaactctccataaatccaagaactgcctgtagttttcaaaatgacatgtgggtttttactgttatcattgttatttcgatagggctttttcctgattttgggtatacaagttccaaacttgcataataattgctaacgcactaggcgatatctagggccagtctgttaaaggggacctctaatgtagctataagacaggttggtaaagatgaactaacataagtttaagctaataattcagtagttgatgcagtatttcacagtagagcccgagcttactcatttttttcaaaatttggatcctgatactcctttttcagagttcagaactgaactgctcccctaagacctcagaatcttttgcattgagacatatgatctatttataaataaaggttatcaaatatcttgttgaactaattaggttgatcaaattaggatcccaaatattggggtccctgacatctgagcctttatctaaaaatgtttctgtaacataatgacagcctttatgtttgttaattgcctatagtaaagaagcaattttaagcctattctcatttccctctcccctacaaaaaatgataaaagctttccaattacttacatatgctctaacaagtgtctcaggattcattaacagaattttatagagtacagtaattcaaatatagcacagtacagagtttaccaaaaacacataaaactttgctagatagacagtgaggtggaaaggaactaaaatgtatctctcttgaatagcatttggggttcaattgaatttgttgtgtttacaacagcaaagcaccgttagcctggacagttgcttatggcatcgatagggttggataatattctgggatttgttgcagcagaattcctctatctgatgatcagcagttgaacataaacttcataattatagtaaaatttaggaaaaactatgagtgtgaagagtatgaactgattgggtagattaggcagagtgcattatgggcaagacaaaggttttcgatattaacttcttttaaaataaactttttattttcaaacagtttcagttttacagaaaaaatgtgaagctagtacagagaggtctcatttaccccacacccagtttctcctgttattagcatctcacattaatatgtggtatatttgttacaattaataaaacacattgatatgttaatattattaactgaagtccatactttattcaggtttctttagttttt

SEQ ID NO: 17125 - DNA, 1579 bp, Homo sapiens
acatcaatgcagccattgaaaggctgctgggctcccagccatcgtaatcacatttctgtacctggaaaaaaaatgtatcttatttttgataatggctcttaaatctttaaacacacacacaaaatcgttctttactttcattttgattcttttaaatctgtctagttgtaagtctaatatgatgcattttaagatggagtccctccctcctacttccctcactccctttctcctttgcttatttttcctaccttcccttcctcttgtctccccactccctccctctttgtttccttccttccttatttcctttagtttccttccttagccgttttgagtggtgggaatcaatgctgtttcactcaaaagtgttgcatgcaaacacttctctttattctgcatttattgtgatttttggaaacaggtatcaaccttcacagttgggtgaacaagtgttgtcctacagatgtccaatttatttgcatttttaaacattagcctatgatagtaatttaatgtagaatgaagatattaaaaacagaagcaaattatttgaagctctctaatttgtggtacgatattgcttattgtgactttggcatgtatttttgctagcaaaatgctgtaagatttataccattgatcttttttgctatatttgtatacagtacagtaagcacaattggcactgtacatctaaaaatattacagtagaatctgagtgtaatatgtgtaaccaaaatgagaaagaatacaagaaatgtttctggagctagttatgtctcacaattttgtagaatcttacagcatctttgataaacttctcagtgaaaatgttggctaggcaagttcagttaaaatatagtagaaatgtttatcctggtatctctaagtatacatttaattgtacagaaaatttacagtgtaacattgtgtcaacatttgcagattgactgtatatgaccttaatctttgtgcagcctgaaggatcagtgtagtaatgccaggaaagtgctttttacctaagacttccttctcagcttctcccataaagagaccctaatatgcattttgatttgtaattggaaatgtaactttcactgaaagtgtcatgtgatgtttgcattacttttaactgctatgtataaaggaaagtgtgtcttttgacttcatcagttatttctcttgtgcacagagaaaaatgcattaaaaatgactaaaaaaaataaaaaattaaaaaatggataaatcttttctttttgccttttggccctaggatcgtgtttaggaggattatcccaccccgagattatataaatcttatcctatatttctctaacttatatggttttatttagaaaatgttttgtcctgtctggaattatcttgatgtatggatttaggtattctaacttttttgccccaaagggttagccagttgttaacatatttaccttttcccccaacatatgaaatgtcatacatgtatatactttattctgtgtttggattccctttagttccattgaacattgtggcaccagtacaccagcctgtagatgagttagaaatgggactt

SEQ ID NO: 17126 - DNA, 1222 bp, Homo sapiens
atatcagtaaatatccagtgagggttcaaacttccaattgcctcataaatgctacttgttttattatttttaattagtagaatcccgtaaatctcctaagtgtcttcttaatccgtatgtttccctttcatctttctttttttccttgcgattttgtttatgaaatgaggttgtttcacatgtagcatttgccacaatttaagttttgctaattgcatccctatggtaatgtttgctttcctctatcctctgtttctttaatttgctagttatgtctagagacttgatgagattgaaacatggcttttggcatgaatgtttcataggttatgttgtgttcatttagtaggtggcgcataatctgtggttttctctctttttgtggtattagcagctgctgcagataaatgcattaattcatgatgcttctgatatgatgagtcatctttgtagagttactaagcattagcaaaggaggaaatgctatgtaatagaaatattattcaatgccaaaatattttcttaaatagtcatagaactaacaagaaaaaatagatagcaaaaaaatgtgttggctgttctcactgtttatcttcctaacttcttttgatgatggaaggcagttttgtggaaattgccagccaggactttgacatgaaacagacccagggctaaattttggctctgtggtgttggataagtggccttgaataaattagttattaagcttcagttttctagcttttaactgattataacaatgcacacacatacctgacacactgttaaattttcttctcttcctgtttcttatgttaaggaaagatactctgtgttttggcatatgttggtgaatttgtaccatttttatcctctcagtccttccttttataagacaataattggagtagtttaatcttattcatgtgcagataaaagaggtttatgaagtttagggtgaagtaggcaagggaatctgtttactccctcttccctctactgaataattttccctctactgaataattttccctctaagaattgctgtgggtaataccaggagtggggacattgcccacatgcataagagcgtatctctccattcgatcagtttgtcaccatctttgctctgttttgaaagtcaggcttctctgtgactgtgaagcctgctgttccctgaaaatctgataatggagcagtggaggtttttttctttctgtgc

SEQ ID NO: 17127 - DNA, 1267 bp, Homo sapiens
tacatgaatcagataataatggagacattttatataaggtgttagtgagaagtagttctacttttccttttttacagtgtggtcctggtagcaaacactattagttgctttcaactattgtaacccagtattgtttacatgtggatacttggggataacaattattatggcactttaacagtgcactttaatatataccaccttgatatacatctttactgtctttataatttttaagttggttgtacttattcaatgaaaaagcaaaaaatacacataaatttgtaattcaaagaaatagaattttgtgtctaaccatttaacagttctcccttagtattttagaaagattttaagccattttagaaatgtgttgtcattagttaagtcctcttaaatagattattattattttcctatagaaaatgcagaggcctgaggtgaacgcaagggtcataggcatccattaagatacataactatatagatatcttaaaactctgtcacattgtttccttaatcccttagacctatttcctcccatgaaaactatcataagctatgcttttgttatggtctatagaattttcaaaggacaaattttttttttttaggataaagatcttgtgattgtccgtgggctcacatggtttcttttgttcaattttttcaaaagatttctttttcaatactgttgtcccaccatgatagttgacatggcatgtaattacagacagaagtgtgactgtaaacatattagtgtttctgttagtgttggcataagcttgcctttttgtttaaacaatggaacatgatttaattttatctcatttgccttttgtttatcttcagtccttgatttattaacattttgccaattgaaaacacaataaaaaatgccttgcaggaaggtttgattctgggggatcctgatgagcatatttatcatgagtttaaatatgttaatcttgacatttttaccagttatctcattatagtgttacgtaattgaaagccttgaatagtaaaagtgaaacttgttgaaatacgaggatcatctttctctgtggattaaatgcttcatattctcatccaagaaaaataagataaggcattagtataacagggtatttttgactgttccttgattccacataaagcaatgattaactccctgatgggaatattcataatcccttggtaattattggtatcaaacagatccacttgataacttcatgatgatataaactaaactaaatgcaac

SEQ ID NO: 17128 - DNA, 1192 bp, Homo sapiens
ggctttgacacccagcagtaagctaacagtggacacagatactctgactccttcgagcaccctttgtgaaaacagtgtctcagaactactgacaccagccaaagcggagtggagcgtacatcctaactctgacttctttggacaggagggagaaacccagtttggattccccaatgcagcaggaaaccatggttctcagaaagaaagaaatcttatcactgtgactggcagctcatttttggtatgaagcaactctattcattccttgccatgtggctaacttttattacagtcaattttgaggatattctggactaaatatttaagtgcagtcatttctttttggtttgcaaaaagagcacagccctggactatgagtttggagatctaaattctgatcttgagtctggaactgacaagttgtgtgaccctcagcaagtcacttaacctatctgagccttaatttccttatttataaattgtggtggtttgaacacattgctcataaggtcttttcagttttgttttgttttgttttgtgattttgtgctttttcttgaaaattttcgggcattttgcaattattattgtttgtacttgtaatcagaagcggtttgagccctgtagcactaaataatgaaagattgaggaactggtgttttacattaaaaatttaatggaaattttacacagtacgaaaatctaatgatagagctcaaaaaaaaagagctaaaaataggagttggttcttcttagctgtttatccttctaaccttttttttaaatgatgaaggtatgtttttgttgtggaaaatacaagggcttttgttatcactcagacccagagtgaaatgtttgctttgtggttttgaataagttggcctttaataagttatttagtctctcttagcctcagttttctatctgtaaaatggtcatagcaatgtgaacatatgtgttacatcctagacttatttttctaccccagtaggttgtattgaaaggaaaatgttatatgtgtttcagcatgttttggtgaatcttcattccctttcctgccccttgttttccctcctcaaaggggagaaattagcacaaattagtatcaggattgtgcaggaaataaacatttgtgaaggttaagaaagaggaaaaggaagttatttcttcaacagattaaggatttttctac

SEQ ID NO: 17129 - DNA, 1129 bp, Homo sapiens
agatgacaatgatgcttgcactatcaggaatttaccatctcgttgaggaaacccttgcataggacttcctaggagctcagttgattgtgacattttcccagaagagaggctttggggaactccttcacccctcttgctgctttgggggaatctcctcccctaccaccattccccctcccctgccctgctccagctcacacgtggatggtactttggggaacagtgactttcagggtgatggcttgctggcctgatccctgactttccaatcctatagtcactccaaagaagaaaatccacatggtatgtatatgtgtgagggttgggtctattgagaggtgggactttaattattgttattattattggtgcttatttttcctgctgtatatgggggtgggggtgggggggaataaaacaggaatgtatatttaggtcatgttaaataaaatggctggaggaaggagggaagaaattaggaactgcagtacatcatcaccccaggtgtaagagttatttctctcccagtgcagaaaggggagtgtggcccctggctgtacctgagcttcctcttctccatccctgagacatcacagaatcacccgggttctgacctctccacttctagctctcactgacatctggatatcttgatgcactgcctgtttgtaacaacatatacttctttgctgaatgctaataaacttctgggttcaagagggaacccctcagtcactaatgtgcattcttgtggtttgttccacagtagtgtgcctgtaacccatggttgttgggattgcccttggagagaaattgagaaaccaaggaggtggtgggtggaggtggagtagggagaaccagcaggggaaacagaagccagggctgaaattgaaagtagaggaaattgcagtttttcatccaagccatgccttatatcccagtcagatgccatattggcaaactctctatcacaccttctatgccttaagacctgccccttaagtccctgtgcactgccaggggctggctagcacttctaaaattagcctcaatttctgcaagtatgtggcctccctaccagccaggagacaaatgtgtgtacctcctgctgatggctcaatcaaaaggt

SEQ ID NO: 17130 - DNA, 2976 bp, Homo sapiens
acaggctaaacctttagtgccccctgcccctttcccccaatgaatgatgaaccactgattagcagccaagtctgcattgcctcccgcttggggaagtggggcttatttgctattagcaatgtgaaattatggtacagatcctccccacccctattccttttggcctggcatagctgccatcattatatcagatgactataagctattcatcccagctagctgtccttagagaggatcaagtagcgtgtgtctcacagcctatcgctgtggactttggcatcatgaccagatgggggccttttaactgtcctgccatagcttgggttaaagacaaaaatgctaatccccttgatggagtgataaaattcatccatttgcaaacagaagacaaaacaaggttctgttgtggacactgccatagagtgttgagctccggaatgataggattttttttccttcttttaagcttgtgactacctgagttgcagatgcttttgaatttttgttcttttttcctctaaaggaaattttcataatctcatcacaaggaacacggtcttttaattgagataagggaagagaagcaacctaaattaggcttgactataggggctggggtttttgtggagtgtaggggaaagatagaaaatgagggtccatttatcacagccagcaagaaaggggatttcagaccatgcagagcttaaggtatctcagtttcttaaaagggaaaactcccttctcaagcctcccaacacaaaatgttccttaagccttgcccatcccatcatttggactctgtaataaggccccaggtttgcactcccaagacaggataccaaaggcatctcagctgctgttctgggccctttaaagagcttttatcttccaattagccgagtccttagcatcatcaaatgacagggcttcttggcagttgcagccctttatggaatgaatggcaccctcccttctcctgcatccatgcagttttcatgttaaactaggttggaaatactggtggggaagagcttgctgtcaggaagacattggaacaggctaatcttgccaagctcaacctctcattaatcacctgtaggagagggttccttttacatgtctttattggaaatggcatatggaacattttttgcttggctgtgttcactcaaattatgattattgcaccctcgccctcacatcccaccatctccatgcctgttgagagaagaagtcaacagggttcttgccattcctgagatatggcaatttagcttgggaacagatgctgtttgccccctaagtcaaggtgactttgtgggcaaactgtttcttggccaggggatgtgtccatgctggtctttgtcaccatttctcagattggggttggcccagtgcccttactcacaaatagcagacctggctggtagaagctgcacccctggaagcaccacatgaatttgcatggcactaacaccaccactcaagggacccagaccagctcttcaggctgactttggctacagatacattgtgaagaaatgtatctgttgtggagctggagaatgaaagagggtgaggaaggccctccttaccccaagcacagcattccaagagagaagtgcccaaattccaactttctggcctcttaccaaagctgctctgggatggtggggctgaaattggcctggctatttggcaggaagtaaacactcaccaaatgcctttacaacagggaagaacccacctcttgcctcttctttcagggcagcttgagctcctgtctacatgtggactgtgccagccacagcaggcggtagagccatcaccagcctccagaccctgctggagaagggccaccagcctatctgggaagagaaaaaggaggtggccaacctttggctaagggctgagagctgccctcaggatcaggaaggcagcatgaggcattgtctctgaggggcactggcatagccctgacacactttgttgggctttggaaggtcacacaccacagagtagggcctggggctgagtgagagttcatggtttggacagccttgctgcctgcaagtcccttcactgccctagccagcccaggaataggatccttaccacctgaagtggggcagccaggatatgtggctgcagaagcaggttcctttgaatttctagagctaagcagtttgtggctgaaacccaatggcagcctaggggaggaaggaagacctgtctggggacccatggtgttgacagcacagggtgacattgggagagccagccaagcttcaggcctgtttccaaacacagactagtgctggcttgggtggcagcaaatacaccccagaccactaaaactgttgatatcatgtccacacctccaagagtactactagatgaacaacatgtctccattgcaaggtcctggaataatgcttttggatgtgattttaagggaaaatgggacttagtggaagtagctgccttcatcttattacccaataggcctagtgccagacagctgtgatcctgagaattcccagatgagactggtccttggaggaccagtgaatgtggatagagaaggccacctagtaggcctctcccagggccaggatgccagtttcttggtgctttagagtctccaaggaagcactgccttggggcccagttcaagccagccctacctatctggcctcagcttgggtaccaggccacaagactgcccggataatgggttcagtaaacaccagtctctctccctccttagtcctatgccaagaagggaagtagcttcacacactcaggaggctgggtgtgtacccttcatcctgctgccagcagctttccttacctgtgccagtgccaccaccccacctgccctcagcccccaggcccagttgctagagggaggcatggggtttagcagggagacttcaagtttacccatgtgtatgttgcattcaagttgttttt

SEQ ID NO: 17131 - DNA, 1181 bp, Homo sapiens
cagtggtcccctgagcttaggatggtctgaagggagtggacccagcaagaaggtaggggatgaaggcttcttgttgctcagtgtagagttttgcttccttggggcccagagagagctggcccagcaagccaagcatatcgagtggattaagatttgccccacattttccatcattttctttcttgttccactcaagcctgacgtccggtgaaagcaaacccagcctggatgcttgctcactagtatctgtctctctgtctttgtctctcctatctcctccagaccccactgtgatgcttcctgactgataatgttataacagtgcctggaagcctgaggctgcatttccagctggacgtacctcagttgtccccatcatcatggagacccaaaaggatgaagctgctcaggccaagggagctgcagcctctgggagtacccgtgaacaaacagcagaaaaaggagccaagaacaaggcagctgaggcgacagaaggaccaacctcagagccatcctcatccggcccaggtaggctgaagaaaactgccatgaaactctttggtggcaagaagggtatctgtactctgcctagtttctttggagggggacggagcaaaggttctgggaaaggcagctccaagaaaggtctcagcaagagcaagacccacgatggcctgagtgaagcagcccatggccctgaagatgttgtcagtgaaggaactggcttctccctgcctttgcctgagttaccctgccaatttcccagctctcagagtgcccatggggctttggagacaggctccagatgtaagacatctgtggctggagccacagagaaagctgtggctgagaagtttccctctatgcccaagccaaagaaaggcctaaaaggcttttttagcagtatccgccgtcaccggaagagcaaggtcactggggctgagcaaagtgagccaggggccaaggggcctgagagggtcagagccaggcctcatgagcacgtgagctcagcccctcaggtgccctgctttgaggagaccttccaagcccctagaaaggaaaatgctaacccccaagatgcccctgggccaaaagtttctccaacaccagaaccttctccaccagctactgagaaaatggcctgtaaagatccagaaaaacccatggaggcctgtgcctca

SEQ ID NO: 17132 - DNA, 1430 bp, Homo sapiens
tctgaactgggttatgtccttccttcccatcttccatggcatccaagaatacttgagtctactcactgattattgctctcttctgatgggaaatcactttgctttctgggcccctggggaatcagaagtctaagttgttgcctggaagaatctgactactaactttctttttcctgtgtccctcaccaggcctgcttgtcatgtcaccagcaaattcaccggaatgcacctatatgccctctttgcaaggccaagagtcggtcccggaaccccaaaaagccgaaacggaagcaggatgaataaagaaagggagagcacatgaagctttgctaattataacccctcaccttgaccagagtcattgatgtcctgatgtgaaacaacccttgcccaaccccacgaagtctcctatttaatgtgatggaagcacaacccctctctcactttgctcctatttctttctgctcttgggatttctggtttaggaagagatgtggttcaggtgctaaacagtgtgtctgatgatcccttctctcccactcacatttcaacccctgcccttgtttggagctaagggaagggcaaaaggctcagatatgattctctatctcttgtgcctgaggcctggagcctaaggagctgtagggtctgaggggcaggggaggcccatatcttgtttcaggtaaaggacccagtatttcccctccttgtacttttgccttaggttctcaagggacaatagtcttcatgttggattctccaacaggctgggtgcatgtatccccctactcctaccctcatctcatccttaaggcccagaggtagcttggacaagccctccttttcataatcatttgggaggcatggctgtaattctttagctttctccacttctgtctcccacatatactaaaattcttaggtactaggctgtgtgtcttgggatcttaagatcaatgaacctttccccaatatctagtctttgcaaattctagtagaagatttccacagtgaaatcagtgagccagaccaactctacatctcctgcctaacctactgcctaagtcattagggctgagggctcggctgtaggggcttccttaggctgagagtgcccccaggctgacatctgtgttggcttttgttcagaaccattactctggcacatgctcaatggtatattgcagggaggagaggagtagatttagatttgagtaaatgccaatcactttacacatgaaggtgggtgggactttccttccattcatcccttgctctcttggatctgaactcttctggagcctcagctcaggatagctgctggccactcctgtcctgtggattgtgcaggtggcctttcctcccaaaagaaaaggcatcaggctccccaagccccacagctctcctttccaccaaagccaggtttcctg

SEQ ID NO: 17133 - DNA, 1151 bp, Homo sapiens
aaccttgtttataatctagtaggtcttggaggttgggcctgttggtttttctgaaagccattaggactcagttcattgctctgtagccaaaggccatcctttcatttctgagcagtattcttataaacatagagtgttggtcctaagaggatctaggagagagtgtacctgactccatgaggtccatccctactgttagcccctaaagtcagcacaaactcctgacacattactgctatgcttagggaccacagcacatcatttgatttgtggatgaaggtacaaaggaaggtgttccccttgttgtttttgatcatccattcttgtagctctcttacctttcaggcaattccttgtgtctagtttaacaccttcttgctataatttcggtctgcttccagtgtgacctcaattggctgactctacatcctctttgcatcagccccttagaaagctaaatgggcttcccttctctcctgcacagggactttgtgctttaaactactcatcacccattgtctttccagagtcctggaacagcacaaactcaacaaggaccagtgggaggagcggatccaggtgtggcatgaggaacaccgtggcatgctcaggtaagcttgcccaagcagtggtgggccccacttcccttacagggtgaatgagaatgcgttctagggagaagagactgatgacaagggacattggtggatgttggagaaagagggaacagggacgatagaaggcaaactaggaccattataaggctgttttttgtttgcttgtttgtttgttttgctgaatgctggtaactggtagcccaaacagttttgactatcaagaaatggagggagctcttacacatggcaaagcatttttgagggttgtgtagttgaaggacaaatatcatcattttgccatcaccacattctgagccctgctaagaatgtgcctttataagaggctgtcacaatgaatgagagaaagaaaattgcttctatggcagccaacatgccagaggccagcaagggtcagcccatctttattccccttgggagcttagaccctaggtttttgttaggagattttgctttgcaaaagtcatgctgtgctctgttctccatcatctgcttgccttttgtcccctttcccac

SEQ ID NO: 17134 - DNA, 1133 bp, Homo sapiens
gacaagggtatagaggtaagggagggtggcccaaactcacaatccctaagtgtgttgggaaggttgggttgagagacccagaggcagcaagccttggaattccccaggcttttttttttttttttagatggagtcttgctcttttgcccacgctggagtgcagtggcgcaatctcagctcactgcaacctccgcctcctgtcttcaagcaattctcctgcctcagcctcctgagtagctaggactacaggcgcatgccactatgcccagccaattttttttgtatttttagtagagacggggtttcactgtgttagccaggatggtctcgatctcctgacctcgtgatctgcccacctcggcctcccaaagtgctgggattacaggtgtgagccaccgcgcctggcctccccaggcttttgtggagcgttgttatcctgttctatccattttatctccttccctagtgctatgctggaaaatgagaagaagaagcgtgaaatggcagagaaggagaaagagaagattgaacgggagaaggaggagctgatggagaggctgaagcagatcgaggaacagactaagaaggctcagcaaggtgaggcttggagtcaccttggagattggatttttccaggcctaactctgagctggagaaccttctgcctgagctgtagactcagacaatgtagttcaggtgtggctacagactagaagaagaatgggcaagaagagagctcagaactttctgccagctttgtcttggggtggatcatttccaggaacgaagctattgtgtcgtctttatctctgtgctcttcactgccttctcccctccttttctgctcagaactggaagaacagacccgtagggctctggaacttgagcaggaacggaagcgtgcccagagcgaggctgaaaagctggccaaggagcgtcaagaagctgaagaggccaaggaggccttgctgcaggcctcccgggaccagaaaaagactcaggaacagctggtaaagctgtagggtgggctgggattatgggaactgaactttcttccttgtctgcctacttacttatagctacttttgcttacatgctggctttttagagcaggctaccactccatgggcctc

SEQ ID NO: 17135 - DNA, 2063 bp, Homo sapiens
ggtctagggaatgagacaggacctaggatatcttctccaggatgtcaactgacctaaaatttgccctcccatcccgtttagagttatttaggctttgtaacgattgggggataaaaagatgttcagtcatttttgtttctacctcccagatcggatctgttgcaaactcagcctcaataagccttgtcgttgactttagggactcaatttctccccagggtggatgggggaaatggtgccttcaagaccttcaccaaacatactagaagggcattggccattctattgtggcaaggctgagtagaagatcctaccccaattccttgtaggagtataggccggtctaaagtgagctctatgggcagatctaccccttacttattattccagatctgcagtcacttcgtgggatctgcccctccctgcttcaatacccaaatcctctccagctataacagtagggatgagtacccaaaagctcagccagccccatcaggactcttgtgaaaagagaggatatgttcacacctagcgtcagtattttccctgctaggggttttaggtctcttcccctctcagagctacttgggccatagctcctgctccacagccatcccagccttggcatctagagcttgatgccagtaggctcaactagggagtgagtgcaaaaagctgagtatggtgagagaagcctgtgccctgatccaagtttactcaaccctctcaggtgaccaaaatccccttctcatcactcccctccaaagaggtgactgggccctgcctctgtttgacaaacctctaacccaggtcttgacaccagctgttctgtcccttggagctgtaaaccagagagctgctggggattctggcctagtcccttccacacccccaccccttgctctcaacccaggagcatccacctccttctctgtctcatgtgtgctcttcttctttctacagtattatgtactctactgatatctaaatattgatttctgccttccttgctaatgcaccattagaagatattagtcttggggcaggatgattttggcctcattactttaccacccccacacctggaaagcatatactatattacaaaatgacattttgccaaaattattaatataagaagctttcagtattagtgatgtcatctgtcactataggtcatacaatccattcttaaagtacttgttatttgtttttattattactgtttgtcttctccccagggttcagtcctcaaggggccatcctgtcccaccatgcagtgcccctagcttagagcctccctcaattccccctggccaccaccccccactctgtgcctgaccttgaggagtcttgtgtgcattgctgtgaattagctcacttggtgatatgtcctatattggctaaattgaaacctggaattgtggggcaatctattaatagctgccttaaagtcagtaacttacccttagggaggctgggggaaaaggttagattttgtattcaggggttttttgtgtactttttgggttttttaaaaattgtttttggaggggtttatgctcaatccatgttctatttcagtgccaataaaatttaggaagacttcacagtgactcaatcgttctttgtggtatgagtgggtagctgtaagatatttcactgcagtttctatttatatattaccttcttatctttggtctcatttcatctatacctcagttctatggagaggggtgatatgactatccccattttatataggagagaatgggctcaaaaaagtataataacttcccaaggtcacaggactgtctaacttaatagtctgtgccctttcggtagttccaggccaacttttctactgtgggtgtggatcctgcattgaccatgtgatgctcctggacttgcctggcattgggacctaagaggtacttatttgtatctcttgatttctcttgggatgctcaggccctgtcctgcctctttgtcaggaaggtcttcaggcttttcctgcctcctactaccctcacatattgtagtgccaataaaggtcagggaaa

SEQ ID NO: 17136 - DNA, 2742 bp, Homo sapiens
ttctccccttttagctcctccacactgtctccctcctcaacacacacacacacacatacacacacatatacatagacacacaaacacacacacacacattaatatctatcttgggggaggcctcgtgccataattcccaagttcatgtctcagactgctgcattgcagcatgaggcagggcaaacactttccctctagatccctggggcctcaccctgtatttgaggttctcaccaccctcagcagggagaagggctgaagttcgccattttggaaccttacagaacatttctgagccaaagtaatcttccttctggggcctgagttccccaaactaccccacagcagtccctcaaagacagccctcaatccatgtagggacatctgagtatgcctctttctattgaaatgtcaattcaatcccagctttctcaccaccgttcccctttgattctttctcaattgtctttttgcctttagctcccacctatacatctcatgctcagagaaaaacaagttccttagaggttgtattctttattctccaagaatctgtctgaaacttgtacagctagttcctgtcccacaactattaagtggtttattaagtacattaggcagaatgtgcacttcatcaccaggttctagctctggcaaaggagtgctgtctacagcaagatttttgcttttagaattttattaactacatcttttgggttcatccatctacaaacactgattaagggcccctggggcaaccaattgatcagattactaaaaggacttgggaaaaagcaaaaaggtcccattgtactggactgaggattagaagcaattgaaatacaagcctgtaccaagcaagcagcctggccccacacaggtattagcaaatatgtggtaaccaaggttttaggccttggcctttaggtttcctgttttttttttgtttttgtttttgtttttgtttttctgcaacaggttattcttatctcactggctttcactgatcatgtttagaccttctggtagaagaaataatatccagacaggggatgatttggcttcagcaggctgcaggtgttcaaaggttgccatgtggctggcagtggttcaagcccacatttgacactgctgctctagaggaaagataatgatggtaacacagtaataataataataataacaaaaatatgataaagtgaaagagtaagacttcttcagtgtgcttgctcatggcatgaatgctatgtggacagcccaagccatacccagaatcaccttaattccaactttttgaggttcagcaattggaggtggcaattggctttgcattttaaagtatttcgggtaaaggtgaagtgaaggattttcgtctttataatttctgtttggccatggcaaataccatagttgagtatttgcttcaggagagttctttttacagttttacttttcaatgctgaggcatatttctttgagcactgtgcttttatgtgtctttctacaaaggggttattggtcagtggaagaacaaagtacacttgataaaaacattttcaacatacattgagcctaaacagcagttaagttgtctctaaatgaactagcaaaaaaaaaaaatgtagtttttgtttgtaaggaaggggaggtatttcctgagaatgaatttttttttttttggattactgtttttctctccatataccttgacttggattttgacaggagggagcctgggaaaataattttttcctccaagattctcagatccaggttaggaaaggattcagcactacagcatacccctctacaacatacagccctgtcacattgagatcataatccctcctgtcccactcctctctaccaaccccaccctactagctaggtcttcagtgttttacattgaatattggtacattttaattattttttctcataaatgggttatttatagaaattttgttaactcttgagccatatgcatgtgtagatactggcagggctatgtttgtttatgatgctctgcaaacatttcatattggccaataaacagaaatatatccaaaaaccttgtttattcctctactttcagagaacctggtgaatcattttgctcatgtgtcttttcttagtgagcacagcaaaaaaatgtgtttctgatcattggacatggcatcagtagtgatgggattcactgacttgtcacacaggagatctgggttatagttcaagctctctttctttttctaaaattgtttatgccatttatattctcctctgagataaggatctactagaaattgttgtgttctaaactaatacttatcaaacagggttccatggtcctaagggaaccgtgcactgcacatcttctgaggtctgcaaaatctttaggaatttcagtgtgtgtgtgtgttttcattttgatcataatgtcttaaaatacaagcatattctagctagacctgttaagagtactgccttgccatttcaaggtctgtatttgtgttgataatcttaccaggttaaagagaccacctaaagagaaactatttaattttgaatgctatactttactataatttaatttaagagataggaaaatcaagtttccttccatctttaatattctgtaatctttacaacaatacatgttggcaaggatgtggagaaatgagaagcctcatgtattgctggtagaattataaaatggtatagcctcttttcaaaacagtctga

SEQ ID NO: 17137 - DNA, 1240 bp, Homo sapiens
gaactgagacacagagagggaaagttagtttctcaaagtcacagggcaaattagtgggctagaactgtgcaagaacccaggtttgggggctacattttagagttggttcaactccaccattgcaaccatttgatagccaatgttactttctcaaagcttatgtagcatgaggtaggagagtaggtagattcccagttttcaactaaccaaatatcttgcagtgcccacttccgtatttcttcagttaatacattttcagttctcccaatgacttccctgctccctgcatccaacctaagaaaacgtgaacaaatgtatatttgaaagtcataactgatatcaaatttgaaagttataactgatgtcaaatcaatcaacttaggtaccttcaaggttatctagtccagttcttcttccaaggtttgggtccattttataatatccccactaagagtttgtgtagtccttgctcacatactttaggtggcagagggctgactacttctcaatgtatattacagtatacacaattgtgactggtgggtttgagctcaatgtaagaaagagctttccctgtagtacccgcctatccatcctggctctgttcctcgtgccagacagacctcatcagtttcctctgctttaagatagccctgcagaggcttgaagacaacaccacctctctggagaataccactttaggttcttctaaagtatgtggagcttagaactaaacctatcttcaggataaatggtttcaacaatgtagaatagggtagaattgtcatatccctatctaggtaatgtctttctgctattacatcctcaaccattggcttaacctatgatatttggaggggtagagaaagaagggtgctagtgagatttccccacatgtttctaacttggtttgctctctccttaggtctcttgggcccctggcagccttgcccagttgttctctctggactctgttcctataccacaacagcagcaggggcctgaaatgtgatgtccacaagagctaataccctacagatggggcatatcctatcccatcccaccagaggattgattctccatttcacaaggactgatctggagcatttcttgcttcccttttgtagtctggggagccagattccacattcatgggactaccagacatgttcctagctcaacttgattatagagaagaggagagaggacagtgaatggggtagggttttcatgtctgcat

SEQ ID NO: 17138 - DNA, 1259 bp, Homo sapiens
ttgaaataagtcctcggcctcggctctctgaaaaactatgttgcagaatgcctttatctctgaggatcaccagtataactaaacttttagtgtaattctgtgttctagatgatgccaagctcatgaatgtttagtaaatgttaatagttgtgacaatattactgtattaaacattcctttttgttttgtcttgttttgtttagcctccacagctttccttgctgatagccagcctccaaaccgcagagccctagctgtttatcctgttttcctgttttactttgtcatcagttggatgattctcacctttactcctcagtaaatcaggaatgggaaattaaaaaccagtgaattgaaagcacatctgaaagatgcaattcaccatggagctttgtctctggcccttatttgtctaattttggaggtatttgataactgagtaggtgaggagattaaaagggagccatatagcactgtcaccccttatttgaggaactgatgtttgaaaggctgttcttttctctcttaatgtcatttctttaaaaatacatgtgcatactacacacagtatataatgcctccttaaggcatgatggagtcaccgtggtccatttgggtgacaaccagtgacttgggaagcacatagatacatcttacaagttgaatagagttgataactattttcagttttgagaataccagttcaggtgcagctcttaaacacattgccttatgactattagaatatgcctctcttttcataaataaaaatacatggtctatatccattttcttttatttctctctcttaagcttaaaaaggcaatgagagaggttaggagtgggttcatacacggagaatgagaaaacatgcattaaccaatattcagattttgatcaggggaaattctacacttgttgcaaaaaaaaaaaaaaaaaaagcaaagggcctctaaagaatcagcctctttggtccctttgtgctgtcacctttttgccatgtttaacagcatcttggttggcactctagtcttaatcttgctccttaactttgaatatgcagtctaaaatgtcagtagtcaacatgtaattttcctttgaaattctgaatattccagtgctggaacttatccaaaaagaagacctcagaaacttagattggtagatctctagtgcatattatcatgtgggcaccttctcttagggtggaatgaggcagtctggatgcagcatagttaaaaggagctgtttaatattct

SEQ ID NO: 17139 - DNA, 1153 bp, Homo sapiens
ctacgaaatatttcgcttttattattttcacatcattctagtatatggactttggaaacaaaagacattgttctatttatagcattcttttttttttttagtagcggtatttccatttacaaaatatagtaactcttgattactgaaaatgtcaaatcctagaaaacgtagcatgcctatacatgatgttaacatcattctcgaacagttgttggccgaagattcatttgatgaatccaatttttttgaaatagacaattctgatgttctctttagaaataactcagtttttatcttttttcacattgaaaatcagttagatttgcttaagcctcaaagagaatgtttatgtaaattagcgctggcaatttttttttttctaaacaggaaaagggttaaatgaaggttgataaaatggatgttcaattgtctttctgaaagtgagtggcttgaagggatgaataaatattttcttaatatattcaaaaaagtgcattgctttctgtgatggaagttaagacctaaatgtctggaagttgtaaccctcaacacagcttttcctgatttgctgcaaaggcacatagctgattatagaagtgaagacggcaaggacggggactccaacaaaggaaaccctgttgcaggatttgggaactttcatgcttcagatgaaattcaggcatgtgagcatcactgcagaatgtggtgcatcattgccatcatgagtaatcacttgctgctcctacttctgagaccaagactcttttgtcatattctttagcaataggacgggtaaagactggatttaattgctgttcagagtataaaaactcaattgattccaacatatctgaatgtgcagtaaagtcttaaaagtcaaccgttaatcattaagtcttttgcctctaaagtcttttgcctctgaagaggtttattacatgagttgattttcatattttcattttggtggggttttcctgttgttgggcaaggtggggtcacaggacatgggactagtaagcattttactgtttactatatttgtctttttataaacagtatctcccaaaatgtgattagaaggctaccaagcctgtatttggacatttaattgtgtgctttatataatgtaactactaacagtatttggact

SEQ ID NO: 17140 - DNA, 1146 bp, Homo sapiens
gcactattctatttttttaagaatttttaaaataacagctttattgaaatacactttaccataaacttcacctttttattttttatttttatgagacagggactcacccaggctggagtgcagtggagcagtcatggcacactgtagcctcgacctccctgggctcaagcaatcctcccacttcagtgtcccgagtagttgggactacaggcatgcgtcactacacctaattggctaatttttgtagtttttgtagagatagggtttcgccatgttgcctaggctggtcttgaattcctgggctcaagcgatccacctgctttggcctcccaaaacagtgggattgcaggcgtgagccaccatgcctggctgaaattcaccttttaagatgtacaattcagtggtttttagtatattcacacacaaaattgcacaactatcactaacatctaattttagatcattttgtaacttcaccaagaaaccccaggtctgtcagcagtcagttccattcccccttcatcccagcctctggcaaccactaatctgctttctgtcactattgatttggccagacactattcttctgtgcttctcatgcatctcctgtaataccagtgctacaattctcattttatgtggaaaattgaggcactgagaggttaagtaaattgcccacggtcacacagtaatttgatttacaacagtaataacacattagatgagaacacagtaggacacaattttgaattccatttttatgtacctgaaatgaatacacccctcccccaaggtattttccctattgttagcctttgtaccctaggtacaaatataggtattttccctattgtgttatgtacctgaaatgaatacacccttcccccaaggtattttccctattgttagcctttgtaccctagaactgactggatgtagataacatttgttttcagagtaatggaacactgtatcagcagcatctgagaacataagaacagttggacattggaaagaggtttgttgccctcatccctccttgaacctcttttctctcccgcttccaccaccaccacacatatatacccctttttctcagtcttaagcatcaaacaatttctgcctctttctttttaattctcccag

SEQ ID NO: 17141 - DNA, 1349 bp, Homo sapiens
tgcggcttgggccgctctcggctcacacacatctgccgggctgacctcaggtatcaggcctgggacagcctgctcgacccccttggccttgaccccctcccctgcctctgcccctactttctgccccatgctattgatccctggggctggggacaagtcctttcttccttctccctggtgagggctctggggaaaaatccattgctcatgcctggtttcttctgcttccctaggggccgttctcctgactggtacaacaaagtctttggacacctgtgtgccatggaagtggcaaagatccgggactccttccccaccctgcaggcagcgggccctgagacaaagctgtgagccttgggctggtcccagggtggcaccacccaggccccctgggcaccaagggagcgagggggaataagagcagggcagccccctgggtgccgctgtcaggagcagagccaggcccaggtggctccagctgcctgtcctgtcccctttcctaaagctcctctgcacatagaggggagaaaaagagaatttaggcaactccactcccccttcacccccaaccctgtattctactctcccgaaaagagaagagaatcgcatgagtagcaagactgctgccaccagccacctgcttgtgaggccgccacttggcatgaagcctccacagctccccgcctgcaggggcaaagaggtcgacagcaatgtgtgatcccagctctctgccagactgagagggcaagccgtcttgtttgctgcaaggatgcttttgaggttggacaggaggttctggtcctgcctttggggccaacgctggctctgaagtgtctttttcagaggaattggactggagtgaatgggcacaggggtggagcgcagggcagccccagtcaccacgagctgtttcatttgtgtaaatacgatgctgaattttatgaggctgagttaagagtgggcactgacgggcccctaatatgtgacatgacgatttggcatagatagggatgtgagagtggagtaccttcctttctcaagtctcgagatgccagtgaaaccagtattccctgacttgggtttcacactttatcgaccaccccatggggtcctgtgtagcctttggccacgcactgacactgcccaggccaagcaaaagcagagtgtggttaagagacaagggtctatgtcatcatcccttttgcttatggtagtgggctaacataacagcccctttctcaagcagagacctggcccctgggccagccagatggaagggcctatcttagccagctggagcttaagccaaacctgttctgtcccactggccagccatctttgctcacatg

SEQ ID NO: 17142 - DNA, 1182 bp, Homo sapiens
aggacggacatttacaggtacagtaatagacagtggagatggtgtcactcatgtcattgctatggctgaagggtatttgattgccaactgtattaaacacattccaatcccaggacgaaatataacatattttattccgcaactgctgagagaccaagaagtaggaatccctcaaaaacaatccctggaaactgctaagacaataaaggagcactatagttatgtctgcccagatttagtaaaggaatttaacaagtatgacacagatgggtcaaaatggattaagcagtataccagaatcaatgctatctcaaagaaagaattttccattggtgttgtttctgagagacttttgggatttgaaatctttttttcatctagagtttgccaatccagactttacataacctatctcagaaattgtaggtgaagtaattcagaattgtcctattgatgtcagacggcctctctataagaatatggtcctctctgtaggttcaaccatgttcagtgactttggatatcacttgcaaagagatttgaaaagaactgtatgtagatgcctggctgaaattaagtaaggaattgagtggcagtagattgaagccaaaatctattgatgtacaagtcgttacacaccatatgcagccatatgcagtttggtttggaggatcaatgctggcttccacgccggagttctaccaagtatgccacactaaaaatcattatgaagaaattggacctagcatttgccgtcacaatccggtgtttggagtcatgtcataaaaatgacttcatagttattggggttagggaggtggagaagagataatctttttcattatgttttgtctggatggctggttttgaggttttaaacctgacttgaaatagtaagaccaaacgtgattatacagaaatattttaataagtgtatcaacatgcaaatgtagaagagaaagaaagtgattgtattttttttagattgaatatttgaatcgtatgtgtaacaaaagaagtgggttttagttccttctgtgccctggtattttgtatgttaatgaattatccaagatttgatggatttatcagtgtgtagatagctctataattatttaattgtatacttctaagtgtgcaatgcaagagcttgtttatatttcatactttttgtactttgag

SEQ ID NO: 17143 - DNA, 1270 bp, Homo sapiens
tggaccggacctctcctttcgcccccacaccccctccccttgccagctgtgcccacctttgtatttagttttgtagtttcttggcttttataatccccctttttccctgccccctgggcttcggaggggggtgcttgtgcccctaacccccatgctcttgtgccttccccctctggccaggcctctgggctccgtgggggcgccccttcttggaaggcagggctggacactgatggacagcaggcagggagacagtcccctggccctgcccctccctcgccccccttgccaccttcccaggactgcttgtccgctatcatcactgtttttaatgcttttgtgttcattttttagctgtcaactcattttcatctgttttttgaagaaaaatggaaaaatgtaaaaggcagcccctccccaggctttgtgagcctggcccaagccagtacaagagggcctggggcacgatgtggtcagccaggaagcataggatgccatttcttttatagattccttggtatttctggtggggtaaggggcaggccagggctgttcacgcccatgagggaagaggaaagtgccactgggcaaggtgtcccaccctcccctcctgaccctcctacgaggcttatcctggcaatggggtagtcactgccacccttccacacacacacacacacacacacacacaaaaaaaaatcccttccttgtgggattcttgggcatctcctgcctccctcactctcacggtaattaatgtcttaattggctgttgcctggggaacaggagagctgctgcaggcagatgacctcatggggggtggagggaggtgaggtgcccaggtggctatttgccctgcagagctgggagtttcacccccaccccccaccctgttctctccttacctttggcatcctttggcctggtggggaaacagaggcccagggtggagacctaagcgggtataagaccaggtggcctgctccttttctgggccctagcacaggtgggtaacccccacccaacccagctcctgctgctgtcccagtcttgggctggggcctggaaagaggaagaggctgcctggggctgggccagcccgctgtgcactttgaccccagttccttgccagcacggctgctaacagactgccacttgagtgcgccttgcaggcactcccagagcagccatggaaggagctggccctcacaccatccacctccacactgcctcctggccagctgcccaccccagtgccaggtgggagag

SEQ ID NO: 17144 - DNA, 1148 bp, Homo sapiens
gtgggtcaggcctggcccaggtccttatactcccctatcttgtcctagcccaggcctccatgaaggagaacctggtggcattgccccagagctctccagagatgagcctcccctatccccaccctgtccccgtccccagcctaccaaagagtattcacacctttccatccctgactctatgggttactgtcccaattgcgaaacacccatactcctcttcaccctgtagcagggtcttctgctccagtcaccccggcctcttgcaagagaaagtccagggactggcaagaagaccctttgactaaagataatgtgctgtcatatcttggctgagaaactgttgagtcaggctagaggactggacaagagaagaggcattgagagcccccttgggagccattagccttgctctggtctgctgtgtggggttggggagtaggggggatcccacattgcctgggacatctgaatgctgatacgaatggacaggaaagggagccagagctgtatacctgggacaggccagggagcctttagtgccagcagggcctgtgtcctgggatgtgatgctagtgagtgaatgggagggcgggcctggagctgcgtgagagtgaaaccaagaagcggatggggaagggagagctggccttggtcagcttagggatgaatggagaaggaatcattcatgggcctcggctaggtcccagactgattacatgagactggggagtccttccctgccagttttctcatttattacagcctatcccccaaccctacccctgtgccctgcctacacactcccgtttggccctcagcactttgggcctggtcacataccccatccctagagtgctcttttcagctggggaggggaagaggtgctggctcctttccagacatgcttatgtataagtaaaggggcaggtgcttgggctccagagagaccctaggtactgccttctaactcctgcatcctcagaaggggaaaagggactgggaagtaaagggaaaccatatggccccagggaatggacccttggagactcccatcctctcttccccctcaccaagtgcccaggagacccctggctcagaccagcccaaggccttgcccagtggcaggggaaaggggcacctcactccac

SEQ ID NO: 17145 - DNA, 1143 bp, Homo sapiens
gaatgtttattctgtcctaatacaaaacagttttctctctggtcaaggtcaaagcctctcattaatttttagcacttcttatatacttccctcctgatctgatactctagtcagtcactagactctagtctcttggtgccaatgccaagtttctcatgcagtccaggcatttttctttaatcagtatagcttggaggaatccaagagtcccttagagttaggagtatagaatgcctgggggtccttgaattttattagatttccaacttttcacctggtggtctgtagaaccatttctttagatgtggcagatgctccaatgagttaaagagtggtaagtcaatccaaatctccttttcctttgaaccattcttgttactctgatgagcgtatactatatttattcaatacactcatcaaatatttactaagtaaatacagcagtttatatagtacttgaataaacattcaataaggattttttttaatattcccactgcctagaaacagacttggcacctagtagaccctcaataaatatgtcctgttgccctcaaagtgatttacttccagcataaagaggcagacaataaataaagttggttaaatttgataagtggtatgaagaaaaatatagctgagcaacagggagagagagtgatggggtatgctgtaagatgatcaaggaaggtactctgataagggaacatttgggaagagacctgaatgaaatgaagtaagagctatgcaaatgtctggggaaaaaagaagcagaaaattcaaaggctctgaagcagaagaatgtttggtatgttccagaaagatcagtgtggctgggagcagagtaagaagaggaagagggaaggagatgagttaagaaagcaaaatccaatctagagccttgttggccaaggtaaggactctggcttttattctgcatgaaatggaggaccactggaggattttgagcagaggaatgacaggatctgatgtatgttttaacagcattcctctggctgctgtattgaaaataggtgcaggaagaaaggatacaagcaggaagaatctttaggagagtattacaataatccaggcaagagatgatggtggcttagaccaggatggaagcagtgtgggtgggga

SEQ ID NO: 17146 - DNA, 1121 bp, Homo sapiens
ttgcctctgtccgtgccccttccctgggtttgggagccaggactcccagaacctctaagtgctgctgtggagtgaggtgtattggtgttgcagccgcagagaaatgccccagtgttatttattccccagtgactccagggtgacaaggcctgcttgactttccagaatgaccttgagttaacaggacagttgatggagccccagggtttacatgaagcagaaccttctttggttccatgttgactgacttatggcatgactcttcaaccccgaggtccctgttgtcagatctattgtttgttgcactaaaatgaggatccagggcagcaggccagagaaagcaaaggtgcactccagactctgggggtggacatctgaccccaagggggctgctgctcctctcttgggtagggtagtggctggggtggagtgggaagggagcattgcagcctaagaagaaggccagagagggaaaaggcaggtgcttttggcagagaccataagagaaacctgccaaggagcatccttggcagtgggaatgttctttctgctctatactgtggcctgcaggagggttggagtgctcttcccactccagctgacagccacaccgtggcagcttgctgggctttgggaagtttgctgtgctttggaacaatcacagggaatggccacaaacctgcccgcctaagaccctgaatccgtacttgggtcacatgactctcattttatttacagctgtgctccacactcagaaaattccctggggtcaccttctagttgcccccattcccagcctgactagaactcctgtcttctttctccatggagcctacctctgtctgagacaggtgcctaacctgggacctgtggtcatgtgagtctgggatattctttagcttacctgggcacaaacagaattttccatttattaagcagtacaaatgtttttcatccattcctaatcaaattctgtctggggacgaagggttggacgggatgacctccagaagtcccttcaatttctagtacctgtgactcttagccctcaccacagccttctaaattcccaaatcctagactgctcctgggcattagcaaggcagagcctttttacctgg

SEQ ID NO: 17147 - DNA, 1277 bp, Homo sapiens
tgtggaatttgaggtctagagagaaccaataaaagtggtaattgggaactgaaatccttgagagttccggggagaaacccagagatgcctgatttcattcctcgatggtaatacccgtcctctcggctgccaggggctctgtggcaaaaagagtcagacatttctttggaaaacagcgaacagccttagagctcttgtgttcagaagaatcttcctggcacaatgttggagcagcaggcctctgggacccacagaacttgtggcctttatgttctttcacccatcctaggaaccagccaaccatcatgtgtagagcccctactgtgggcaaagtcctcctttcattaccctacagacagcttacaggagccagcctgcttcccacaactactagtgtgactccttatctctttccaccataccttagagactttgatactaccagggtctctcagggatggagggaagacctgaaagagaggactggttctgaggccagaaaggtgtgaggagagaggaggaaaagtcttcctaattgtgcccctaaagagcatcctgataccattctattctccagacatggaggggatgataaaggaaataggatctccactggacccttgattcattctgaaccctccaaaggaactctagagggcgagggatgatgagggaagcaataggtagctggggagccctattgctgctaagtcattggcaaagtgacaaagcaatttactgatgagagaatgtggaaatagatgtgcagtttggaattatgttggtgtgaatttgccagaggaccaatgcttgcatggagaatgggacgaggacatttgtgggcaagcagatgacagaggtttgaaggagaatggcatggcaggagtctctgccagttacttgggcttcaacagccaagctggcacaaaagacagctggcggaggctgctcggctactggttacctggagaagtagtatttgcctatttcccccttcatccatcctgagccaaatttcttttgctgaacaggaaagagctaggaaccctggaggtaaacaaagactttgatccatgtatgagtgtatgtgtttatgtaacttcctgtggatgcaaatagattcagagaaatttagagctaaaaaggcccttagagggaatctagcccaacctacattccaccctgttacttatgtagaaactgaggcccagagagggaagatgacctgccccaagtggtgagcaagcaccaacctccagactcagcagagtgagggg

SEQ ID NO: 17148 - DNA, 1164 bp, Homo sapiens
tgagccagaagagctgcgaaagttttgcccagaagaaaaaaagagttgatcattttttaggctgtttcacaaggcattcctgcatcagtggcaggtaaatgacccctaagattctatgatttttttgaaggtgtagttcccaaaatggaagcatcacaggaagcactgtgttgcgatactaagcacccaccctagtaaaggccagtataatcaaatgactaaggtactcatcttccctaaaggacttgctgagatccggttacttctgtatttttctggcttcagaaggtactcctcagcccctgctgggccctaacttgtcatctgagggaactgcctggtggctaattctggggtatagaatctatatccctgccaaggtggaaattggtatgcttactaccctatcatttgcaaaggtaaaatcttattgaggccttcttttgaaggaatacctcttcatttgtaagttcatgggtaatgcttttctgtggaacagatacaagcagaagaaggagttggagcataggttgtctgcaatgaaatctgctgtggaaagtggtcaagcagatgatgagcgtgttcgtgaatattatcttcttcaccttcagaggtggattgatatcagcttagaagagattgagagcattgaccaggaaataaagatcctgagagaaagagactcttcaagagaggtaagcctggccagagaaatctactgccagagatttgagtattctacaggagatcaaattaagatccttttaagtctccataaaatcactgtttttatcaagatgagtatagaaaggccgaagggtcactaaggtagctttctctttaatttaatgtgttccccagtgctttttaatctgtaacacacttgtagtcatttgtaattttgtggtataccatgggggacagaaatgtctctgaaataaaaattggttttggttgtggaaagctgtggctgctgagggaaggcatagggagttaaacctttaaaatctgtgctaactggccaccacggtggctcatgcctgtaatcccagcactttggaatgccgaggcgggtagatcacttgaggcccggagtttgagaccagcctggccaacatggcgaaaccccctctactaaaaatagccgggtgtggtggtgcgcgt

SEQ ID NO: 17149 - DNA, 2079 bp, Homo sapiens
gcacaggtgcaaaatccatcagagccattgttttcataaaaaccaagcagaagtgaagagaaaagaggaggactgatggaaagacagactctggacagctgcacggcttgtgaagtgagctaaatgcaccacatgatgagatgctcctgggcatttctccctatctgtactgctgtcttgcagctctgaacggtgcaacgtaatggcgacagaaagtatcttatttatatatagatatatatatgtaatttatataaaatatatagaaattattatatatatatattatacactctcatataatatatatatattcacacacatttgggttagaaaatctatggagacttcatcaatggtactatgttattagagaaatgctttaattttcatattccaatcagatggcatcttctatcccagctggttgggaagggattgaagatggtagcaagtgctgcactaagggcactcgcatttggtcattctcttgagagctaggaggggtcagcctgaggccggagaggaagggcttttgcctggggtgagagggtgagagacttgacctgaaagcagctgctgcccctgaggtgcagccagagtcctgtgtgcggacagagagaatggctaatgatgctccgcgtggaattgcctattgttttatgccacctgatgtgtctgcatgagaggtttcctttttgttcctttttaagctgctgttaaaccaaaaccatgttgtgctactgtgtcagccttttcattattgcaaattttacttttactatttaagtgaatgcatagaatccaatttgccaaggttctaaaggcttatgaggtcctgaaggagccaggccttgtgatggagtaggtgacacaggcctggttgtcctgtcagcagaagggaaagcaggggctgggctgagaggaggacacggagggctctgctgaggttccttcctgggttccaccaacagggacagggagtcacttgccttccagttctgtgctgggatggcgggacagcacttggcttgcttggccagctgcgtcatgagtttgatttggtttttttttttttgcagctgcttcatatgctctgctccagcccctccccaacagctggtagcttatggtttcttcaagaggaaagtagactttatgctgtacatttgagctgtagagctaagattcgcttactggtgagctgtgaaaccttgttgctttttcccagagtctgatggcagtgactgtgatcaagggaatcttcaccgccacaagtgcaggcagcaggtgtggttcaggtccccccccaccccactgtgctcctttgaagccaacgtgcctccctcgcctccatactggagggacgacgcaggggagaacagagaagtgcttggccctaggattgaggcacttgtttcctagcccgctgggttagggctggtgcaagcgaggcaatgttgaggatgctttaagcactaccagccgaatccgggaactctgttaacagttgtccaaccagcagaatgaggctaactgtataaagcatgggacccaggatgaggataaggaaaggacagcggctttccctgggcagtacaatggcttgaaggcaaaaagggataaagtgacagccgactgtgactctggtgaggaggggtgagcagggaggttgattctctgatgttaactaagtggcaaagtctcaaccgtgctcagccctccccctcccagggaagagaaacaaagattcaaagtaagcatgatactagtgggtttaccagtgtttcttccaaggagacatatattttttaataaacgatagttgcaatgaactgtggctcagagaccttcttaaagtagttgagaagggagggcgtgggcaaagcagtgggaagaacatcccaaacttttgggggccagagggctctctccttagtgatgatcagctagccgagctgggccgtcctggggatcggtacagctccctggggtggtgacaggccctttgtgaaagttgtgtgcttggtcttccaccccagccccagacactgcttcaaatagcaccaaccagatggg

SEQ ID NO: 17150 - DNA, 1168 bp, Homo sapiens
tgctcacttttaatctgcagcgaggttggtcccctctccctctggggggtctgggggctgtgtctgtttgaagccccgggggaagcccctgggtggagctctgtttaattcccaaatagccacaggccaaggaactgacacattaggtttcaagattcctgggttgagattaggataaaccctatcagtttctggcaagagaaagagacctaatattgattgagcacttactaggcgccagccactctacttcagggggctttcacgtgccatttctgaaattagcccttccaaaaaccttgtaaggtattgtaattcctacttgtttatgaagaaactgaggttagaggtaaagtgacttgcctttgtcccttccatatccccgtcctcatttcccaatagctcctttgcttggtggagggggtcttgtaattcgctttcagagtttagggataatgagccctgtcgaggggtttttgtcttgtttttcaccagatcatcttcttcaattcctgctaggatgccgtggcaagcatttcgcagatttggtcaaaagctggtacgcagacgtacactggagtcaggcatggctgagactcgccttgccagatgcctaagcaccctggatttagtggccctgggtgtgggcagcacattgggtgcaggcgtgtatgtcctagctggcgaggtggccaaagataaagcagggccatccattgtgatctgctttttggtggctgccctgtcttctgtgttggctgggctgtgctatgcggagtttggtgcccgggttccccgttctggttcggcatatctctacagctatgtcactgtgggtgaactctgggccttcaccactggctggaacctcatcctctcctatgtcattggtgagatatggtgggggagggagggaactgcacagccagcaaaggggtttttggtcaggaaatctgggtggaagtattctttatattattcacaggacctcaatctccctaaatgtgcgggtttgctgggggtctgggggggggtgttgaaggtgtggagaaattgctcattctatccatctccgtcctggtttccttaattaagtgaatggttttggttcttaaaaagtaataataggccaggtgcagtggctcacgcctataatcccaacactttg

SEQ ID NO: 17151 - DNA, 1217 bp, Homo sapiens
cctaagcccttgctactttatgggttagctttgcaggtttggtggcttgaggggtgggggcaactcaccactgccaggtaactccctgaagggtgggagtggattatcttctaggctcttacccgcggtagggaagggcatcaacactgtcttccttccattctcctttcccccatcccatttagtgctgccacagggcagaagcacacaaaccaaccacacagtctctgacttctcctaagcactttgagttgttgaatggggctcaggggcaagagtttttgctgccctccccagcgtggtcacagggttattgaactgcctgcacttgtttctcatgcaactccagcattttccccagaagttgaactatggatagcagcttggtatggatttcctaaatcttaacatttgaagcagcttcttgaggctggcaactatcctggtttctgtcttggagggggtggtttgtttgctggggcccaacgtctgtcccaagtggtggggtgagagtaagttaactttggtgccaggtgagaggtgggggctctttgcttagactccctatcatggaaagattggagttttctatgcagggcactgtggaaaaggattgctgattctgactgaccctgatcagagagattaggattgtattttgacataggatttggaacccatctaaatgttgaagttccctgagacagctctccagctgctgagcctgcgccaggggctaagcagcccctaatgagaggctctgctccctttcccacctcgccaatgttgttgttgctgcctttttgatttgtatcctctgttatagacattttttaaaaacgatttcctctttcattgtgcacaagtgctgagagtctgaggccccatttctgctgtgtatatatatcctgactcggggcttttattcagcaaactgttcattcttctgtcagacaatgtcatattcaactctgttcatattaaaccactgtgaagcaagcctctgttttcctgcttaagttgtaaatttagtattctttagtgtctaggatatgctgggtattatgcagaaatcatacagtgtggccagtgtcctgaggtaatgttttgcatttaaatttttttagaaagcagaatcttaacttatcttaatgatatttacctatcctttttgcaactcacaactgactttgtcacagaggtaatgcatctgcttg

SEQ ID NO: 17152 - DNA, 1156 bp, Homo sapiens
ggctggatagggtggggtggatggaaaaagattagagtgaggaattcaaggagataggaatcacggctgtagcgactgaaggaagggagggaggatggaagagggctgggggatggaaagccaaggcgatatatcgctgagctccataactaaactaggttgtgagaagtctgaagagggagggcaggaaggccggctgctttctaatgaggtctccctgggataatggagtaaagcaaagccttgaattaaagggaaggtagattccagaaaaggcagacagtaggcttgtgggagcagaaataagaaagggagtctccttgagaccgagcgctttcctaacttgtgtcggatcagcatctgaaggagagaaatgttttatgcttaagttttcgcagatactacgtgctgtctcgccttgaaacctggcctggccctgggattggtgccttgtcagtcactgctttcattctatgtggatcctttagatttgaagtatccagaatgtttatttcagtatttattgactctcgtttaggtactttgtatatgaatggctttttgccctttctgtcctagattacccttttggattctgaccctggtctgtagttactttaatacatgacatttcagaattgcccaggagtggcttcttccagcatgcatgatagaggactttactctctagtgcttagcccataatgcaaggatggaatgtgcagatagagtacttggtttgcaggatcttttgcccacttgaagtggttataggcaaaacagtttgagaatcattttctagttttccttatgttttcttctcagactaaaaggccagaatattctctgtggacagcatcctgctcaaacagcattgaagaactaaaagagtgtatgtgctttcattgttgaaggagtgaattgaatgagaaattgtggtctcctacttgggctttgaaatcttattgagaaattatgatttccagattccaagtttggcaaagtccaaactgaagaaagaaaagtgaatagcaaaacatgagaaacacttgtctatataagaactatgtgaaatcatgtctttgggggagaatggaatttaggtccttcagaatatgataaaagcaggaaattgtcagtgctggagaacttagtt

SEQ ID NO: 17153 - DNA, 1493 bp, Homo sapiens
caaaacacacacgaagccctgggaagagcagagtaccaggagcttttccagggtgggcatcccccgtgctctctgcagtggattattacacgttatctcccacccgctgtacagagaagtctggagcagaggctgagcagcttgtctgggagcgggaaatgtgtgtggtctcccctcacaccccacccccacccctacttctaccagttttcccccctggattcaactttctttgagtctccaggaatacccctgctgtgttccagcacccttttatcttttatctttttctctttttttgtaaattatttaaagtttttcttaaactttaatgacctgggaaatgaagccccgaaatgaaccctgctgcggtggtggcaccaaatcctaaaccctagatcatcagggtccagcatcctcttagacttgaccgctggccactgacctcccctacagtacctcacgcccctttcctgccatctctgcccctccagaactcgatccgccacaacctgtccctgcacagcaagttcatcaaggttcacaacgaggccaccggcaaaagctcttggtggatgctgaaccctgagggaggcaagagcggcaaagccccccgccgccgggccgcctccatggatagcagcagcaagctgctccggggccgcagtaaagcccccaagaagaaaccatctgtgctgccagctccacccgaaggtgccactccaacgagccctgtcggccactttgccaagtggtcaggcagcccttgctctcgaaaccgtgaagaagccgatatgtggaccaccttccgtccacgaagcagttcaaatgccagcagtgtcagcacccggctgtcccccttgaggccagagtctgaggtgctggcggaggaaataccagcttcagtcagcagttatgcagggggtgtccctcccaccctcaatgaaggtctagagctgttagatgggctcaatctcacctcttcccattccctgctatctcggagtggtctctctggcttctctttgcagcatcctggggttaccggccccttacacacctacagcagctcccttttcagcccagcagaggggcccctgtcagcaggagaagggtgcttctccagctcccaggctctggaggccctgctcacctctgatacgccaccaccccctgctgacgtcctcatgacccaggtagatcccattctgtcccaggctccgactcttctgttgctgggggggcttccttcctccagtaagctggccacgggcgtcggcctgtgtcccaagcccctagaggctccaggccccagcagtctggttcccaccctttctatgatagcaccacctccagtcatggcaagtgcccccatccccaaggctctggggactcctgtgctcacaccccctactgaagctgcaagccaagacagaatgcctcaggatctagatcttgatatgtatatggagaacctggagtgtgacatggat

SEQ ID NO: 17154 - DNA, 1945 bp, Homo sapiens
catattacagtagcatagtttccggatgggacctccaggccccttagctgtgcccagccctgcaaggtagcacagaaaaggtatgtgtatggaagcgggttaggtgccaccatcttctttggtgggaatctggatgatagaatgttggcaagccccaggtaagcctcttaccttgttctctgtttcttcttcccacagatccctgagtcatgcctggaagctttgtcccctgcttcagatgtggagccaggcgtgttcatatctactctttacccttgagccctccccaggaatttgggaccctgctttagagctagggtggggtctggtcacacacaggtgttgaagaaattataaagataaagctgccccatctggggacgatatggggagggagatgggaggggaaaggggagagggtttttctcactgtgccaattagggggtaaggccccctctcaggagccatcatcggctttccccattcctacccacttaggctttgtagcaagatgagcaatgctgttggaaatgtgaagtcaccagtggccttacccctgcctttgggagcaggatttttttgtagagagtcttatctgagctgagccaggctagctggagcctgggatttctatgcagtggccccttaggccagtgatgtgcggtgggtgggctgtttaggggatctggaagggccaaggtctgagcactggagtggctcgccaggccaaatcacccttagaaggctgcagataacagaaaggctttttataaacttttaaagaaatataaacacaaatatagagattttttaaccatggcagggtgctagtggtgggcagaatgcttttttttctttctgaaggctttgtgatagtgacatgatacaaacactacagacaataaatattaggagacacagggaagtggggagaggtggggagtaatagtaaacacagggaagagctcccctacggaccaggtatagagaaaggtctatgcagaaataggttagagtttccctaacaaaaaagctaacccaggtcccctcattccttcaacttgtgcctgggagtgtgtggtgttagggtgcagccacactcttctatgacccagcatgggttagtgctatggtgggagagtacattgaaggcctggaattagcttggggccagggaagggactgggaggggagagaagagaaggagggaaggatttaggatggtaaagttaggtacagagacctccctgttcaaggcccctgacagctgtccctgcccttcttccccttccctgactgcaggggttatgtggaagtgtgtgtggcagcaggcagcggggaggggaggaacagggaagggggagctggggagcttggctgagggtctgggaaatgagcagggatggggggggatgtggatcaggtttactagcacctgccagggaggccatctggggctccttctccaccccagcccccaaagcagcccttcccccagtgccctttgcatcgtcccctcccccacccctgctgtgggttcccatcatttcctgtgtcagcgcctggcctacccagattgtatcatgtgctagattggagtggggaagtgtgtcaaatcaataaatgaataaattcaataaatgcctataaccagctctggtttctgctgccttgcttctccccttggataagggggagggaggggaaaaggcaaagggcgggaggaagaaactgcccaaaggcagagacatggaggagggtgggggaatttcaccccggggaggtggtggagtgtgggggtggagggacacctaacccctgcaggagtaggcgggctgtgagataggcctcccaaggggaggtagtctggtttgagaagaccccaccccctactccgttcctcaaaggctcattgtactagacttcacagccttcctcaccccc

SEQ ID NO: 17155 - DNA, 1099 bp, Homo sapiens
ttcaggtagagagtagggcatgctgtgtggggcattgggttgagcttgaacttgtactctgccagtagagaacagaatctgcctgccaccttgccccagttgtggttctcttcatcttttcatttactttatctgcttcatctctaatagtcccctcttccctcccctggtacccataggatggaatgctggacagacatgagttcctgacctgggtgcttgagtgttttgagaagatccgccctggagaggatgaattgcttaaactgctgctgcctctgcttctccgagtaaggcttggaattttggtactggtggggcagggggagtctaagaagaatttgaggaagaataaaatgttagagcagggtcccctggagagaactaggggctctgatggtcgtgtcttcacagtactctggggaatttgttcagtctgcatacctgtcccgccggcttgcctacttctgtacacggagactggccctgcagctggatggtgtgagcagtcactcatctcatgttatatctgctcagtcaacaagcacgctacccaccacccctgctcctcagcccccaactagcagcacaccctcgactccctttagtgacctgcttatgtgccctcagcaccggcccctggtttttggcctcagctgtatcctacaggtaggtactaggcgggcccaaggaagcattgagagatagcctgagaagaatcaggtgcccatcccagagaataggggtaattccaaattggatgtgggagtaggtgctgagtacttgcttggaggttgttgtttcttggtaatggggtgttagtcccctttgggggttttcaccagcctctctctcccttccaaggctaaatagtgggcccaaagccttttaggaaagtgagtgaagggaggggatcggggtggagtgatgcctgtcttggggacccagtcagaataactttggatctggaatctacgggttgggtcttagaatgggattccagaggggtaaccatggtgaatgagttggacttagctgtttctatctggtagaccatcctcctgtgctgtcctagtgccttggtttggcactactcact

SEQ ID NO: 17156 - DNA, 1985 bp, Homo sapiens
tctccatcttgatgagactgtaatttgtgtcgtgacgccttctccctgtgccctgaactgtgctcttggatgtggctcatggagcctgtgttcttaatgagtctgaatcatttccctcccctatagacacgggtcctggaaaacggaagagagaagatgaagcccctatcttagagcagcgtgagaaccgcatgaatcccctccgctgccctgtcaagttctatgaattctatctctcaaaatggtgagttggtgggttggcaggaaaagcgttagcatggggacccgagggatctactttgccttggtactgatcttctgtcctgccacccccactcccactcccacccccgatgttgcagtcctgaaagcctccggactcgcaacgatgtgttctacctgcaacctgaacggtcctgcatcgccgagtcacctctctggtattctgtgatccccatggaccgcagcatgttggagagcatgctcaatcgcatcctggctgtgcgcgagatttatgaggaactgggtcgtcctggggaggaagacctggactgagctcgtgtgccatccatatccatctttcacatcaatgtctgtcctgtggccatgtccctcagggtgacaggcccaggaaccaatgctactcattctgaagggccctgactgctcctttccgctcacccattccctgccttctctaggaaccctggcttttatcttcttccgtaccacttgacaaccatggggccctggtcttctgtactcaggggctggtctcccagtgatgggcaaaagccagcttgcccgttttctttatgcttcagagtaaacccctccttctgggtccagactctgggtggagtgttaatagctctggtgatcctgttggctttgggtttcctgacccatcccgcataggtagagcctcttgttcctaggcatgacctagggaaaaacccagctgccttctctgccctgtgcccactcccttctctactcttccccagcaccatgccaaaaggtcttatctgaaaggtaagaaataaacaatgaaagcgatgaggggaccatttacataaaacacagagcttagacactcttcccctcctatgaaataattggttgttggcaccatctcaccaccgcatatccctcaccccctcggcaagcaccaatccttggtgctgccgtttttaaaatcttccaaatgcctttttttcctcagaggcagagaatgactaagtacggggagcagactcctgttgtgcagactcctgtccccttggtttctgtgtttgtctctctgccatcttaggttgccatgagccatggtgtcaacatgcttagccccctctgtaactgcctccctttagttcaatggacagacctcccaaggcaaaaactaccttctgacttgggttgaggctgggttcccctctattgttcccctatcataagagctaggccaagcctatgggaccttgagtcatgcaggatgggatctgtggtcaaaggacaggcgaggagctgtgggcgcagggcctgccgccactgcctacatcttctctcttccccatcttgcattggaggtcccagaaaacaattagcttctggcaaagggggtacccacttctttccctgttgactttgctgtttcccaggctcctttttgtgtttttataactgtcaccagttagccactgtttaaattgtatatattgttctgaggcgcctggcctgtcccttcagtgagccatgcccacccttgtgttgtagtgagaagctgttgtcacgactaaccttctgtctctgaaattgtttgtttcaaataaagagttaaaattgtcttttgtcttttctgggtgatggatatagaggagcaacactggataacttcaaatctctccaagtgtaaacaagtcaggtgtttgagaatcgttcttactttactgtcttactttggatctactgggaatgtggtgttt

SEQ ID NO: 17157 - DNA, 1132 bp, Homo sapiens
aagggccgagggaggacctagcaacgcggggagggggggtggggccagacagggtgggtaaagactggggagctggggggctcctgcagagtggggagggaatagaaactgagatcgcgggggcgggaaaggctcctggtggcgacggccttaggagactctaagggggcgttcagcctgagttgcggggggtaaaaggtaaggggggaagggaatgggagttgcagtcgagtaggggggtgggcgggtagaacgaccgactgcctggccagtgtgggcacggggccagggcggggaacgcctctccccactgggggcgctgtattggggggagtggtcattaggactaaagccttcggaaatgcttgtagattgtggtggtgggggctgctcatgagaaatccaagtggatgatggggtgtgtctcagagcctatataagaaggaattcaggctaagaccacctctactgccccctcttctactcctaatctgcagtacatatccagccatactcatggaccccagtgatttccccagtccatttgacccattgaccctgccagagaagcccctggctggagacctaccagtagacatggaatttggagaggatctactggaatcccagactgccccaactcgaggatgggccccccctggcccttctccatcctcgggagccctggacctgcttgatacccctgctggcctggaaaaagaccctggagtcctggatggagccactgagttgctggggctgggggggctgctctataaagccccctctcccccggaggtggaccacggtcctgagggaaccctggcatgggatgcaggagatcagaccctagagcctggaccagggggccagacccctgaggtggtaccacctgatccaggggctggggcaaattcctgttcacctgaggggctactagagcctttggctccagattctccaataacactgcagtccccacatattgaagaggaggagaccacctccatagctactgcaagaaggggctcccctgggcaggaggaggagcttccccaagggcagccacagagcccaaatgccccgcctagcccttcagtgggagagactctgggggatggaatcaacagtt

SEQ ID NO: 17158 - DNA, 1235 bp, Homo sapiens
tgccactgcgcctggctaattttttgtattttagtagagaccaggtttcaccctgttggccaggatgatctcgatctcctgacctcgttatccacccgcctcggcctcccaaaattctgggattacaggcgtgagccaccgtacccggccaatggtctttgttttctggatgatctgttgtcattgggagaataatacctatgaaattgatgatcacctaagtgttattgacttctagaactacatgtgatttattgcaaggccatcagaagcaaactagggtggccaaagagctgaagcacacagttaagttctttcacttctgtttctttgtatggttgtttagtttttccggggagatattgaactatactgctttagactgttgatggctgctaaggtgttctttgtcaaactgagttattctgattttcctctgcttcctaggaaacccgaaccctagcggagattgccaaagtggagctggacaatatgccactccgtggaaagcagctgcgtgtgcgctttgcctgccatagtgcatcccttacagttcgaaaccttcctcagtatgtgtccaacgaactgctggaagaagccttttctgtgtttggccaggtagagagggctgtagtcattgtggatgatcgaggaaggccctcaggaaaaggcattgttgagttctcagggaagccagctgctcggaaagctctggacagatgcagtgaaggctccttcctgctaaccacgtaagtgagggtcattttcagacgtagaccttagattgctaattccttccatggtctggagagttagcctctagtaaccacttttctatgtttaaagacttttggtcagcctggcatggtggctgactcctgtaatcccagcactttgggaggccggggcaggcggatcacctgaggtcaggagttggagaccagcctgaccaacatggtgaaaccctgtctctactaaaaatacaaaaaattagccaaacatggtggcgtgtgcctgtattcccagctacttgggaggctgaggcaggagaatcgcttgaacccaggaggcagaggttgcagcgagctgagatcacgccactgcactccagcctgggcaacagagtgaaactgcctcaaaaaaataaataaaagactgggcaaaacagcggctcacgcctgtaatcccagcaatttgggaggccgaggcgggcagatcatgagttgaggagatca

SEQ ID NO: 17159 - DNA, 1117 bp, Homo sapiens
aaccccaaattttttataatgtcattaggtataaaaacttcagaagcctccaatcctgagccctagctaattcattgtgccagtgacatgtgtagagaagaagcctggtggggtatgatttgattaacactgaactttgttctttcttccagatttcctcgtcctgtgactgtggagcccatggaccagttagatgatgaagagggacttccagagaagctggttataaaaaaccagcaatttcacaagtatgcagtcttgatagatttccctattaggtgtttccttcttaagaaagcttataaagggatatgtaaaagaggcaggtctttgctgcacatgttcactggcagccattatcttggtcctcacaaggaatgcaattcttagctggggtaattctggacaaagttagtaacctaggaaccttgcctatagggaacgagagcagccacccagatttgcacagcctggctcctttgagtatgaatatgccatgcgctggaaggcactcattgagatggagaagcagcagcaggaccaagtggaccgcaacatcaaggaggctcgtgagaagctggagatggagatggaagctgcacgccatgagcaccaggtcatgctaatgagacagggtgagtctaggcctgtaagtcttaaagctgaaaggacaaaatgacatttttaaatgggtttctttgtatcaattaacagaagggcctacatctctgcttttatacttagtttgcgttgattttggtagataaataggcttggagatgtggcagagatactggattctgtggagaaggaaatgataggtataacttcattttggaatctggacaccacaggtggttccaaaggaattagatcctctttgctttctggatctttatttgaagaaagtcattagatctatatgaagacaatgaggaatattcttagtctgttgtttttttagatttgatgaggcgccaagaagaacttcggaggatggaagagctgcacaaccaagaggtgcaaaaacgaaagcaactggagctcaggtaacttttctcgaacactttttccctaacaactctaaaaggtaatgtctcactcctctttcctactg

SEQ ID NO: 17160 - DNA, 1656 bp, Homo sapiens
aatagttgtgaatccaaatacttcatggctcatgcaatcctggggttgttttggttatggtgttaaaatgccaaaactggatagtttggttgtttctgtttttgtttttctttttttctttttctttttgagacagagttttgctcttgtcgcccaggctggagtgcagtggtgcaatcttggctccctgcaacctccgcctcccaggttcaagcgattctcctgcctcagcctcctgagtagctgggattacaggcatgcgccaccacttttggggttatccactagagttctaaacagacttagtcacccactcctacctaccatcaggagccttgaatagttgaatggaaatagcctccagtggagggactacagatgggtgggaagcttccaacaatggctctgttacagtgttgctctctttttctctttaagaccccaccaacaactgaacgctttggtcaggctgctacaatggaaggaattggggcaattggtggaactcctcctgcattcaaccgtgcagctcctggagctgaatttgccccaaacaaacgtcgccgatactaataagttgcagtgtctagtttctcaaaacccttaaaagaaggaccctttttggactagccagaattctaccctggaaaagtgttagggattccttccaatagttagatctaccctgcctgtactactctagggagtatgctggaggcagagggcaagggaggggtggtattaaacaagtcaattctgtgtggtatattgtttaatcagttctgtgtggtgcattcctgaagtctctaatgtgactgttgagggcctggggaaaccatggcaaagtggatccagttagagcccattaatcttgatcattccggttttttttttttttgtccatcttgtttcatttgcttgccccgcccccgagacggagtcttactctgtcgcccaggctggagtgtagtggcatgatctcggctcactgcaatctctgcctcccgggttcaagcttgtccaggttgatcttgaactcctgacctcgtgatctacccacctcggcctcccaaaatgctgggattacaggggtgagccaccgtgcccaacctcacttgcttcttatccttacactcccccagccccagagaaactgccacatacaccacaaaaaccaaacatcccccaatgaccttagccccattgctccattcactcccaggtgagaattcaggcaaacgtccacaaaggtcacaggcagcgtacatacggttctgttataccccatatattaccccttcatgtcctaaagaagacattttctcttagagattttcattttagtgtatctttaaaaaaaaatcttgtgttaacttgcctccatctttttcttgggtgaggacacccaggaatgacccttttgtgtctatgatgttgctgttcacagcttttcttgataggcctagtacaatcttgggaacagggttactgtatactgaaggtctgacagtagctcttagactcgcctatcttaggtagtcatgctgtgcattttttttttcattggtgtactgtgtttgatttgtctcatatatttggagtttttctgaaaaatggagcagtaatgcagcatcaacctattaaaatacattttaa

SEQ ID NO: 17161 - DNA, 1185 bp, Homo sapiens
caacattatttttatttatttattttttgagacagaatttcactcttgttgcccaggttggagtgcaatggcacgatctcagctcactgcaatctctgcctcctgggctcaggtgattctcctgcctcagcctcctgagtagctgggattacaggcatgtgccaccacacccagctaatttttgtattttttgtaaagatggggcttctcaatgttggtcaggttggtcttgaactcctgacctgaagtgatccacctgcctcggcctcccaaaatgctgtgattacaggtgtgagccaccgtgctgagcctgcaacattattttaaagtgagaaatacactgtgtaggttccttttcagtggacacatgaataactccactaactcgctctactaacatgagtaactctttttatctttgccagaatcttgattgaaaggggcataaatgttttctctgttactatttcctccttgcactttgactaggttttgcagccactcttgatgatgacaaaccttggtactccatttttcccattgacaatgaggatctggtatatggacgctgggaggacaatatcatttgggatgctcaggccatgccccggctgttggaacctcctgttttgacacttgatcccaatgatgagaacctcattttgggtatattactggcagaggccagtgtttcttctcctttgaaaacttgctgttaatgtcaacgggcaggaggaaatcagaagggttggagatgattaggactagaaacctgtaggtagcggcttgagagagcgaagttttggctgttagtttatattatttgtgtatatgcttagggaacactcacgtaggaatgttggaaagttgcaactttgagatgtcaagagcatagtttgttccgttagtgaatcatggactcgaaacttctaggtagcagtttgagagagcaaaattgtggcagttagtttttattatttgtgtattccctagggaaaactcatgtaggactgtcggaaagtagtacctttgagatgtcaagcgtgtagttcacttagtgaatcatgtactagaagtgatttgggatgggatgaaaagatacaggtgtagttcagttagtaaatcgtggactagaagttacctgggggggggtgggatgaaaggtctagttaagaccttcactgg

SEQ ID NO: 17162 - DNA, 1192 bp, Homo sapiens
agattacaggcatgagtcactgtgcccggcgttgttttgttttttaattagtttaataatttattcaacaaatgttgctctcacacgttgtgtgttgggctacactggggtctagggtagtagtatagtacttggtacattatgaagtgattttcatatgtaatcttcatagcagtcctgtgaggtataggcatttttaagtatctctgttttgtagatgaggaaaactaaacttagacatgttaaatagcttaaatagacatgttaaatcatagaggtaatggcagagctagcatcatctgaattcacatcctgtattttctcccctactgactctgaaagatagtggatgaaaaattgtttagtcacatttgataatctatattttaatttatttgtattactggatagaccttagatggcgtaattaagatggagagcaataagcttggtatttctttctcagcagttgactgaatttcctagggctactctgtatataatttttgtgtttttacttttgttaggcatttgagaacaacctttttcgtgctccaatttatcttcataagatgccagaaactgatttcttgatcattcggacaagacagggttactatattcgggaattagtggatatttttgtggttggccagcagtgtcccttgtttgaagttcctgggcctaactccaaaagggccaatacgcatattcgagactttctacaggtaagaatgggaggatagggaggggattgggttgtatacagaaagggtatgttggggccgggcatggcggctcatggctgtaatcccagcactttgggaggccgcggtgaatggatcacttgaggtcaggagttcgagaccagcctgaccatcatggtgaaaccctgtctctactaaaaatacaaaaattagctgggcgtggtggctcacgcctgtgatcccagcactttggaaggccgaggtgggcggatcacctgaggttgggagtttgagaccagcctgaccaacatggagaaaccccgtctctactaaaaatacaaaattagccaggcgtggtggcacatgcctgtaatcccagctactcaggaggctgaggcaggagaatcgcttgaacctaggaggcggaggttgcagtgagccgagatcgcaccactgcactccagcctgggcaacaagagtgaaac

SEQ ID NO: 17163 - DNA, 1285 bp, Homo sapiens
atgtgaagattccaaacaaaccaacacagcagaaggtgagattgtgtttatttctagaatgaaaaagtcaagggagaaagaaatgggtgagtggaggacttggaatgtagttaaggtagcagaatgacttagatgcctacttaaaaggaattcaggtttttaggagtctcacttttttttgtttgaggtaggatgataaagaaccgcagccagtgaagaagacagtgacaggaacagatgcagaccttcgtcgcctttccctgaaaaatgccaagcaacttctacgtaaatttggtgtgcctgaggaagaggtgagtgtggaagtggaaaatttagagtatactaggggctttgtatagagttggaattgctaggaggcagatgtaaagaactatctggggaactttattgtagggtatagtaagctaagtcttagatattgttttaggagttatctttctatgtaatctgctttggggtgatttttcttttttggtctaactgtgtacattggcttgtcctttgaaatccctgaatgatttgtgtgtgtgtgtgtgtgtgtgtgtgtgtgtgtgtgtgtgtatatttatatttgtgtgtggctatttgtctcgtagattaaaaagttgtcccgctgggaagtgattgatgtggtgcgcacaatgtcaacagaacaggctcgttctggagaggggcccatgagtaaatttgcccgtggatcaaggttttctgtggctgagcatcaagagcgttacaaagaggaatgtcagcgcatctttgacctacagaacaagtgggtcgttttagtgctgcagaaaatccaagctggaaagggggaggagttccaggcactatttcataataaagaggaggtcacctaaaagtttgactacctaggtagtcagatatctgacatgtcagggtagtatatgtttgtaatcccaccaccagattacctattcccttcaacccaacttggcaaaatttttgaacagaaggaaacgctagtcttgtgttctaggttccatgacaacttttatggcctacttgggcctaacaaatagcacaatggtagcaggtgacaggtagggcttttttctaaaggtttagttgtgagaggatgttaatacactattaaaaatgaccagtgtgctgatttatttatcaagttgtctccaggaattctgaaagagttactacaatttttcaaacttatcttgttgaccaaatgtctaggaaaactttgtaaagcttttctgttaagggccccatgtcttagtggatt

SEQ ID NO: 17164 - DNA, 1270 bp, Homo sapiens
ggagaattacttgaacccgggaggcagaggttgcagtgagtggaggtcacgccactgcactccagcctgggcgaaagagtgagattcagtctcaaaaaaaaaaaaatttccaagcatggtatcatctcacttttctaatttacaggctggagcagatgagagccctcctgctgggacagagaattgggttctagtggactctgtgctacacttaaacctgtgagacaaaccgcccattattttattatttaattatgcaatgcctagttcctaaatggattggaggcaaattaccgtaaattttgaaacagcctatatgtcagaaatgataatgttgccacctaaatgttttctgtcccccccaccctccccaggggaaatggtaggaaaatggtaagtttcttagggcaaagactgtgtcttctgtttcttttcatgcttaggatatggttctgtgcatagtaggtactcagtaaatgttcctagaatcataaaatcctcaacagatatgttactgagcatctgcttttcatgataagcactctatcagatccttgggatgcaaaggtaaataagacaaatcccttttacccaaagagctcaccatcaagttgggggagggaaagtggaattcaaaacatgttaataaatcatcatagtactgtgagataagtgcaattaagaagctagttataaagtataggggaaatagaggagtaatcatgtctgaaaagtcaggaaagtcttcctagaggtaatttttaagctgattgttttagaattagtagaagcttgccagatggaaaagtccaggcaaagtgtaacatgaatgggaaaggccacagtctagaaatggcagagtgtgttcctagtttgtttgtttgtttgtttgtacctgccttgttccaggaaggatttaatgtggtttatattccagtcctttaatgctggaagggctgagatgagactgaaagatgggcaggaagtatatcatcacaagctttgtgtttgatgttaatgtgtatgatttttatattatgggaaataagctcttagaggagtgatataatcaggtttgtgttttagaaatctgtgtaatgaatgaatgaagaaagaaattgaagaatcatgtaacatatgtgatcgcatttttgtaaaagaaccatgtgtgtttatatgtgtttatatatatacttgtgtatgcaaaggtaaaagtctgaaaggatatatgctaactgttcacaatgataaccccccaggaatgggattg

SEQ ID NO: 17165 - DNA, 1141 bp, Homo sapiens
atacagttgataaacttttttagacgcctttggcatttatgtttaaaacgacaccacctgctaagtaacaaacactcttcttaatcgcggtggcaaaaacgtatccgtcccgtgtgtgtttgtttttacccttccgctacactcttaagaaacttggccgcttccgccccagagagtgccctaaccacgagtcgggttgacagggctgctcgcatgcgcggtctccaccgtggtgtttgtcgcaatgggcgctgcgcggaggactacatggaatctcgactttgcagcttgaagtcattttgttggcggcgctggttaccggctacctccgcgcgggcacttgattgtaacagaaagtagttccggcccatgttgtttcggccgaggagccgtcgccgccatttcaagaccgtactaggtagatggtcaattagagttcccagggtttgaagcctgtaactgctgccgccgctcaagccctccagagcattgctacggctgctgcccttgtactactacctccaaatacgttcttgctggtagtggcggcagcaggaccaattacctcttttttgctctccctcgagaagctccagatggcgtcttccgtgggcaacgtggccgacagcacaggtaccggtgtcccgttctaccttggcagatgcccccttggggtctcgcgccgtcctctaccttgtatcactccttccctcccttccctcgaaccatccccattacatcagtgacattgctaagcttttcgtggtctactggcatctgatcacatcgggttttccgctgttgtccgcttcccgaacatttcctcctcctcccttgcttgctttttgctgcctttcttgctttgtttttatttcgtaaatgttctagcattccactctctccaggcgcttttatcacacgtgcgcgcttagaatgtcgtggaatggactgcattggaatccctgccctttcactcctttgcagcggttttctcccctaattccagctcatcgcctctcctttttcccctccatctcctccttcatctccccccccagtcttttccccttagccagatttggtccttctctgccaatctagggcgggggtgccgttccgatgtaatcatatcctcactttg

SEQ ID NO: 17166 - DNA, 1088 bp, Homo sapiens
gcacttcgggaggccgagatcagaggattgcttgagcttagggtttcgagaccagcctaggcaacatgacgaaaccctgtctctacaagaaatacaaaaattagccgggcatggtggcacacacctgtagtcccagctccttgggaggccgaggtgggaggatcgattgagtcctgggaggttgaggctgcagtgggccatgattgtgccacagcactccagcctgggcaacagagcacgagactctgtctcaaaaaaatcacaaaaaccaaaaaacagcaaaaaaggaaagtcttttgtacaagtattgagatggtatattggtttactttagagttttggttgagggtaagaataccaaaaaatatcaattttctgtagcattaccagccattaggcttaattaaacaattattagaacagtatcagtggaggctttatgattctgtacagtttttgaagactttgttttgttttctaggttgctgaagcagaagattgttataatacagctctccgtctgtgtcccacccatgcagactctctgaataacctagccaatatcaaacgagaacagggaaacattgaagaggcagttcgcttgtatcgtaaagcattagaagtatgtgagggtggtgtagctgggcatttagcatgatagtagagggaaagcagttaagtttaccatcatccacctcttttgtaaaaatagtggttgaatcatttacaagaggattattcattgaagtaacaattgagtacctaaggtatgatgtgaggccctatgtgacattccagaaaatccctgcattcagagttcattattctgtggataagatctgtacaaaaaaattaaacattaacccacagttcaagagaagttacttataagtatataatcttagtgcctgatggctgtatggtagtggttagtagatgtggtaggagtttagcagagagagatttcagtggtgttggagtggtcaggataaactaagaggagaagaggtgtacctcattatgtttgaaacaagaagaggtataaaatagaggaagaggtagaatttgagaatgaatagacttggaaa

SEQ ID NO: 17167 - DNA, 2602 bp, Homo sapiens
agatgggtgatatataatggtaatagaatagcacagccagacttgcttcctgcatggtagggagagacacaaaagatgggaaactgcttttccacaaggaatctccgtagaattttgcggcgaccagatggtgcataggtctggaaggtctgatctcccttggtcttccatgggatggttagtgtggaggggagatatagattgtccggccgctttgtgattccatggattgattcagtcttctggatttttttttctttatattttgggtactggagcttttaaaaatgtttggtttcaggtatttttattcatgtgaagtgtatatgattctcttgagataaggttttaagctaaaatgttactccctgttttagtttctgaactctgacagattgacagggactttgctggtgtagtctttttataggttttataaaccacttgagcctatatcagtcgttttagtgtctgacctaatatttggagctatcagtgctttgttgatttagatgatgactcaagattttttctggtccatttcccatttccttttcttccctgacccccataccctcacccttaaaattctcctgtaactcaactaacaaaatcaagcctgattcaaaacatcctagggtgttttaaacacaccatctggtgccaaatgaagatttttaggagtgattactaattatcaagggcacagttgtggtactgtcattgataataatatagtttttttttttttcctaattttgacctgtttcaccagtgttttacccttgactgccccttctatgctgcttccaaaagtgatagtgtgtgtaagatttttaccttcctttctaaagttttttttttttttttttaagtgagtcctgttcttcctatttctttcagcagaaatgaaatcccaggtaagtataagtattcaagtatttgatcagtaagtcacagttatctccagtgcattaaataaccttcatcaagaaataggttataggtaaaatctctgaaggatcatctatgtattcaagtaattattttttagataataactgtcttctggacttggtcttgaagtctgtacagattcagcctcagtagtagcgaactgcactgctgtttggtttggagtacaaattagacttatagtcctcctggaacttgagttattaaaatcataggaataaaattatgggatctcaacaaagggtcgagggtttgaggcttaaacaagccaacatatgaatatatgttttgtctcgctatactgcacttacgctatccagttgcaggtaattttttgtctgctagtagtgttctagattatgtctttccaaagcgctgaggctgtgcacctattctgtagttgcagctgatgcctgaatgtatcctagctgacaaattattgattaataagaacttgaatttctggaagattcttactgttaaccaaattttgagcaaggagtctcaaaggtaattctgaaccagaattacatgttaatgaacagtgtaccttttaacagtgtaaatcacggaatatccgtgaagggatttcttaatttattttttaccggttgattgaaatatcagttaaaggttgccagcatggttgcagataaactgatgtttgaaattcgctgaaatacttaatgtggaataggataatatacttccaatgccctcaaggctgtgaccttacagccattttacatagcacatcattcctcctatagggatgaactttttcctggcacgaaaagtagccgctctggttgaagctttgcttattgtaacaggcttttatttccaggtaatatgtcttggaagacttaattctgattagagatatagatattactggaaactaattgttttttttctattgtactctgctttatcaaagaagtaaaacatttaaatcgtactacagaaattaagatgttgtcttgcgatccttaataaatgaatgatttccctttaatacggctgatgtattttgtatcctgttatattgagtgttggactgaagaatagtgtcatccaatgatgaaacctatatttaaacacctccaaacagcatgaaaggaccaaatttccctactgtagctatgatattaggaattgttttctcagccaggtctggtagagggtggggttagtttatgatccattaagaaggcaaagtggccttgtgtggtggctcacgcctgtaaccccagcactttgggaggcggaggcaggtggatcacttgaggtcaggagttcaagaccagcctggctaacatggtgaaaccctgtctctactaaaaatacaaaaaaactagccgggagtggtggcacacgcttgtaatcccaactacatgcgaggctgagacaggagaatcgcttgaacccgggaggcagaggttgcagtgagctgagatcgtgccattgcattccagcctggacaacagagtgagatgtcatctcaaaaaaaaaaaaagacaaagcctgtgatccccaacacacccattcatgcttgctcctcttttgcttgtgacctctctgctttcatttacccttgtagtctcggttttcatgtggaccattc

SEQ ID NO: 17168 - DNA, 1176 bp, Homo sapiens
caatggacctacagaatcaaccttctccacttcctggaagggagatgcttttacctacatgactccaagtgccaccagccagagcaatcaagtcaatgaaaatgggaaaaatccttcctgtgggaattcttgggtctctctaaacaaagtcccacctctggttcctaaggaggctgctaccctccttgtcgctcgtgataacccagcaggatgcagtgggtcagctggctaccctgagcgccttattcagcaaaggcacatgcccgaaagaccctccaagattggccttctgaccagtgggacctcgaggctggagacaggccccggtggggccagcagattccgggagcggtcactgtctgtgcccacagactcaggcaccacagatgtggactatgatgaggagcagaaggccaatgaggcctgtgccctgccttttgccagtacgagctctgagggcagtaacagtgctgacaacattgcctcccttagtgcccagcaagaggcccagcacagaaggcagaggtccaagagtatctcacttaggaaggccaaaaagaagccttccccacccacacgcagtgtctcactggtcaaagatgagccaggcctcttgcctgaaggtgggtcagcactacccaaggaccagaggcccaagagcctttgcctctccttggaacatcaaggacatcactcgtcccacccagatgctcagggtcacccagctattccaaaccacaaagatccagaaagtacacaattctcccaccactggtatcttactgactggaagtctggtgacacctaccaatccctgtccagctccagcactgccactggcaccacagtcattgagtgcacccaagttcagggcagctcagagtctcttgcctcaccttccacctccagagccactacaccttcccaactctccattgaagtggaggccagggagatatcatccccgggaaggccccctggactgatgtcaccctccagtggctactccagccagtcggaaacaccaacacccactgtttccatgtccctgaccctgggccacttaccccctccaagcagcagtgtccgggtacgtccagtggtacctgagaggaagtcatcactacccccgacgtcaccaatggagaaatttcccaagtcacggctatcatttga

SEQ ID NO: 17169 - DNA, 1102 bp, Homo sapiens
atatgcaaatttggactttcaatatgagtcaattatgactaagtcaagtaaataaatcaaagccccaggtagttgtagaaaacacttcctcagactccacaggctcccctctgagattcaaataggttccactctcacccactgggtgggagtcactagtttagatcactcccagctccttcatttggagaaatgatatacagtgtttaaaacaagagaatgctcgggccacctgttataatgacaaagacatgacagaatagggacccacgctgatcttcaccactcactccaccttgggcaaatcattaagcttctgaacttcatattcctcctctgcaaaatggaggtattaaaaatctccaccctgctgccctcacagagttgctttcaccatcaaatgaaataacatatgagaatgtgctttgtcctatctactgtggtcaaagtcattccttttggttttttatgtctagggagttctgtggaaccaggcaccgaagaaaaaagtttaatcagtgataaaacagctgaatggattgcagaggatgatgatgacgtgtttgtggcttcacgcacaactgaagatttatttactgtgatacacaggtctgcaccaatttccttaattctaattgcaattgccttccctttttgtacttaaagaaaacctgctattccacattgaaatcctaattgtaaaagaaaaagaaaaaaattaaaaataagaaaaactgctacctttaagcagccattagaattgcacctggaggctaagttcagatacccacatatgtgagcgcagtccagggcctcgcatctcaaattcactgacatcgttgggtaaagtggaggaagggaggggagaggaggaccaggtgccgagtgagaggcccctcgtctcctagcaaccacttggcctattgtggctccatctgctctctcttagctctgtctatagtcagagacatttaacccttcacagaattccttgtatcaaaaaaatcccatcaagagttgaagtggggcaccaggcagcatatcaaaacaggaacttaggaaaagaggaaccagatggggaccagttattggacagggttac

SEQ ID NO: 17170 - DNA, 1180 bp, Homo sapiens
ttttgcaacaggtagacgtcccaaataaacaaccaaactgtaaaatttctactaatcactaattaacagaacacaaagcatcttccccactcctaacactcaacctctctcctacctttgattatcataactccactctctctcccacccaggcacttaccacaatgtttgctgccttctgcacctacgctgctgagactggagaagagaggctgaaagcccctctcagaaaggcttgcagagaacccaccactactacaattactagtataaataataatgataataatttttgaaggtggaatagagaagagatttgagtgaaatgaagttggccctaggagctcagcttccatttcaagtcgtccctatcctcttttttcctccccattccagttagtagcaacagatggctctgctagcctgactttgatctagtcaccatccccaggagcggaggttaattgttaaccaaggatgctttgcatttggtgggtagtcagtacatgtttttgagggtagttattcttggtacaatagcaagctttgctggtgtctcctctccttatcctgtactacttggcctgcctcagctcctgactgggcctcccccaccagccccaacttattcctcagccccaacttatccctcagccccaaatcccatgaactgcatccctagcacaacaactcacccataaaggaagtgagacaacaggaagcaaaataattaatgttagcttaatgaccacaaactgaccagttgatctggataaattaccttgaacgtgcaaagacagaggagatcctaccaggctctcctaacaagcactgcacctgacatccagtgtaactatctggacaacacagacccgattgcagtctctctgtacctgtcagtctgagcagatctgtccacgcacctgccctcttcctcatcaatgaacaagttgggaaaaagatgagttcatgctcagtgctctgttcctcactcgttccaccttccattatcaagtctgtgacacaatggtgagctttcgctttaatatgatttgctagggccaggactagggtgaggtgagcgaggcacctagggcgtaaaattcaaagaggtgcccgctctcagggccatgcaagtgccttaccctcgtcccagccctgtgatttgcactctttaaag

SEQ ID NO: 17171 - DNA, 1229 bp, Homo sapiens
acctctctcatttcacacatgaggaagctgaggcccagaaaggtcaaataacttatatacaaggtcacacagtgagtcagtggtggggcccagcctcaattccaggtctcctgcccttgggcccaatctggtttcatttaaagcactacaatttatagaagacccacagctggcttctacttttatgacacatgaatttcccaggtatttcaatgaactaatatatatgctttaagggaaaatgttcaagagttctttaattcattaatccaaagacaaattggattttcagtttataaacattagtttccctccaaattcaatatgtgcaccctacttagtacaatggatgttttccctaaaagttgtgtgaaaaatgagttttttagatatcaagtatcattttttagaggtaaacttcctatgtaagggaaccttctggtgacttctttttgaaaaaccgagattcctcttgtcattgtcccataatgtctctactttttttagtgcaaacttttgtatttggtgtttatttaaaagtagggtacaacccaaccaatattagctttcccagagtctactttagccttcccttcttaatctttatgagaaattttcagactgttaaatgctcatgagatatttagttgtgttctagaaatttcacctggcttgatattctgtcaatccctgggctcaaattccagctccatcttatcaaacaataacagaattccctaatcagtactaagctccgcatgcagtctcttttccagaacattctttgcctaatgttccttagtgtggctctctctttagttggggcctccttccttagtacatgcataccttactattctgtggaattgcaagccatgcatcttttagagccacactagtcaaattgattggcatttccatttattttccattgttcccttgtttctcctggacttcctctcgtttctcttttcgaggatgcttagaggcttctcaccagagattggtgaggtttcccccatcatctagatgggagattgacaaattctgtaaaggttaagacagtaactattttaggctttgtgggctacatgtggtctctgtagcacattcttctttgttgttgctgtttgttcattcgtttgttttgcaacctttggataatgtaaaccactctctttttttttgacagagtctctctctgtagccaggctggagggcaattgtac

SEQ ID NO: 17172 - DNA, 1611 bp, Homo sapiens
gaagaagtagtagttaaagcaaaaatcagaagtaaagctagaaggattgtttcagatggcgaagatgaagatgattcttttaaagatacctcaagcataaatccattcaacacatctctctttcaattctcatctgtgaaacaatttgatgcttcaactcccaaaaatgacatcagtccaccaggaaggttcttttcatctcaaatacccagtagtgtaaataagtctatgaactctagaagatctctggcttctaggaggtctcttattaatatggttttagaccacgtggaggacatggaggaaagacttgacgacagcagtgaagcaaagggtcctgaagattatccagaagaaggggtggaggaaagcagtggcgaagcctccaagtatacagaagaggatccttccggagaaacactgtcttcagaaaacaagtccagctggttaatgacgtctaagcctagtgctctagctcaagagacctctcttggtgcccctgagcctttgtctggtgaacagttggttggttctccccaggataaggcggcagaggctacaaatgactatgagactcttgtaaagcgtggaaaagaactaaaagagtgtggaaaaatccaggaggccctaaactgcttagttaaagcgcttgacataaaaagtgcagatcctgaagttatgctcttgactttaagtttgtataagcaacttaataacaattgagaatgtaacctgtttattgtattttaaagtgaaactgaatatgagggaatttttgttcccataattggattctttgggaacatgaagcattcaggcttaaggcaagaaagatctcaaaaagcaacttctgccctgcaacgccccccactccatagtctggtattctgagcactagcttaatatttcttcacttgaatattcttatattttaggcatattctataaatttaactgtgttgtttcttggaaagttttgtaaaattattctggtcattcttaattttactctgaaagtgatcatctttgtatataacagttcagataagaaaattaaagttacttttctcaagtgttttccatccactttgtttcactgagatgatactggcagatcttaagatatgcttgtgaacatgctgtttcatgctttcagcttaatacaggttgagcatccctaatccaatccaaaatggggaaaatttctgagtgctgacatgatgccacaagtgaggaaagttccatacctgatgtcatgtgacatgtcacagtcaaaatgaaggtgtataacacactgtttactcagcatccccaagagaaaagagattctgttagaccccttcagctactatatatcctttccacacaggcccagattctcccatgcaagcctgcctacaaagggtaataaaatggttcaacatacacaaactttgtttcatgcacaaaatcgttaaaagtaattataaaattaccttcagactatgtatataatgtgtgtatgaaacataaatggatttcatgtttagacttggatcccatctccaaaatatctcattatgtgtatggaaattctccacaatcaagaacacttctggtccccagcatttt

SEQ ID NO: 17173 - DNA, 1178 bp, Homo sapiens
aagcatctgaagcgggtggcagctccaaagcattggatgctggataaattgaccggtgtgtttgtaagtatcttatataaatatttccgtggccactgtttttaagtgtctcccaggactcatttggggaccaggctaggggaggaatatctattcttggcttcctctgcccttgaaggagctatactatctagctgtcctccacttccaatcgatttaatatttttgtgcctcatttattccacataccacatagtacatttacatggactcaggattcatgttcttaatgatcctggtcctctgacagggaagatgctataaaactttaaggtatgaaatagttttggatgctttttacacctcctgtgtaaaagtccaagttgggtgtaatatggacggtcttggtgttcagttagtggatctggtggactaggaggtaggtttgagtgctttagtgaatcccaacagtgattatcatttttaacgttacaggctcctcgtccatccaccggtccccacaagttgagagagtgtctccccctcatcattttcctgaggaacagacttaagtatgccctgacaggagatgaagtaaagaagatttgcatgcagcggttcattaaaatcgatggcaaggtccgaactgatataacctaccctgctggattcatgggtaagaagttttaaatactctggagacgcatattgatggcagccctatggtatccaaatactgtcttgatcatttttctaacctttgtaatctgtcaagtctcagaaacaaagcctgaccttccctctgttttttacttaaataaaaaacatgcaaataatcatgaaacgcttttcaaaactaaatttcgattcacttttaaattttacatgcagtcatggggttttgaaatattgaagatctggccgtgatctttaatcttcagaatccttgttggattagaactgggaggcacatgggggttctttttgtttcgtagagagctatggttgttgctcggcatgaggtagtggggatcactgtatgtagtaaccggttactgcttgatttcagatgtcatcagcattgacaagacgggagagaatttccgtctgatctatgacaccaagggtcgctttgctgtacatcgtattacacctgaggaggccaaggtgagtgtggc

SEQ ID NO: 17174 - DNA, 1164 bp, Homo sapiens
atgaaaagaaatgaactataaaattgcatcacagaatttactgtgtaaacttttcaaaccatttgtgccattaaatagcgcccccaccaaaaaaaaaaaaaaaaaaaaaaagcctatccttaggataggcagctgatgtagctggatggtgggggctctaggtggccacgttctatctgtgtttatatggttaaatggatgaaatggatgtgtttgcagattgaaacaattcataaagagttgaggctacttttttttttttttttttttggtcttagcgctgaaactaaaaatcgcggttattttagtgtttagccccggctcttccgttgctcaaacctccggaaactacatctcccagcatgctgtgaaactggtctgacttcatctcaaatggccccgtagggcaacaaggatggttagttttgaccctacttatttgtgccataaaaacaatcgatcctaattgacagctatttggacttttacatctgccaaacccttttccttgaactgtggtcactaaatgaggggagtctggtctgggaagtcccatccattccttcaataggatggggagcggtgatagtgtctccggcgatctcaagaataggagggaatgttgaccagggagcaccgctgcggccgatcagaggagcaggaactggaaccctggccgagtccgaaaaaagccagatctggaaggtggctgcggaacggttttaagcggaagatggaggagccggaggaaccggcggacagtgggcagtcgctggtcccggtttatatctatagtcccgagtatgtcagtatgtgtgactccctggccaagatccccaaacgggtaagggaagtcgggatgaaagaccatgggctttgggggtgggggtgggggcggtggacgaaagagcgttaggaagcggagaggacactgggctgggggaaatcttcagaaatttcgagtagctgtatcagatacctaaagctgtatcagaaggaagtgttctcatatcgtttctgagagcgcagcatgtctcttcgggacgtccaatggacaggtaggagtgggggagggggtacggaggaggggagaggacgcagtttccactcataggggaccgctgaagtcgtgggaaaacaagctgcagggggaaggtgttccat

SEQ ID NO: 17175 - DNA, 2854 bp, Homo sapiens
ggtgttggggaggaggttctgaattatgctaatcaggactttacttagtaagattggtaatttttcctttcccctatgttcttctacccttaaaaaccaaacagaaaacccttggcgcagatgataccatgttggcaaaggatcccgcatctggcatctgtactcttctgtatgacagtgcacccagtggcaggtttggcaccatgacctacctctccaaggcagccgccacctacgtgcaggagttcctgccccacagcatctgtgccatgcaatgagggctttggttcctggcttctgggagccttttgacagctggtccctgcctcggttgattgtgcatggaactaaaatgttattgcctaatcactccaaccctgcccctttctgtcccatccttcccaagaagagagaactttttcgataaactaactactgtagaagaagtgaacacttacctggaggctcaccttgcagaaccagtgacaatcttatgagtataatgaacactcagccaggcctgtcatgattggctttatttctttcatcattcataaaagtttgcatgtgtttttattctctagatctgttaccaatatagttttctaactcctgtttggggagcaagtgttaataataacttattcctaaagcttggtttttcttttttgtgattttattgtgtatatgagtggtgggtactttgggacattatttcaaatgagtaaactctaaattgttaaatatttatgctgctataaattagaattacctattctacgtgccttttcttaggaaaagagagtactggatcatggttttcttccttacttacaggttgcttcacactgagtgataatttaaaattgtttctatgtagaatcattgtctctactgttgccctctctgtgtctgcacacataatgcctctctcactttggtgaaatatcaaaaaaatgcaagtacagcatgcatatttaagaatttctgaactaacacttgaaatcacattttataaagattgttggtactcagagttgtatttgcagcagaaaatgcagaataacccagaaatggagcccggagcccaattccagagaggaagggaaagaagagacgatgcctggacaatgtcttatacatagggaacagagagggaatcagaggtggcttagttccctgaagacagccttatgcgcttaatccctgcctttgaaaaatgggccaatacacaacacagacaataatttgaagcgtctgtattcagcaaagataaatacagcagtccagtctataggtgctctacttagcattcttttcatgtgctcctggtctctgtctcactcacctactttctactacatccaactcaactccctgacaccctatccccccatctattcttaaactctttcatatatattttcacttcctaattctagtgtacatatccctgtatatcatggtatctgtgggcatatgtctgtttcttataaagacacatatttgtgtgtgtatgtgtgtgtgtgtgtgtgtgtgtgtataagcatacatgggaatttttctgaatgtaagcagttttgatgtgtctgtatatcaatctgtatctacatttgatggactgagtaagaatgttgcatgtgagagaagggatgtgactgtggactcagattgacacacacagattggtggaagaatagcttcagtcctcttccttcatcccatatgtaggtagccttgcttgacaaatgtttcttctaactctccttcttctgaattgtgcagagactctgttaacttccctttttgcacttagataacttcctacttcaaccccctcctttatcttggatttctaaagtttttccccaatattgggaatggtgagggtggggatgagagactctctgaacaattcttgcagaaccagtgacaatcttatgaatataatgaataagtaagcatatagtagggtgatagaatacagatagtagaaacaaagagaggacagcaaaccttttcagcacttctctcagagcaaatggaaacacacagtaagtagctttctgactacattattttctggtcacttttaaagaaagtttacaacctgttctgaaactatttgtcttttcactggttgtaagtgtaccccaatctcagggagtatatctgtagtgccacaggcaaaagatccactccttcccacactcatttgcctgaacttactcgaagggctgcatttctctgagtttacgaaattgtgtcattatggtccccatacagtggtatttaacttttaaagcaacttttaagaaaactcgacttgttttttgttcattttaagtgtgtggtactaaaaagacatgttagactttttttaaaaaagcacttatgttttgaaaatagaataaataataagaatttccaattaaatcatgtctggtgccaatgtgcaaaacttcacatgtgtttttgtgattggagtttatttcatggctttattctacatactctgcttaattatacagtacagtcaaagctcattcattgggttgaagtagaataatattaatatattaatacatatataatatattatacatttcataatatgttagataatatatgtaaagaaatgcagtttaatcattcaaatacatacccactcaaacaaggcttactaaattcaagcgggcttattgacatctgtagggaacattttcttttcttttcttttcttttcttttcttttcttttcttttcttttcttttcttttcttttctttttttttttttttaagacggagtcttgctctatcgcccaggctggagtgcagtggggtgatctcgg

SEQ ID NO: 17176 - DNA, 1146 bp, Homo sapiens
tcagaagtagaggagctgagccttccctatcctgcttcttagcagctgtgttttctcttgactttattcttaagtagttgctaatggagcaacaggactgtgggtggtataataatgttagaatattccttatctgtgagtaactggttaagaatcaggatagggaagtattgagagcagaattaagacaagggatgattttcagaaattgctggttttctaagttctaactattgaataatgtctagattttcttgtgaatggtcctcttctacataaatcttttgaaactaaagctattagttttacaatgctaaggtatttactaacctacttaaaatagataaagaatgttcttttctattttgtcaaacatattcaaaagtgatatcatgtgtgttgataagatattggggtaaagggagaagaaatacatccttttatataaacttaacttcttttctcttagtctatcctaaattcactactgccccgtgcttcaacatcaaaagaggttgatgctagtctactctcagtggtttccttccctgcctttgcagtagaggatagccagttggtggagctcacaaaacaggaaatcatcaccaagcttcaggtatgtccctatgtacctttgttttctttaaggctgtgactttaaggataaattgtgcctttgggggccttaagtatgacctgtgtctgtgatttcaagaaacctttaagttttctgagttgtctttatagtttcttttaaaagtgttaaagcttctacagccgttcctggtagcaatgcagggtggtacacccactttagaaaacagtttggcagtttcttataaatttaatcatacacctgccttataacccaactatgtcatcctagaaatctaccctacagaaatgaaaacttatgctcacaaaaaaatctgcacacaaatgtttacagcagctttattcataattgccaaaaactggaaaaaaccttcaacagaggaagggataaacaaattacactatattcatgcagtagaatactgctcaacaataaaaagatacaaggtaccaacttgatcagatttaatcatggtgtataatctttttgatgtgctgttggatttgttttgacagtattttgttgaggat

SEQ ID NO: 17177 - DNA, 1161 bp, Homo sapiens
acctctcccctccccaggtccccgatctaaaatcaaagagattgatttaggatgggtgggtgccttgtcttctctcattgttcgacattttagttacgttttctctgagctctctggaaagcataaaagtataatatctgttaaaagttggatgaatgaactaatgaacgcaatgggattccagaaaactctgcgggagatgggctagaggacgaggaggaggtggatgaatcagccatgttagagagcctgggaaggtgagcagagttgaaaacttgatagatctaataatttactggctctgggtttgtcagtcactacattgcagcaaatgagattagagcatagttgtgggagggaaggaggtgacgcagcaatctatttgcacctagaaattttaggcaagtgatagctgcgtaatcatactgcggcaccgtttttttcttgcagcagtagctgcttgcggaggaggtctgcccactgcagctctctgcagtctccggctctctcctgcaggatcggtcaacgcagccgtcgccgccctctgcacccagcccaggtcgccactgcttcagtccggttctcaaagcctcagcaccatcttttatccccgagcagcctggatcgtcgttccctcagtccggacgccactgctaggtccgaccaccgccgcttctgatatttcggtgagtcttttcctgtggaggtttggtctcccgatctctgtggtagccaccttaggcgtgtacggtcctttgaaaaatggccgagtcagagaaccgcaaggagctgtcagaatccagtcaagaagaggctggtaatcagataatggtggaagggctcggggaacatctggagcgcggtgaagatgccgctgctgggcttggagacgatgggaagtgcggtgaagaagctgccgctgggcttggggaagaaggggaaaacggtgaagatactgctgctgggtccggggaagatgggaaaaaaggtggcgatactgatgaggactcagaggcagaccgtccaaaaggacttatcggttatgttttagatacagactttgttgaaagtctacctgtgaaagttaagtaccgtgtgttagcccttaaaaagcttcaaactagagcggccaatttagaatccaaattcctgagggaattt

SEQ ID NO: 17178 - DNA, 1817 bp, Homo sapiens
tgttttggttccatatgaactttaaatgtgctatacactccaattgaaagacacagactggcaaattggataaagagtcaagatgcattggtgtgctgtattcaggagacccatctcacgtgcagagacacacataggctcaaaataaagggatggaggaagatctaccaagcaaatggaaagcaaaaaaaagcaggggtggcaatcctagtctctgataaaacagactttaaaccaacaaagatcaaaagagacaaagaaggccattacacaatggtaaagggatcaattcaacaagaagagctaactaggttcctggcccacgccatcgggtctgagctgcgccaactgctctgagggttcgtggcccaccgctccttcatggttcctgctgccactgtccacgcttagcgctgtagagaagatggtgggtcggaacagtgccatcgccgccggtgcatgcgggaccctttttattgcgtactgcatctactttgaccacaaaagatgaagtgaccccaacttcaagaacaggcttcgagaatgaagaaagaaacagaagcttgccaaggagagagctgggctttccaagttacctgaccttaaagatgctgaagctgttcagaagttcttctttgaagaaatacagcttggtgaagagttactagctcaaggtgaatatgagaagggtgtagaccatctgacaaatgcaattgctgtgtgtggacagccacagcagttactgcaggtcttacagcaaactcttccaccaccagtgttccagatgcttctgactaagatcccaacaattagtcagagaattgtaagtactcacagcttggctgaagatgatgtggaatgagaaacaaatgtcaacataataaaatctcagttaaaaatattttaaaaattcttggtagttgagcagctctgggggaataagggcaaatatgcttgttatgaactacactgaaatctaccaaagttaatgtttactttgtgtagatccatttgtccattttatttatttttcccagtgaaaagtgtaatttgatagagaacttttcattctataaatacactatgggttactaaaaaatcatggattttgtttattcctgaatcatagttaaacagtacatatgacatggctcatgttaaaaatacccagtgctcggttttgaaagataggcaaaaaaaaatgtataggagaaactgaagagtgtacatgtttttagggggcacattttgctgtaaatccagaaatttgatagacttgattgtgtttgtgaaaactgagcattaaacgttttgattgatcgtttctttccatttaatctctgagacataaatatgtgaggtgtgctgctgtgctgggttaacagcttccttccctttctgtgtatcagtcttgaaatgttctgtttaaatcagtatgcttaatgtgttctgggtatttatctccttgtattttaaatatatgtagttgtaaatagcaccaggagttagatctctgtacacccctaatctagccttgtgtgcttcgccagttaatgtgtgctcactttccctccatttgttacatgagagaatgcatctgctgatcactgaagtgtcccttttagcttctgattcattgggttctgttgggcatctttaaatctaccttaacctgaggaatgtatgtgggcaaccaggccctgcatttttttatattctgaaatttgcatgcttgcctgacttggtatttctgaattgatcttttttttaatggtataactatcttgattttcactgaaattatatggttctgtcac

SEQ ID NO: 17179 - DNA, 1112 bp, Homo sapiens
caagattcatctcagtgaagtgaacaatcatttcttcatagaaggtcaagcctttttaagccactcttaaaatttatgcctaatttgaaatccacagtccttgaccagtttaaaaaagagaggaaaaagaagacactattttatatgtgattataattgtttgcacaaacacttttccaccttcctctgtgccccattacctctgtgccactcagtcaccccaaatctctaacctttagtaatgtgtatgcctgcaaatattatgtgtttgcctgctgcaaaattgaaggtgtatttttatagacaaggtagaagcctctgaaaatgtataccaaatgtcttgttttgtagctaaggtcgggaaaaattgtatctgaggtttatgttccagctaatgttatcaaatttatgcttcaaactgtgatattttaataccaaaatcgattttcagcataatacaaaatatctcattttcactgatagaaaattgcttttaagtgttgatccttagaaatcttatttttttctataaccttagaatttgatcatatgatggtcataggaactttttctgccatgtataaatcacacttggttttgctcaaagaacagcatgaagtggtgaattgtttccatgaaacaattattgagaatgggaatacagtatatctggaaatgacacagtataatacaagttacagtagcatttgtcacaaaaaccacttgtcagcatgtgtaaacttaattttaaagcctattctaatcactcgagtttattattttattgttcgctatgctggttgactcatcttagtttcttcaactacccaaaaaaataccaatttttttcctctcttgtatgactactttttcaaactgttttcctttgcagggggctgattagcaattgagtattttgtaatgtttgggcggggttgctttgttttcagtgaaattggttgcagtgaatgctaaaatgacacagcacactggtgattaattcctcccccatggagccttttttctgttatgcttaggatagaacatacttgtaattttccattaggttagtaacatacttttgtgaaagttgtttttagactgaagaaagt

SEQ ID NO: 17180 - DNA, 1627 bp, Homo sapiens
tgattataagtgctcaaatttattgaaattagattctcatgcctataaaagtatactttaaaaatattttgcaacaactgtcaaattatttgggttcctttaaatagcaaacaattgggaaattttccataaaaatgaataggttttattaatacctgttcatgtagtatgtggactaaaacaattgatatatatctgtatgtaaaaatgaatgatcttatcttgccccaaatttttcttacctgattctgagccagcctttttgttttgatggcaccctgtgagtatgttccattttctgtgaactttgtcaaattcatactatatgaggaaatgatctaatattgtgggctccaggcaggtcatcttaattgcatgtctgtctcttctgtaaaatgatgaggtggaacctagagctggacaaaaaattagagatcacttaacattctgtgattcaaggaattcttaggacatttttactctatagaatctcagaatgattattctcagatctactgtccttggtggaaactctcacagtgccttgcatgcagtaaaagtttgatttgccgactggctgacgtgttaattatcacacagactccaagaacctgatgcttgctagaccttagttccttggtgatgctaagagtaaatgtagttttcctaggaactgagcactgaggtctgtgtcctttgcctgtgtagaatctgtctatgcagttggtattcaggcaagaattttagctgtaacaacaatggaaatattggaggacccactttggcatttatgtaaagatttcatatcctatccaacatttactttagtgtctaatcaaattccataccctcaaaaagatctgttggaacaaattgataaaattaggtggaaaggaaagtggtatgggactcaaatacaagtcacttctggtttaattattggctctgctgcttaattcctctgtacctcacgtcctcattgtcgaagtggggacaataatctggacctacctcacaggggaattgaggatattttcatatattagtgtgctttgaagttgactgaaagatatactggatatcataattatataatttctaaatagatttctttaaatccatgctatgttttctttttcagtcaggtcctacagaatgactattgcacttggtctattgttttaatagtaaattttgttattaatctcctatgtgttaaacgtgggtaattgtattatgttaatacatacttagggaggaaaagcaggtggatgtaaatcagtgattcccaacttcagcagatgatagcagtggagggtatccttgagctttttgtaatatttcaaaaagtatattagaaattatacatttacccataatattcctgcttcacaagtcaattaagacattgaatttccattcattttgcctatattctctcaaaagctgtgaatggcagtatgtttttgattaataataaaataagaaatcctattatgtgcaacttattaaatacttgggaacatgggaaaagaataatgaagggattcttatggtgaaaatgttgggaaccacttttataaaggaactaagattatttgaccccctccacagattgcttacctag

SEQ ID NO: 17181 - DNA, 1176 bp, Homo sapiens
aatatcactggcctaatttatttaggtgtgtacatgttgctcatacatacacacacatataggattacaaatgtggaaaatgttataatgtcatattctagcattggactaaatatcaatttctgactcttaaagtagttctgtgtataaattcaacatgatgaatcaaggcaataatttctcaaatgttcttttatttctttgtttttatctcgactttttattttccattttttctagtacgcaaatagtgtaaaattgttttaatgcctggactttgaaacaagtaacaagtgtttgaaagtatataatctacgagcgaatttgccctccttggactaaccacatacaaatatgaatctggctgcaagaacaggatatccaggtaactagagagtgggcattgataaaaatatctggtggagaagcctaggatttcaactttttgtcagaggattcctgttgggacagctttaccagaaaagaataatagcggatatgttcatccaaactaagaactttcatgcatcttgcattgttacatagcctgtggaatgaattcattttttctcccttgagtccaggaatgacttccctggaaaaactcaatctatatacagctgtgccaaaatgaaggatacctgcctctccgaaactttcactgctgcttctgtcattgttcacttgtcagataaaattttattatctcaggatgcaaatttaaaataaagtgtaaatctatgttaatgaattgaattctgtgttttttttatgcatcttcctttcttcccttccctatatgtccatcattataaggcaattaatttaggcttccttttaaaaattgcattttatatctggcctttttccacatatactagtgttaacgttcaatcctgtaagtattttatgctataaacacatgcctcagagaagtgtgaattcagttccagacaaccaaaataagtcacacaaattttggggtttcccagtgcatataaaatttgtgtttacactataatgtagtctattaagtatgcaataacattatttcttaaaaaatgtacatatcttaatttaaaatattgtattgctaaaaaaatactagtgatcatctgagccttccatgagtcataatatttttgtttgtggggggtcttgcttcagtgttgatgg

SEQ ID NO: 17182 - DNA, 2225 bp, Homo sapiens
tgtaaagattatttcaaagctcactcttccatgatttcttctggctttcaatcctatctaagtatcaaggaaattaacttgtaaatatggtagttgtttactaaggatatgtactgctcttgcaaggaaataatgtccaaacaaagcttcacttattttttttaatataagcagatttcactgtttatggcgcttatgtaatacattttatctttttaaaaatttgtccgtgtaaaagtcaggattcctttatatttgtgagcctccttttctcctttcctaaggatgtaatctacagttttcagatctgcagggtagtcttgattggctaaaaacaaatcaattttcttcttggcataaagtgtttcattattataggggtgttcattttaaatagtttaaaaacaattgcagcacattctaagcataagagaaagttattgacaacaggtaccttcctaatctcccaagacgtacttactcatttgtgaagtattaaagtaagaggtaactcaagcagaatgctggctatgaatgtagatattgaagctattcataaacactggaaatagaattttaagcttttagccttcagtggaatgcacatattggacatgtgcatgtgaacacctttttcagtagcactcacggatttccattcgattgtatagaatgaatacaagtgttttagtggaatttgctacttaatttttaatcttgcgatgtccgtgattattacatgcttactagtgttgtggacattgaagacaaggtcattcgtaggtgtcagattacaatggagaacaaaaatcgttttccccccacccacatccaaacaccattctcgagggagcatttcttgcaaaacaccttacatttcattttctatctttgcactttttcttaagtacagaaaagttgtctttaagacctagtttgaacttcatgcagtaagaggaacaaggataaacaatgttgggagttcacattgttcagagcataaggaaaagtaccaaaacccaaattttcttgaatatttcagatgtttttaaaaactcacttctagtctgaaacatttgaattgttttaactctgagcagctgacaaagttgaggtttttttgttttgttttgttttgttttgtttttttgagacagagtcttacttggttgcccaggatgaagtgcaatggagcgatctcggctcactgcaacctctgcctcctgggttcaagcaattctcctgtctcagcctctcgagtagctgggattacaggcgcatgccaccacacctggctagtttttatatttttagtagagatggggacttcaccgtgttggccaggctggtcttgaactcctgacctcaagtgatgtgcctgcctcggcctccgaaaatgctgggattacaggcgtgagccaccatgtccagccaaagttgaggtttattagtactattagaaacaaaattgagcaagttaagttaaaagtttgctgactttgtatcaacactatagaagatgagccaccttgttaatttggaatatttgctctgaaaagaacatgttagttacaccttaatggtgttaatggaggtggggattgagaaaagtgttcacattagtgttggaatgtaggtaattgtacagtttataagacctttagcaccaggaaataaaatatgtgtgtgtacacacacagtttttaaaaacgattggaattcatccaaaccttaagattaggaaactgattggctgtaagtgttgcctcaagtaatgtgtcccccgccccataacatgtcttttctgtgccaagtatcctctcctagtgtcagtgtctcaaattatatttatgaagggttatcacataatatgctttgtatttaactacctgcttcccaggcgtccatgacatgaaatgggtgaagcatcagccatgactttcggtcagttcccaaaatacccaaatgatagggaggtaaagattgcaaaattcctcttaaaaggccatttttacagcttgctaaaatacagtggcaccttatggttgttaatattttttcttttaaagatggagaatgtttttattcttccccttttctcctttgttcttttgcgaacaaaaaaaattataatctgccttatttgattttttttttaagttttaccttacaggcttccctgtcacatgttttaccatattaagtacatagaagccatgtttgca

SEQ ID NO: 17183 - DNA, 1113 bp, Homo sapiens
atctgggtaaattgatactaaagacactgaagaaacactcatccacataagatggaaaggatgtctgtccatctaacaagctcaggggtttctgagtctcagaatgacatcccatttcaaaaagaagaaaagagatattgaaatcattctgcctgtttgagagatgactggttatttacagcacaaaaaaaggcttagaatgaaaactagaagaggccttttgtttttcactcccagtgaggagagtagaaatcttaagatgctctactgggctacctgtagcactgactggagtttgctgcctacagagttttgaatgtactagtccttagtttccatagaactgaatgcacctctttagtaagttgctgatttatggtgctaaagaaaatgattattcccatttttttcttcttccccaagccccttaagcatttaagaaaatttaaaataaaagcgttagaggccctttttatgaatgtaacctaagtttctgtttgacatatgacactgcaacttaaaaatgttaggaaattatttgcctttttttttcttttagagttaagctttataaataatctgtagaatcaattgaagtttaaagcttaaggatcactcttaagacgtctacaaaatcttgtatatttttaagtgtgccaatttgtaacatattttgtaagtgtatatttttcttagaaaagtgctgtgaagtgtctgtatgtgagagttttcctttttctgcaccactaggtgctaataaaaggatatttacttcaaagtttctggttttagaaaccacaatacaaagaaaaaaaatacacttttgttggaaattttgtaacacaaaacatgttgtgaaagagtgtagtgatcttgtgcaaaaaaaatgaacatttgtgagcttcttgctgttttatagattttcttgtaaattattcttgtaacacttctggttttgttgttcttgttgcgaaggtttcaaatatttgtgactgaatgtacggtgaaactgtcataatgttacctagctgagttttgttattgtttatgaaataaataaaaagaaaagtttaaaatactgctttagaatcatatgtattagaaatcaaacca

SEQ ID NO: 17184 - DNA, 2380 bp, Homo sapiens
ctaatctgtgttgacacttcagaatttattaaaagatcttcccttacttttcagtaatttaattagtttctttaagcctgacataacgaggaggagcccaaacaacataatcaagttttaccttgggaggaaaaaaagttttacctgctagaaagaattaataaaatattgctatacattcacttagaaagttcttctcttttccagtatgaacttgctttcatttgtttggtagtaatcattcaatttgaaaacatatgcacctcatgaatggccacataactatgtaataaggttttatttctcagaaaaggtcctaatattttattggtttatagttttaagaaatttttcatgataatttgatatgggagagattaattttagtattgttgacattggtgggtggatagctgaacttatctaacttaggtgtccactcttgctatataaaggtaatttgataagtaacatgaaaccagtatttcgtagtctttgctgccagagtaagtgatgcaagatcttgcttttaaagctagagttaatactgagatgcataatcaactgaaaagtggattagtttttttttttttttccttttcaacatttcttactctgaaaccatagttgttactgctcttctgggggtggggtgagtacttttaataaaccagttgcattactggaaatgtggttaaagtctcaatagaaattttgcttctttgttaattccctctatacatttccagtgatgctgatggaaaagattttgcttagccgcataaacaaacacataatactgaagtaaccatcagcaataattcattttgaggtgtgaatagtgttcaaagtaagttattttgtgatatgggaaacctttagtccaagaaggttaggaatgtttccaaggtgtggataattttcccactaagagatacaaagctatttttttttcgtatgattgtaagtggtccctacgccattgtcgtcattaaccattattttcaactaacaaaatcttaaattacttgaaaagcagttattgtagggtccataactaagtcttaaaggcatttcttttaaccacttcatattaaggtagttctatacagggaaataatagacaaattaagatgaaagaaaagcttcctaggatgattcattcagaggaaatgccaagaaaaagggcatttaattatagggtactaattttacattataatattatgtactcacacaaaaggataaagtgtataaatttctaaatcagtgttgcaacataatgttttttaatatattgagatgaatcaggtacagttttagaatatggaatctgaaaatggagcaagatgatagggttttattttttatgtctctttattttaaagattgaaaattttactttcttcctaagggacttccagtttacaaaaattaagttgaaaccaaggtaatttgggattgtaaaaactgggccagatgccttactgaaggttcttaacatagaaatatcttggtgagcagatgggctcatttggaaatttttaacagctcaagtctgagggtcacttttgaaaatcagaaagagaccttagcatttggacatgaacaagctcaagataagccttatgtttttcctctacagagatttgcaccttttataaaccttaagataaatattgtgtcattcctttggatgttgacaaagtagtttgtgaagatggctgtttttaaaaaagtttttgctttaaaggcaagatatttaaagattgtatgattccttatttctggatctctttgtccatactgccatcttgctcttatccttcctacttgctgaatgtgttgctgagtagcaacttttgccagtgtatattcacaattctcttaccttgtatctttagtactagatagtctgtcctggattaatagttgaaagcatttaaatatgtttgcaattgcagttttcttaaattgtaaacaaatccctttgaatatatagatttttaatgtaaattttatagtaaatgataataccaaatcaaatagattaaaactggtcagttaagacaaaataactcagtcagagaggcccttaacctcactgttattgtttatagcaatctatgtagataaacattactaaataacattatatttgtgacaagaaatgggtatcccattgaagcaactcttctctgcagtgtccagggaaaactgatattttgtcattcacatactgagaataaatacagataattaagagacactccgagggtatgaccttacagccttatgcagaaggtaaaaacttggaattgtttctaagtaattgtgaagctcataatgtgggtaaaatggcagcaaattatagtgtgct

SEQ ID NO: 17185 - DNA, 1171 bp, Homo sapiens
atatttccatttaacaaatagttactgaatgcctcttatgtgttctaagtgctttcacaggggagggtggtaaaaaaagattactttctgatccctgctatcccagaattttatactgtaccgagagaatttaagtatgcaggtgactaaataagaaggcataatgttgtgagggtagtgggaattgtcaattcagagtctcaggggaaggctttgtgaaggaagtgtcattgaagattttgttttaggtcgggttgcaattagataagcattcagtaaatattcgttgggtgaattttgtggacttttcaaatacaattcattatggaaaactgcagggatatcatagtccaatatattgagtcaatttttaaaatggaatctacagtacaaaattgtattcatacatgaagtctgatgaaaagtatactaatcacttaagagaataaattctaattatacttgcctatagttatttttatatattttgtagtattttaataatgaaagatatgaagcacagagatatgatggatttttgaagacgtatgagactgcttcattgaaaagtacctctactctggctatgctgaactttggtcaaagtgctattttcagtgtcggtttaacagctataatggtgctcgccagtcagggaattgtggcaggtaatgagtctgtggctatcacatttacaggctgttcaacttttataaataaagattaatgaaaggaatgtgcatgcttatcttaattataaaggatgttaaagtgctttcacatccttggagtacttttctctgtatcagaatgtatttacttgatggtttgataatggttttttaacttccttttgtttagcactgcctcactcactgattgggattactgtttggaactacctgttcttttaagaacaacttttttttttagtatctagcttttctaatttctcttgcagacctgtaaagcaatgtaattgatttagtgtttagttcaaagcactaaactgcactcttttttttaagaattaccaggaaccttttaatctttctcctcctttttttagttgcaaaacacttcaaaagtaaatgtctgtccctcctttctggaaaccctccccacccccactcagttagtattcattcattcactgtgacctaaatatgtg

SEQ ID NO: 17186 - DNA, 1073 bp, Homo sapiens
cttacaaaacataaattttaataatattctaatgcaaattactgaaccctcagtgcattaaaattatttcctaatttatgagcctcttagtttggaggttgcttgaagccacaaataaaactcaaatgagagtcagttctttgtcccactgtagtttgcattttgtttagtttggttttagctctactaaggtttcacatatgtggctattgccacattcctctactgttttctttctgatactggacatgctagtaacttggagaggagaataaaagaatgtctcctggaattttacattcccattaatgtcctcattcagttggcagacctaggatgtatggttaactctcaggccattatgtttttcatggctcatttcccaaactgcattgttggtaggtgccttgctaagctgtaatgcagtgaagaagatggtggggcatttttagtaattggaactgtaacattaatttacaagattgaaccggggatgtctggatgctgacaagggagagccaagtactgttaatgccatcaatcctctaggaaggaattggtggtttttctgaagtgtgggggaaagggtggtttcttgctggatttcatggccagtaagtaaatttaaatgcttcatttttaatttggatgtttctgctagagacctttgatttggaaattagttattttgcatgtttgtcaactgtatatgtatgaaaatagaaaaaaaccatgctttttgtaaaaacccctaagatttgtatatgttcatctttaggcttctgaaagggagagaaatcatattggaaatcagtgttggtgttctgaaatctgcttgtaaaactctcatctcattttacattgatattaaaacattttaacagtgttggctagctgattacttgattaattatactcccatggccccataggaagctgttgtgggcctctgttcaaaagcacagaaaagagcagaaggaaatgtcttagaaagaatcaaagctgatgaaatcagcaaagattgggggaaaggaaggaagcctggtgtagattggattatatttttcctttgg

SEQ ID NO: 17187 - DNA, 1864 bp, Homo sapiens
gctccctggcttcagcctcctttccaggggagtgaacggttttgtctcactggcgttccaggtgccactggggtttgaaaaaatattcctgcagctagcttggtatctgcccaaaaggtattccagttttgtgcttgaaaccaggtccctggtagcataggcaccatagggactctcctggtctgcaggttgcgaagaccatgtgaaaagcatagtatcttggcctgagtgtcctcagggcacagtccctcatggcttcccttggctaggggagggagttccccatccctttcccttcccaggtgaggcaacgccccaccttgcttcagtttgcccaccgtgggctgcacccactgtctaaccagtcccaatgagatgagctgggtacctcagttggaaatgcagaaatcacctgccttctgtgttgatctcgcttagagctgcagaccggagctgttcttatttggccatcttgccagccaccgtctaatggcttttcagagtacgtgcttcagttatctccacatgtatataaaagtttattcattacctcatagacacactgaacttgactgctgaaactggttagaagaaaccacaatgtttatagtacatacagtaaatacaaggctaaccacagcatgatgatgcaagaaaggatttaccaaagcagagaaggggaaaatgaggctttttttattccagtggacacagggaaaaaataaaattaaaactaattgacaagttatgccctaggcaagagctgaactgtagatgcatacatctagcagcaacaattgtgcacaaagcaaataggtttctccatgaattgtctttggcaaattcttagaaatatttaaaacatttgttacagtcttcgttttataaaaatgtcatttttaaaaggggtaagagaatgttaaatacttcatactagacagactttgttattaagaacttttactgtattaactttttctagttcatatcttattaaatattaacaaaagtgcattcatatacattgcctcaggctgaggaagaataaagattattggccacatacaattgtgcccctgatggccttttccaggtagctcaccagtaagaaaatgtgcttaatgacttctctctgattggttttagagaataagaaacatgcagttgaaagtcagagtactttaaagcaagaggcatctgtccaaagactggttgatgaaatctggggaaagggagggaaatacaaagaatactgtggctgccctataagggaacaggaattcaaggcagtatccaaagttagaggtaaaggagcgggcagaatggtgctctggtgcggtaagcaattcttaagatggacttaaggtaaccaccacttggcatacatgtcctttataattcccatctgtttcagtgtgggcatgacttgtgaatatgaagaaattttattcctgtgattaagttactgatcattttattttgagttaatcaaaggggagattatcctgagtggatcttgcctaatcaagtgagctcttagacaagtggccacagcagatgttctcatgttggccttgaggaagcaaacagccatgttgtgagaggagggtactttgtggtaaggacatgagagtggctttctaggacctgagattgttccctgtccgacagcaagaaaacaggatttcactcttaagttgcaagtaattgaattctgccaacaaccagtgagcttgtagaagacctcaagcctcagatgagattgataccatgacttcagccctgtgagatcctgaacagaggactcagttaaactgtacctggactcctgacccataggactgtgcgataataaatgggtgtt

SEQ ID NO: 17188 - DNA, 1155 bp, Homo sapiens
aatttactttctgttctgttgtaatcaacagcagagtaagaaagatagaaaaggcaaaaaaggcacaagaagagattggttctcagttggagaaataggacattatctctctcactgtgaggcccaatctttccttaataactttggagtcaagttaaaaagtggctgcctggttatagggaatgtatccggtgaggagcaagcttcaccaatgggagcttaaatttaatgattcattgccatagtaaagaatggaaaagtggtttccttactaataaatcctgcacagttattgtgagaagtggaaatgactcacagagatttttaaccccaatctgcatacaacttgttgatgtggatttttttcttttttcgtgtgtgtgtgtgtgtgtgtgtgtgtgtgtgtgtgtttgtgtgtgtgtgtggtaagaacacaatctattttctcagcaatttttaagaatacaatacattgttattaactatagtcaccacattgtacagtagatttcacaaacttattcctcctgactgaattttatatccatagagcaacgtctccccaatctccctccccgcttcagcccctggcaatcaccattctactttctacttctatgcattcaactgatgaaaaatttaaggcttatagggctgttcatcttgccttagtcctcataccattaggctggtcaaactgtcaatataaatcattagctaaggcaaaagatttcctccaccagctgggtttaaatgggcttatcagataacagatggcatgaagcatgaggtcatggcaaatctggaggaggctgaattgagtcctgagtccattcagttgtttttttgtttgtttgttttttggtgagggtgcttctgacaagtataagctctctttactggcaatcatggctaatactgaaacaattcaacaggcaatggatgccctgaatttgatagaaactcatgaaaggcaaactcagagtcaactgttgcctgttaattctccaaacagtaccccaattggcctaaatcaaaatttctgtaaacagtgtggttatctcactcttaggtcaaacaaaacaactgtagtcaggcctccacttaagcatgaacctcgagatgaataaaagaggttatagagatccttaagga

SEQ ID NO: 17189 - DNA, 3105 bp, Homo sapiens
cattacagcgtgcaccacccccaatgagaagcaaaaatccaggaccttcccaagggaaatcaatgtgattttgcactaaaagcttaatggattgttaaaatcatagaaagatcttttatttttttaggaatcaatgacttaacagaactcaactgtataaatagtttggtccccttaaatgccaatcttccatattagttttactttttttttttttaaatagggcataccatttcttcctgacatttgtcagtgatgttgcctagaatcttcttacacacgctgagtacagaagatatttcaaattgttttcagtgaaaacaagtccttccataatagtaacaactccacagatttcctctctaaatttttatgcctgcttttagcaaccataaaattgtcataaaattaataaatttaggaaagaataaagatttatatattcattctttacatataaaaacacacagctgagttcttagagttgattcctcaagttatgaaatacttttgtacttaatccatttcttgattaaagtgattgaaatggttttaatgttcttttgactgaagtctgaaactgggctcctgctttattgtctctgtgactgaaagttagaaactgagggttatctttgacacagaattgtgtgcaatattcttaaatactactgctctaaaagttggagaagtcttgcagttatcttagcattgtataaacagccttaagtatagcctaagaagagaattcctttttcttctttagtccttctgccattttttattttcagttatatgtgctgaaataattactggtaaaatttcagggttgtggattatcttccacacatgaattttctctctcctggcacgaatataaagcacatctcttaactgcatggtgccagtgctaatgcttcatcctgttgctggcagtgggatgtggacttagaaaatcaagttctagcattttagtaggttaacactgaagttgtggttgttaggttcacaccctgttttataaacaacatcaaaatggcagaaccattgctgactttaggttcacatgaggaatgtacttttaacaattcccagtactatcagtattgtgaaataattcctctgaaagataagaatcactggcttctatgcgcttcttttctctcatcatcatgttcttttaccccagtttccttacatttttttaaattgtttcagagtttgttttttttttagtttagattgtgaggcaattattaaatcaaaattaattcatccaatacccctttactagaagttttactagaaaatgtattacattttattttttcttaatccagttctgcaaaaatgacctataaatttattcatgtacaattttggttacttgaattgttaaagaaaacattgtttttgactatgggagtcaactcaacatggcagaaccatttttgagatgatgatacaacaggtagtgaaacagcttaagaattccaaaaaaaaaaaaaaaaaaaaaaaaaagaaaactgggtttgggctttgctttaggtatcactggattagaatgagtttaacattagctaaaactgctttgagttgtttggatgattaagagattgccatttttatcttggaagaactagtggtaaaacatccaagagcactaggattgtgatacagaatttgtgaggtttggtggatccacgcccctctcccccactttcccatgatgaaatatcactaataaatcctgtatatttagatattatgctagccatgtaatcagatttatttaattgggtggggcaggtgtgtatttactttagaaaaaatgaaaaagacaagatttatgagaaatatttgaaggcagtacactctggccaactgttaccagttggtatttctacaagttcagaatattttaaacctgatttactagacctgggaattttcaacatggtctaattatttactcaaagacatagatgtgaaaattttaggcaaccttctaaatctttttcaccatggatgaaactataacttaaagaataatacttagaagggttaattggaaatcagagtttgaaataaaacttggaccactttgtatacactcttctcacttgacattttagctatataatatgtactttgagtataacatcaagctttaacaaatatttaaagacaaaaaaatcacgtcagtaaaatactaaaaggctcatttttatatttgttttagatgttttaaatagttgcaatggattaaaaatgatgatttaaaatgttgcttgtaatacagttttgcctgctaaattctccacattttgtaacctgttttatttctttgggtgtaaagcgtttttgcttagtattgtgatattgtatatgttttgtcccagttgtatagtaatgtttcagtccatcatccagctttggctgctgaaatcatacagctgtgaagacttgcctttgtttctgttagactgcttttcagttctgtattgagtatcttaagtactgtagaaaagatgtcacttcttcctttaaggctgttttgtaatatatataaggactggaattgtgtttttaaagaaaagcattcaagtatgacaatatactatctgtgttttcaccattcaaagtgctgtttagtagttgaaacttaaactatttaatgtcatttaataaagtgaccaaaatgtgttgtgctctttattgtattttcacagctttgaaaatctgtgcacatactgtttcatagaaaatgtatagcttttgttgtcctatataatggtggttcttttgcacatttagttatttaatattgagaggtcacgaagtttggttattgaatctgttatatactaaattctgtaaagggagatctctcatctcaaaaagaatttacataccaggaagtccatgtgtgtttgtgttagttttggatgtctttgtgtaatccagccccatttcctgtttcccaacagctgtaacactcattttaagtcaagcagggctaccaacccacacttgatagaaaagctgcttaccattcagaagcttccttattacctggcctccaaatgagctgaatattttgta

SEQ ID NO: 17190 - DNA, 1216 bp, Homo sapiens
acacaccacatttgaaatggaaacgtacactgaaatttgcagctaccccatagaataatttttggcacatagtaggcattcagtaaagatttgttcagtgaatgaataaaggcattctttatctctcatttttatttgatcattatcaagttgttgataaggagaaaaacgtggccatttacagatataacttaaaacatgcctcatgagcgaaatgtaagtttaatcatattcttttgacagttttaaggattctaatcaaggaaacccttttaagaaattctcatgtagatgaaataggctttaaaaatacctgtgctcatcactatctatttgaatgaaatctgtggttaatttatttataatgtaatgactccttgattaagaaaagtatataatgtattttgctatacaaatagaatatatataacccacttttaaatgatgagcaaggtggaaaatctgttcttaccagtaagcagagcgatatatcaaattccttttgtgttcttttgttaaattttcaggtgaggggaagtggcttcgaaacattgactattaccgtttagatggttccactactgcacagtcaaggaagaagtgggctgaagaatttaatgatgaaactaatgtgaggtaggaaaaattttctgtatatgtagaaacattaaaataattaattttaaaatttacataaagttcactatttttattgtgtatttgaatgtttttagcaaatgcaaggtacagtcaggttgcaaaacagtgtcatcactccctaaccactgaattcacttatggaatcatataatttgtagccttttgagtctcacttctttcacttagtgagatttatttgagaatcatttacattgttgcatataccaataatttttaaaaattgttgtatagtcttccattatagggctatatcacagtttgttcagctacttccacttgagggacatttgagttgtttccaggttttggaattaaaatcaaagctgctctaagctttcatgttcaagtttttgtgtgaacataagtatttacttaaatgaaacaaaagcctaggattgtgattgctgggtcatatagtaagtgtacatttatctttgtaagaaactatcaagcagttttccaaagtgactgtacaatttttcattcccacccgcagttgtatgagagttccagtttccttacattcttgtctgta

SEQ ID NO: 17191 - DNA, 1148 bp, Homo sapiens
tggccgtttattgtttaagcaaaacaaagctataatattgtaagattgcttaatttattaaatttttttgtggatatttaaacgaaggtgacaatctgttttcttataggtggtaagttttcttcatacagttcttttgtgtgacaaactggatttcagcacggcgttagtggtttgtcctcttaatactgctttgaattggatgaatgaatttgagaagtggcaagagggattaaaagatgatgagaagcttgaggtaacttattttaaatgttttctattattaaaatagtcacatgaaattcatatagtaaactatttttaattttttttaatttttaatgttttttaaccagtgatgcatatttcagtgggaatatttaatattcacatgtttttagtagctacttaaaaaaatctttatttccccacaaaaggtttctgaattagcaactgtgaaacgtcctcaggagagaagctacatgctgcagaggtggcaagaagatggtggtgttatgatcataggctatgagatgtatagaaatcttgctcaaggaaggaatgtgaagagtcggaaacttaaagaaatatttaacaaagctttggttgatccaggtaaggtattaatagacagtgacataaagaagcaagttgaataaaaaatgtgtttatattttaacaaatagtaattgcacagctactaagtatctggtctttgttgtggttatccttcaggtttttgccttttagaaaattcttagtatttcaatagaataaaatcacccttaatgtcgccagctgttcagaatttatttgctgagtctgaaagtgtttagggttttaggggataccttgtaaacacttaaaaatgcatcaaatgcctgtgttgcaatcaaagattcttccagctatccaaatattaggtgataacaagagctctctccatatcctgaaaacagtttgtgtctttccaaacttcatgtcattagaagaattgctgcttgcttatctccttttaaggggccatcagtatgaaaggttaatattttcaatactgttgatccttatgtgatagtaatctgatgtgagagccagatgttgatatatttgccacttggaaaagcaacacgttgtactgtctgcaaaac

SEQ ID NO: 17192 - DNA, 1442 bp, Homo sapiens
aatattccattgtaagtgtgtgccacattttgttagcccagtcatctgttgatggacatttgggttgtttctacctttcggctattttgaataatactgctatgaatatgggtgtttacatatctgagtccctgtttttaattattctaggtatatatggaaaaatggaattgctacatcatatagtagttgtatgtttaacttttggaaaactccacactgtttttctctggtatctgtaacatttgacgttcccgttagcaatgtaccaagattccaatttgtctgcatctttgccaacacttcctttgtttctttctttttttctttttttctttttttttttttttttaacaagaaacatcctaatgagtgggaagtggcatttctttgtggttttgttttgtattttcctaatgactggtgatattcaacatcttttcatatgcttatatcttcttttgagaaatgtttattctagttggtagcccatttttaattgagttgtttgttttttttaataggtgttgaagagttgttttttttttttgagacagagtctcgctctgtcgcccaggctggagtctgatggcacgatctcggctccctgcgagctccgcctcctgggttcacaccatcttcctgcctcagcctcctgagtagctgggactacaggcgcacactgccatgcccggctaattttttttttttgtatttttagtagagacggggtttcaccgtgttagccaggatggtctctatctcctgaccttgtgatccacccgcctcggcctcccaaagtgctgggattataggtgtgagccaccgtgcccggccgaagagttgtttttttttttttaatactactctattgctgaatataattctaaaggttttcagcatgttttcttccaccttttcctgctgtgttaattaatggaatatgaaatggataaattaaatgactttgtactgtttacctctaattgtttaaattctgtagagtaattctgaggaagaagaggaggaaaaagaagaggaggaggaagaggaggaggaggaggaagaggaggaggaagatgaaaatgatgattccaagtctcctggaaaaggcagaaagaaaattcggaagattcttaaagatgataaactgagaacagaaacacaaaatgctcttaaggaagaggaagagagacgaaaacgtattgctgagagggagcgtgagcgagaaaaattgagagaggtaactaatttctttcttcttctttttcttttgtagctacagggtcttgctctgttgcccaggctggcctcgaactcttgggctcaagtgatcctcctaccttggcctcctaaacttctgggattacaggcgtgagtcaacacacccagccttaatttatttctattaatgatttattttatttggtatatgacttcaa

SEQ ID NO: 17193 - DNA, 1260 bp, Homo sapiens
ttagagtttaaccagttttcaaataaaatagaaatacacggtatgagagcatttactttaataagacttaataggtttaaatgtcaacagtgtagcctatacagatatacttaagtaaggggtggctgggtgaagaaaaaaaaagacactatcagtgtagtgaagaataaggaaaacaacagtattaaagactatagctataatgtttcaacataacttttaaacacttcctggacaatagcataccccatgctcataatcttcaacaagaagacagcatggtatagtgcatggaattttggaataatgggcataagggtatctgatttctaacatttttaacaactgtctgtgtcatcatgggcaagtgactttactttttgtcaaaaatttactatatttaagaagaaaaagttgggcgaaattttctgtaattctagtaccaaaaaatccatgatagatttgagatgatttcattaaagagcactacattaaccattcatttattcctaatagtaagttctaacattaagaaaacataaaaatatacatgtaattttctgtcataattttgtaagaaattaactgacttagtaaatgccctgggttcagctgttagtttcgctcttttatatcttgctgatgctgttaggtttctctgtttcaaaggtcagcattctgctaattaacagaagaatgtttttattaaggtgaatgaacagttttattttacagttttgaatagagcttaattgtggacacaaatattcagattctgcttgcctacttttttaaattaaaaaatgtatatccatttattttatgggataggtggtaggttccagaatggagtgataagggcatacaatttattcatcagggattttacattatatcatcacagccagatactgaaagcatttaaaattttactcttttttaagatgctttaatttttcttcatttatatttgctatttgattttctatacatcatgaggcctcagatgttactcaaaggctaataatgttttaaacattctatatcttaatttaactgtgaatgatttactttaatttcatatttaaccaccaaataagagtgttgttaaggtataatttttttgtgtgtgttagagcttgtcaaaatataaatatcattttcaacttttaagttacctgatcgtatctctctgtaactggcaagtattttattggaaagtatctttaattccaccttgaatttgtgattaaaaaatac

SEQ ID NO: 17194 - DNA, 1595 bp, Homo sapiens
aagagtaagcagatgacctaaattaccactaaaattactggcagtaaaatttaaattgcattataacaaagagattaaaatgagttttgttgggaataatgtttatttttatttttttacatatcttttcagtttcctgaaagaagggaataatgttttaatctttaaaacatttcaggtggtgtgcggaaggtggaaacttgatttgttgtgacttttgccataatgctttctgcaagaaatgcattctacgcaaccttggtcgaaaggagttgtccacaataatggatgaaaacaaccaatggtattgctacatttgtcacccagagcctttgttggacttggtcactgcatgtaacagcgtatttgagaatttagaacagttgttgcagcaaaataagaagaagataaaagttgacagtgaaaagagtaataaagtatatgaacatacatccagattttctccaaagaagactagttcaaattgtaatggagaagaaaagaaattagatgattcctgttctggctctgtaacctactcttattccgcactaattgtgcccaaagagatgattaagaaggcaaaaaaactgattgagaccacagccaacatgaactccagttatgttaaatttttaaagcaggcaacagataattcagaaatcagttctgctacaaaattacgtcagcttaaggcttttaagtctgtgttggctgatattaagaaggctcatcttgcattggaagaagacttaaattccgagtttcgagcgatggatgctgtaaacaaagagaaaaataccaaagagcataaagtcatagatgctaagtttgaaacaaaagcacgaaaaggagaaaaaccttgtgctttggaaaagaaggatatttcaaagtcagaagctaaactttcaagaaaacaggtagatagtgagcacatgcatcagaatgttccaacagaggaacaaagaacaaataaaagtaccggtggtgaacataagaaatctgatagaaaagaagaacctcaatatgaacctgccaacacttctgaagatttagacatggatattgtgtctgttccttcctcagttccagaagacatttttgagaatcttgagactgctatggaagttcagagttcagttgatcatcaaggggatggcagcagtggaactgaacaagaagtggagagttcatctgtaaaattaaatatttcttcaaaagacaacagaggaggtattaaatcaaaaactacagctaaagtaacaaaagaattatatgttaaactcactcctgtttccctttctaattccccaattaaaggtgctgattgtcaggaagttccacaagataaagatggctataaaagttgtggtctgaaccccaagttagagaaatgtggacttggacaggaaaacagtgataatgagcatttggttgaaaatgaagtttcattacttttagaggaatctgatcttcgaagatccccacgtgtaaagactacacccttgaggcgaccgacagaaactaaccctgtaacatctaattcagatgaagaatgtaatgaaacagttaaggagaaacaaaaactatcagtt

SEQ ID NO: 17195 - DNA, 1179 bp, Homo sapiens
ttttttgattgggttgtggtgcagttccaggtatttaggtatcttttctactccatatcctgaaggatatccttgggtttatttctaggcgaggggggacttaacacagggttttgcttccagaggaccctagtatactactttttgtgatgtccagccttaatgggacctcaagtgtttccccactttctgggcaaatttcgaggagtaattaggccctatctttatttacttatttattccatgaaggatgaagggcaggttaacgtgggctgatgcgaagtaagatttattgcaagggaaaatgcctggcaggcctcctcttaaccaatcaagcacgtttattaggttgaagctgtttttctgtgtgcttctgatttgcctcttgacgggtctgaaaatttgggtagtcaatatgaaatgtatacacttttacccaggtggctggctggcgtttcagtttgacatttgaattttcatcccacaatgtgaattaagtaatttttttactcggagatgcatccttggcgtccagtggcaaaataaaattacaaggagcatgggtcagaattgcatttcaagttggcgaaatgtgcctttgagtaactcttagattggcatatgtttttagagcaatttagctagaatgtagaattgggcaatgagcctatgatacgtatgtctgtatttctgcatgaacaagcagtagattatattttctttaccttggggaaagatatgcttcagttcttagattgtagatctctagttgtgtacacgattgtggccttggtttctgaatttgtcagtaggctcaaatacaacaaatctttatctgtggggtattaggcacgtaagtggtacccagtataacttgttggcctgtaattaccaggcactcatgttcatatgcatggatggtgtaccttacagttaaattatgacctctagattttactaagtttcacaaagtctacatttgaaactatagtttgaagtcggatcttctcagtttctttagaatgaacaaattacgtatatagaatttctgaatagaataattaattttacacaagggtcagtttttcttactagtcttggatttttgtagatcttgatgataagagtaataatcataactaagttgagtgcttattgtcgttctttataatcttgatg

SEQ ID NO: 17196 - DNA, 1619 bp, Homo sapiens
ggcgcagtgacttacgcctgtaatctcagcactttgggaggccaaggcaggcagatcacgaggtcaggagttcgagaccatcctggccaacatggtgaaaccccgtctctactaaaaatataaaaattagctgggtgtggtggcaggagcctgtaatcccagctacacaggaggctgaggcacgagaatcacttgaactcaggagatggaggtttcagtgagccaagatcacaccactgcactccagcctggcaacagagcgagactccatctcaaaaaaaaaaaaaaaagtaagaaagaaaaggactcccttagaatgggaaagaaaaatcataaaatattgagctgatgcctgtatatagaaattaagcgtttctcgaaagctgttctatgttttgctgttattttagtctttattctcttcctttaggtggagaaacaaagtaccaatttgaagggattttttttattttgtcttttggtttctgtcagtagaaataaccatatgtgctaaccaaatttctgtgaagaatgttttcatggttatcattatatctaactataacctcccccatagttatgaagagtaacctgaaatgccactattgtggaaataggataattgtaattgtgaaaaaataattttaaggaaatcttacaagtattacattaaaaagatactatgactgccacctgccatttaccttctaataaccctgccatgtggtttgcagaaagagatggatatagtagcctcagaagaaatattttatgtgggttttttgtttttcgttactagatttcatggatgaggggatatggttgaccttttactttttaatggagcagccagtttttgttaattactcacttgtaaattgtgagattctgaattccttacctgctattcttgtacttgtctcaggccaaatctatgctgtggttcttatgagacttgtatgaagatgccctgatttgtacagattgaccacgggaatactactgccatgtaatctgtatagttccagataatttgtcatgaacattgacagaatgacaattttttgtatttgctttttctccctttaagagcacattcttctgtaaggagaaaggcagcattctggctaaaatgtgtagaaggtaatttactacacttataaaatagtgtgacttttgtgaaaattttgaattagctttcatatgaagtgccttaagtagactcttcatttacttttctggtaatggtttaaatatcatttgttatgcatttttaagatacagttcagaatgacacattgtagtggcaaagataaccaaatgtctggctgtttgctttttgaccatatcaataaacttttacaatctaaattctgagtttttgattaccatctaaagaggagtgagttttaaacactaaactagaattgtaaaattaggattttacattttgaagttataattaaattaatttaaatttcatattgtcctaaggacagtttgatgggacagtttctttaagtatttctggattgggatatattattctaggaatctatacatggtccctcattcttaatgttgttacccattaggtgagtcaaaacaaccaagatgag

SEQ ID NO: 17197 - DNA, 1131 bp, Homo sapiens
gtttcagctttctgatgagttaaaaaggtcccagagatatatagacactggagtactggaaattgaaaaacgaaaatcgtgtgtgtttgaaaagaagaatgcaacttgtatattttgtattacctctttttttcaagtgatttaaatagttaatcatttaaccaaagaagatgtgtagtgccttaacaagcaatcctctgtcaaaatctgaggtatttgaaaataattatcctcttaaccttctcttcccagtgaactttatggaacatttaatttagtacaattaagtatattataaaaattgtaaaactactactttgttttagttagaacaaagctcaaaactactttagttaacttggtcatctgattttatattgccttatccaaagatggggaaagtaagtcctgaccaggtgttcccacatatgcctgttacagataactacattaggaattcattcttagcttcttcatctttgtgtggatgtgtatactttacgcatctttccttttgagtagagaaattatgtgtgtcatgtggtcttctgaaaatggaacaccattcttcagagcacacgtctagccctcagcaagacagttgtttctcctcctccttgcatatttcctactgaaatacagtgctgtctatgattgtttttgttttgttgtttttttgagacggtctcgctgtgtcacacaggctggagtgcagtggcgtgagctcggctgactgcaaactctgcctcccaggtttaagcgattctcctgtcacagcttcccaagtagctgggatttacaggtgtgcaccgccatgccaggctaatttttgtgtttttagtagagacagggtttcgccaagttgtccaggctggtcttgaactcctgggctcaagtgatccgcccgcctcagtctcccaaagtgcgaggatgacatgtgtgagctaccacaccagcaatgtctatgcttctcgatagctgtgaacatgaaaagacatctattgggagtccgaggcaggtggattgcttgaggccaggagttagagaccagcctggccaacaaggcaaaaccccgtctctactaaaaatatgaaaattagctgggcttggtggctcatgcctataatccta

SEQ ID NO: 17198 - DNA, 1187 bp, Homo sapiens
aggcggggtgtggggcggtagtgtgggccctgttcctgcccgcgcggtgttccgcattctgcaagcctccggagcgcacgtcggcagtcggctccctcgttgaccgaatcaccgacctctctccccagctgtatttccaaaatgtcgctttctaacaagctgacgctggacaagctggacgttaaagggaagcgggtcgttatgaggtaattctgcacgtttgcccgcgtgctctctgtgctctgtcgcaaacctctttggccggagccgacttgttctctcgtctgctctaagttcttttagcttttggctgggccccaggggtcctaggcttggagggcgaggctgctcacgggtttggtggtttctagccgcattttccccagcccagaaagcacccgaagtcacccttcggggatggatcccactgaggaagggctgagattgccgctgggacccattttgtcctttttcctattggtgaaatgcagttccgttgcctccagctcccagtcggcgagatgggacttaatgcttatcctgcaaatctctaggcttcaaggaagggaccttgaaaggtcattttactttcccttcccccacgctcctagaccgtcgcagccaaatgagaaacggcccacatctcacaggttcctgcacaaaaggatatttttccaagaggatgttgatttaacttcaggagtagacccccccgccccccgccactaaagaattggggtgggagggtagggcggggcgaactggaggaggccctgcagagcttacgtaacaggcgtctgctgccctgcagcgcggtatcgttggactcttgggcacaggatttgcatcaggattgtgacatactaggtaatggtagagcagggtgtggctgctcatacttgctggcctccaatctcatccccacgtgtggctagaaaagtagaattttaaaattgggggaagtttcctcgtgcactttgggtctcttactctgcgcatgtggatctctagtcacttgccaacacggtttctctcttatctgccagaattgttggtagagtgggcagcttttacatttatcctttttgtcacgtgtgatatatttgtgcataccaggagcaaggtgcaggaggatgagtcggtatgtaactgatggacttgactgttcatataccttaacaggatcc

SEQ ID NO: 17199 - DNA, 1256 bp, Homo sapiens
tggagtggagaaagttagaaggtagtgttgtcattagcagtcattactacctgggcagtacagaggaacttcagataaagctcctggcatccactgaggcggggagggacagatagaaacttggtctgagagttatggtctagtagacctggaatccacaatgtaaaagttggccagctcctggccatatatcctaaaaaagagctggcatgttattgggaagataaagtgggggaaatctggcttactgggccctatagtaatgctgtctatgtatgtgtgctctctcaaaaacaggtaaagtccttcctggggtggatgctctcagcaatatttagtactttcctgccttttagttcctgtgcacagcccctaagtcaacttagcattttctgcatctccacttggcattagctaaaaccttccatgtcaagattcagctagtggccaagagatgcagtgccaggaacccttaaacagttgcacagcatctcagctcatcttcactgcaccctggatttgcatacattcttcaagatcccatttgaattttttagtgactaaaccattgtgcattctagagtgcatatatttatattttgcctgttaaaaagaaagtgagcagtgttagcttagttctcttttgatgtaggttattatgattagctttgtcactgtttcactactcagcatggaaacaagatgaaattccatttgtaggtagtgagacaaaattgatgatccattaagtaaacaataaaagtgtccattgaaaccgtgatttttttttttttcctgtcatactttgttaggaagggtgagaatagaatcttgaggaacggatcagatgtctatattgctgaatgcaagaagtggggcagcagcagtggagagatgggacaattagataaatgtccattctttatcaagggcctactttatggcagacattgtgctagtgcttttattctaacttttatttttatcagttacacatgatcataatttaaaaagtcaaggcttataacaaaaaagccccagcccattcctcccattcaagattcccactccccagaggtgaccactttcaactcttgagtttttcaggtatatacctccatgtttctaagtaatatgcttatattgttcacttcttttttttttattttttaaagaaatctatttcataccatggaggaaggctctgttccacatatatttccacttcttcattctctcggtatagttttgtcaca

SEQ ID NO: 17200 - DNA, 1271 bp, Homo sapiens
acatttccttacaggtttcaacaaacgtgccattgataaatgctggaagattagacacttccccaacgaatttattgttgagaccaagatctgtcaagagtaagaggcaacagatagagtgtccttggtaataagaagtcagagatttacaatatgactttaacattaaggtttatgggatactcaagatatttactcatgcatttactctattgcttatgctttaaaaaaaggaaaaaaaaaaactactaaccactgcaagctcttgtcaaattttagtttaattggcattgcttgttttttgaaactgaaattacatgagtttcattttttctttgaatttatagggtttagatttctgaaagcagcatgaatatatcacctaacatcctgacaataaattccatccgttgttttttttgtttgtttgttttttcttttcctttaagtaagctctttattcatcttatggtggagcaattttaaaatttgaaatattttaaattgtttttgaactttttgtgtaaaatatatcagatctcaacattgttggtttcttttgtttttcattttgtacaactttcttgaatttagaaattacatctttgcagttctgttaggtgctctgtaattaacctgacttatatgtgaacaattttcatgagacagtcatttttaactaatgcagtgattctttctcactactatctgtattgtggaatgcacaaaattgtgtaggtgctgaatgctgtaaggagtttaggttgtatgaattctacaaccctataataaattttactctatacaaccactgtttcttttatttcatcacttgagatatagtcaatgtgaataattaatattacttatttagcttttggtgtacctgtaacagatctaaaattatgaggccaactttgcccccattcccacctacacatatttatatgttatattttcatatttcactcccttttgacagtatattaattactcttttataaacatcccataattggcttatcatgtaaattcaactatttatttagaggcttcaggcgcatagcactttaaaatcttttgaagtgttttctttctcatcaaattaaacaactatacacagctataatggatcactaaggactaaccttggataagatgttgatagcttttaagaacttcaaatgctgtgatcattactcatgtatctaagagtctaaacttcataccaaggggacatgagtactataaactatttcccttgtattagg

SEQ ID NO: 17201 - DNA, 1180 bp, Homo sapiens
ttggagttgcaccagccccgcccctcggaggcacccggccccgccccctcggtccaggagcagaaacaggaaatgggattgcaaacctagtagctgcgcgtgccggctattcaggactagcgcaggactctgggcgacctcacatcccactcgtgctgctgccccgggcactcgcctcccgcgaaaagtcgtgggaccacgtcgaatatggggagtatcctttcctgtttgaaaagctgctcttagggcatagggaaaggtggggagggcagaggttgggaccctgggaggtgcctggtagtgacctttttggtctagctgtggagggctgagagcgctggcaccgattggtgggctccagcagcttggttttagtttttctgttttttgtttttttttttcctgggactcgctgccatcctagaatcaggggaggtgggactgctttaaagaatggtcaggggagtcgccgcactggtttgagatttagagcgcgagccctcccactctgagagcttctgtcacctgtcctttagtgaattcgtcctctttgaaattgttgggaaactgtgcgagaacagaggcaaggcaacaggagtttgccagaggtttagggtgtaggtgtaggttttgagtgcagtactagggcagatagcttttgttgaacttcacttcttttcctgggtggaggtgaccggtaaggaggtaaagtgcttaacaccaagcctccaaactaagatgattgcttgcttaataataggatttaacacatgaggaaactcatatagttccctaaagctataaaattcatcaattgcacctgtgttcccacttaagaaatgaggtcagagtttagaaccaagctgtctaaagccctgaattaaaggatgaaattgtttttcacaacggaaatgttgtaattcctcttcttcaaggagttggtattatggaaaatagaatagcttggtatactgccactgaatgaaacttggcaaaataataaaatgtgagtaatagtagttgtttgatagctcatgttaaagctcttttagcttcattcgtttgtaagcctacaacatagaaagacatttggtgaaagaattatgtaagccatactgagaatattgttaacattatatcatgtgccggactggccgagaataaaatatgaacccttgat

SEQ ID NO: 17202 - DNA, 1169 bp, Homo sapiens
aaattgtgtaatagatcatttgaaaagtactgttttgttacccttgagtattattcatctaaaatattaataatgaagtgctggtagttctgaattatttccgtacgtttaatttataaattagattcagtattgtttataaaacaagtgtttttgtctagtctgaccctatagagcaaaaaatatgcccatgatatcctcatagtcatgaaattaccaagtaatccttttacttttgtagatttgtgttcatttttattctaaatgtggttagtcgttttcataagaaaaagaagttactaaaacaaaacagtagttgaaggttgtggtacatacatttttgctttccgtttttttcaaaaatttaagactgctgaacacaacgacaagtttttaacactaaaaataccttttataagtttgcttgtaagtattcaagcagaaattctcagagaattatctgagataatgagccacattctttctctaaacatgtgttggtatctccttcaaaaaagatgtttaccagtgggcagttgtagcctgttctcttcatattagtgataagaaatgacttaaaaaaaaaaaaagactagactgttgctacctagatttgttcacttttttattcattcattcagcatttactgagtgtcttctatgtgccaagcactataattttataaagagctttacagttcacaaagtccataatctcagtcatcagaatgacatcagttaatttcatttttcagatcagaaagatgagttttagtgaaatcaagtaatttgcctaagcctacatggctggtaactagaaaagccttgattcatccggcatatctgcttccaggtttctcgtcttaacttttatatcttattaataagatgttttgttctttctttcttcccaatctctatgaaatggagacttctaaatcatgcctgtgtatcttgaaaataacatttctttttgcttctggctcagatctttaataaagaggaccttgagatatggatcttcaaacatcttagtgctttggaatttttaaaactaccaggtttggaagtagaaaaatgattgaagctcaaatgattgaattgtatatcttacacactcttacaaaaaggcaaatgcccaagaaaagtgtagagaatttactcctatc

SEQ ID NO: 17203 - DNA, 2181 bp, Homo sapiens
atcaacttatagattctgctcatatcattccaaagggttcttctgttctagtctttcaggaaagaaccttattgcactgcacactcatgttgtgaatcattattttatagataaaaaacatctttaaaaacccttattgtcttgtttacagcagtagagtgcacatggttccataagtgagcttgagttccaaggtcagttttactccccaaatttaatattacagatttgttcatttgttagatacttacatttctgaggtaagagggataatagcaatttctgtttctgtaacagcaaatttgttgcacttagatcaggctcatgggataaaacagacttcttagtatatacctagctatcccaggatatttcttaagctaatgtgtttgtctcatgctttcaatcatttcatgcatctgaaaacccttaagtgcagaggaaggcgtacacacataaaactttgcttttttggtagggtcggcagtagggttattcttggactaacatctttaagcagttttcacttgcagtggaaatgatgttcaggctttaagagaaagtattgtgaattgttaatggcactaacttctgttactagacagcagaccaagctatttttttgttgtagtctttttttcactaaaccaaaactacttctggttgtaactcagctgccactttaaaccatagtagagattcaaaacgttcctatttgaaactacatttgatttttgctaaaatgtgctgtttcggttatttatctcttgggcatttagactaaattgtgcctgtattcctgaaatcaataatactttggcttatcctgatctaagtaacatagttacttaaattcctggatatacccaaatatggatcacatgtatcattttagtttgaaattttttgttgacattcttctatgaagagctgacctcttgaaatgtagaagaattgacatttgtgtgattttggctatctggagctttatttataatttattttgaaaaataaaaatgccacatttatttcccaaatgtcaagattttctagaattagataattagaataataaggctgaagacattttaaagcatattttatatgtagtgaaatactgtgaaaatattagtgaacagcattttgctgtaatgtttatttcagttattaagatttaaagagttagtcatcagggtatgttagataaacatagttatcatttattaaacaaacagataattttctgtttgcatgcaaattattttaataagtgtgaaaataaaagtttggaagatagtatttttacttttatatctggacttttttttcccccaatttacactttgctttcttgtaataccacctcctgtgaatgtgttgtaattagtatcacattgattactttatcattttaatttctttgaggccctttaaacctacgtaaaatctgggtccagccatagcaaagcaagtacaaaatgaacaaagaattttgaagaaaagcctaaatcttaaattgctaagaaaaaacactgttatatttaggcccgtgagagcatatacatgtataaacctaatcctatgctagatatgaatagtcagtgagctgtaatatttctcataaatgctaataatgtttaaattcccagctttaagatcttagtgtgtgtatatatttataaaatctgaattgtgtgtttcttctatggcttactgtgtgtttctctttcagcaataggatgctctctaaaacattcactagcctactagcctacttactaaatttttgtatatgtgtgtttgtgcacttgtatgtgtgtaaagttttttccccaacttgacacaccttatctcagacattcaaaaaaagagaacattttgtatggaggacagtctgccaactttttgcctctctacagctcttagcctgtatatttactgcttgatcattcattatgccttctagataaccagtccaggttttgtcatatacctgtgtccctctattctttttatttccctttttaattttttttcttttttttccctccccagaaatcaggcttgtgttggaattcttctctataatactttgtttcccgcagatgcaaagtaacaaagtaactgagtaaaattagaaatctcattctgcacaactgtgcgctcagatatttaactcag

SEQ ID NO: 17204 - DNA, 1203 bp, Homo sapiens
attatagcatagcatgagtgacctttactctagttcccaataagttcctgatctctatctgagaccacctcagcctagacttcattgttcatatggctattagcattttggtcaaaaccattaaacaagtctctaggaagttccagactttcctacatcttccttgatttacagcctgccttgaagatctgtaatataaatactagtatgaagagatttttaaagaaagctaaaagcaagatagaagaatcaactgcatttatgtacatatgtaatacaataagaagtgtgcctaatgatgatgctaattaattgaaaaaagttaaattatgcttggtagtatttatttaagatgtggtcatatgtaatttatttcagaaagatttctaccacttggaaatcaaaatacataaagaggttaaaatgtaaaataatcacttatcccgaaaacctagatggaagcttcttataatgctagatacagtacttctgttgtcaacaaaaagtagtaatttagagtgggaacagagctaatattctcaagagcatccttttaagaattttaaaacattataggtgatagattccgcagtataatagatgacgcctggtggtttgggactgtggagagtcagcagccttttcaaccagagtatcctgatagttctttccagtgttacagtgttcagtaagtatgtttatgatcttttatgcctaatatgacattgtagtagtatgtggacttttaatagcctccatcaggagtaatgcccttttatctgacttatctagtctcacaatacctgtacctgtaaagaagaaatttgatggtaaaatgctcagttcttcccttgttttagtcaaagcaaagttctttgttttctttgactaaaacaaaggaataactaaacactttattgctacctcttttgttgtttgcattttctattaactatttctactttagacaagaattgcaactattttttaatgggaaatatggaaactaatttactacttaaagtaattgttattgctggaatatagctatgaatattagtacttagtcttttgtttagtcgtatgaattctaggcagaggtggttgcatcatgtttggaagtactatttgttttcaacatctactttaattattcttgaaaatccagagttgtaagattgctaatgaatgaatcctctcaag

SEQ ID NO: 17205 - DNA, 1289 bp, Homo sapiens
atggaaatgagaaaggagaagatgcaaaagagaaagaagatggaaaaaaaggtgaagacggaaaaggaaatggagaagatggaaaagagaaaggagaagatgaaaaagaggaagaagacagaaaagaaacaggagatggaaaagagaatgaagatggaaaagagaagggagataaaaaagaggggaaagatgtaaaagtcaaagaagatgaaaaagagagagaagatggaaaagaagatgaaggtggaaatgaggaagaagctggaaaagagaaagaagatttaaaagaagaggaagaaggaaaagaggaagatgagatcaaagaagatgatggaaaaaaagaggagccacagagtattgtttaaaactgccctatgtagtttcataatttggtaacatgtaccttcatgttgtaaagttaatagagataaatatttttatcaaaaattttataaacacagcctttctttagcattgatttaatttcagaacatcttcatattgattattagccataaagtttctaacatgaaacatttatctataaattttgtgattatagtagtggaatacatagaaaaaaatatgctttcaactttgtgagtgaatttcgtgttgtgtaagttatatgtcaaatctttgaattttaattttactcttttatacatgtgataatttcataaagtgagggatcccaaaaaaagagtttcatccaacattcttgttctgcaggttgcttttataaagaaggtgaactattttcatgtaatgttaagagttaaacttatctttcccaaatataactttattattagcttgggaaaaatgaaattgtattcccatttttaaaataaatacaaatgtttatttcagaagggcagttttgattatatgtgaatacacaaattttactggatttatcttaataaaaagactctgacgatgattgtgttttgttatatcttcaaaaatatagctagtgaaatattgtgcttaatttttttctattgtgttattcatgaaaatatttaatattcactgacataaaattaatataaagtaaaattcaccattttaattataataaaaataaagtatataattcaatggttgtcagtatattcacaatgttgtgtccactgtttaattccagagaatttttatcacccaaataagaaacaaagcaccaattagcagtctcttcccattttcgcccaacttatcccccacctccatcccttggcaaccactaatctgccttctatctctatggatttgcctattctgaa

SEQ ID NO: 17206 - DNA, 2381 bp, Homo sapiens
ctgccattactatggcaacttaagtgtatctgcagctctacattaaaaaggagaaagagaaataacctgtctctcattcctaagttgcctcattaattttcatgaacaagaatatgtacctttttgatgctatattactgcgattaaaaagttcttgcaggtaatgtttatgatatgttaaacgttgtaatttcctatcgtaattataacattcccattcttttgtagatgaaacttctacatattgaaccacagattttctgagcttctaaatgtagcctttcattgcacatttcagtgatcagaatagatatccttttacacgcacaaaagcaatagattcattcagtggacaagttccttgtttaactacacagctatgatggaatgatatatccaagttccttgcctcagtgaaatatgcatatgtatatcatgaaagtgggatgccaagtaagcttaaaatggcattctctagcaaagagattagacttttaaataactcttataaaacaggttggcgatcatttcccaagattggtttcccttgagtttttgctaaaacaaatcttagtagttttgcccgtttaaaacaactcacaatcgtaaatgctactattcctaagatatcttacctttttatttcagtttagccatgtattgtatgagtgtattagtctaagcagtgagaatcttttctatgcctctattccagcaaaaagtagaagtatcaaataaaaagggcaacttttaaaatattaagcctgaagacttctaaaaagacaagaaacatggcctaaataaccaacatagatttacatagtaagtttcacactaccttattaccaaaagcaaacacctcttactttaaactacattatcatgtatatctattgtatgctggtctttactttttgccaaaatcaacatataatgaagagatgcctttgtttcatgagattcaaacttgatgctatgctttaaaataaactcagtacttttagaaacataacttatgtgttcttggagtttatataatagtaattttagatgagtaatatctttttttagagggttgggaatgcaaaaagagaaaatagtagaaagaaaaagctttgaatgcaattcaaggttttcgttttctatgttttctttttagggcttttaatctcacaatacacatgaggtcaaatgaacaattttattgggtttacaaaaatacggcataaagaactctagagaaaacagggtgctttgtaatacactggaaacgcaaaaaaagttttttagtcaatattttctcctaagctttattaaatgttgctgatgatacttgcaatattttatgtggtcattttcacttttattttaatgtcaaataagttaacactgccaaaatgggcattctttaaaaatagatgtattttttgccatgtttatataacttaaaattaacatagtatattaaagtaaaaggttgaattgagtcttcctaaactgaaatattttattttgtcagctgagaaatatgttttgtagatacaaaaatgcaagtgaaattctgaatatgaaggtgagttttatttaaaaaaatctccaaaatatttggccggaaaatataatctttgccacttgttatattacattcagattgtttctgtttgtaaatcagacttgtttatttgttatgttcagttattgagctggtttgttcttgggaatatttgactctcaggaagattttcattttcaccaaacaatgcaaattggacgtcgattgcattgttaaatgtcaacatttctttgggagtctgagtgtaggggtaaacagaattttaaaacagaagttgttaattacttgcttgggaaagtttaaatacagaaaatgttggtgaagtcagatttcattgcacatattccattcattcagcaaaaggaaaaatgaggattcacatggattttattacccagttgtggatgctgaaaaatattgaaaggttgacattggtctaatctttttaatgtaaaatacatatttcttttcttttgaagaattccaacaaaactgattaagaaacatgcacatttgattaatttgaaccttctagtcttctgcttccacccatcattcttcccctgtatctattatcaccttcctttatttagcaaacaaaattttgaaatcctttgtaaagagtactataatgttaccataattcctattttcacacaattgtctttttaacatctttactgagatatacaattcacatactgtaaactttgctcatttaaagtgtataaggcagtgacttttactatattcacagaatcatgcaaccatcactaagatttaagtttagaatgtttcatcacccaac

SEQ ID NO: 17207 - DNA, 2146 bp, Homo sapiens
tgtaagatttgtggtgttcctaggccaaactggatgaagatgaaattaaatgtgtggcttttttcctattcttatcaaaggcatcgttgtctgctaaattacttgaatattaagtaatattaaatccccatttttaggggaagtgagatttaaaaaaccattcacaggtccacaatattcatactatgtgtttgcagtagtgttcaagtgtttatttaagcatataattggtgtccaccaggtcctcacaacttctctgcacacaagcttctaaaattcctttcaaataaagttactttaatattttttttcttgtttcatacaattatggtttggggagtcattaccaacaatcagtatacatatataatagtataatgacaagcaatgttagtatttttaaacatcagatcctgaaggataggctttttctaatgaaagaaaaacaacaaaaacttattataaaagcttgttattccgtaaaaccaaaggactccattcatttgactcactgtagttactaaaatgtaaacatagtggtttggtgccagagcaaaatacatttgtgctaatatatgaattcttgatatagttggtgccaaagtttttatagaagaattatatctcagataatgtgtgcaggcagatctgtatattatccataataagtggcctcatttagaaataaaggtttttataaggcttctgtaaattttacatcatggaaatttagtacaagtgaaactttttttttttccaaaggctttatactgttggtgtaatcttataaataggtcatagttaagcctttgaaaatgaagtatgtggtgttgacactatcctggtgttatataaactgactttcaagttaaccaattggattgtaatcatcatctatcccctttataaatgaactacactgttgtttttctgacttcgatgtgctttgaagtacagtgtagcatatcattctaccttgaatcctatgataatacagttgacatcttgctgtagtggacttgtgcatatagcacacatgatatagtatattgtattacagtaaactttagacaatgctacttaatcattttacttcatgaagataaactaacattttaaatatgaataatattaatggtctacaaaaaatttgagcacattttaaaatcatatttataaaaaactggccaaattggtcttatttaatgtataattcagaaccactgtgtagtatgtattcttttctctaaatgatgaaatgctaaagaatcatttcacgttgttgaagaaaataccgttgctacaacaacagcagcagctactactgctactactactactactactactactactactactactgacagaaagaattcatgaatgtaaactggaggatatcacagttttctttagtgaatataagtgaactacttgtgcgtgttaggtgtactatttgctatgtattttattttgctttattcagagagaaagttgattactgagtgctgaattatacaatttaggctaggaaactcgtaactttggtatttaataaaagaaactatacatattctgtttgtaatgtaaataatctataccccatgcacaaatatctgtttcctgggtgtgatatattaaagtatgtattcttattttgaggtatcttttggaaataattgaaagagattaaataacaatttatgccacatgaaaaataattacttagaagtagttaggtatcatgtcttatggctttttatgttccattttggctttttttctcatttgctttattactatatgtacttgcatgtaacagtttgtaagcatatattctgacttattttccttctgtcattatctagtgctgttatgccttcctatcagaatcgataagtcaaactcagaggtgtgattttggtgttgaagttttcaggacagagatactatttccatggatgcattttaagtaataaaattaggggaagtgaaatcagaaaatgaaaaatgattacaaaataactttcaggttttctataatcaatggctttaaaaagtagacagtcttaattaattttaaattagcttgctcagaaaggtcatgccatacagtcctatcataaaaggaacactataagaatta

SEQ ID NO: 17208 - DNA, 1149 bp, Homo sapiens
ttttatggttgtttacttcaaggaggggggtgttgagtagggtcttagtccattatggactaagtctaaacttagtttagtttgtaagtcaggaactgttcttatatgttatgtataatgctaagtgatataaattatggcatgtccaaaagtggatctgagaattgagcttagatatattgagattagaaatggttaacaaaactagtggcttttgagacaatagaaactggaacatctatctgacagacataatttcctgtgtatattttaggctattaagcttgagcaaaatgtcattttcaaaattttgtaatttggaaagtttctttttctcagatatttagttaattatatagatataatgttttatttctcagatatttagttaattatatagatataatgcttttttcctttatattcaaggttgttcatcgtgatcttaaacctagtaatattttatacatggatgaatcagccagtgcagattcaatcaggatatgtgattttgggtttgcaaaacaacttcgaggagaaaatggacttctcttaactccatgctacactgcaaactttgttgcacctgaggtattccttaaaaacttcaccatttgcctttcattcttttcctttagttgaatctatatgatgccatatgaatgttatggtaggcagataaaagctgttaccttgcccttttcagttttaaagttctttaaatcagggaattctcatagcccctaatataaatatttacactggtaactagcatctaaaaccaaccagaatgtaataatcaggctattctattctgttgggttatatactaatttcagaatcatatcattttagagttgggaggtagggaaaagatagccacagcttcaatatattatgtattctaaatgatgaaactggctcgaggtacttcaatgacttattcaagacccagcattcacttaataacaaagctaggatagattcatcaggtatgttaaattgtactgaacattaggtaatttatatagattagcattataaataacatataagggcagtgctatcctcgattgtctttaggatcttctaactcccggagaaaatagccacacaggggtttttgtaagccgtggggatttttcttgg

SEQ ID NO: 17209 - DNA, 1399 bp, Homo sapiens
catatatccttccttgtttcattttttcacatagcacttaaccaccatctgatatatatttaattagtttgtctgtctcacctaactcaaatgttaggtctgtgtcactagagatttttatctggtttgttcgctgctgtcttcccagtatcaaaaataaatttgttaagtgactaatttttcttttcattttaatactttatcaggtgcaacccagtttatgcctgaccccaagctcatggatcacgggcagtcccacccagaagatatagatatgtacagcactagaagctgaagtagactgcatgcagagactacacagaaaactacaagatgtgtggcgttgcaaataatgatgaaaataaatcatgtaatgggtaactgatacatagagtattacctaaaccaagtttctcccttacatttccaaatatgccatttgataaattacataagtggttaacacacaaactgtgaatgcagtgtaaacaatattaaatgattgatgaggagacttaggtagaagtattagcttgcatttgatgacctttaagggcacttaaaaaaaaatgaagacatgaattctagtgagattaaaatctaaaaatacatatatatatatgtatgtataaatacatacatatttatacatgtataaatacgtatttatacatatatgtataaatacatatacatatatgtataaatacatatacatatttatacatatatgtataaatacatacatatttatacatatatgtataaatacatacatatttatacatatatgtataaatacatacatatttatacatatatatgtataaatacatacatatttatacatataaacatatatttctgctctagctttcccagattaatgctagttaaattagaatggtgtatggaaaggtgtgtttccctctgtttttttttttttttttttttttttttttcccatttcctagagctggaataaaatatccatgttttatgggacttgagcttggctttgtcccttggttttgttaatgttaattcctcttaaatatctaaaaacatctctacctatttgagagggccatatgctacacaggcttcctaatactgcttagcaatccttctactggttcctaagtggtttactattgtgttccctggaagaggtattacaaacgttttattcttctcaagcctcttagaactgtcaaagttgactgtgcctcctatttcatagagaaaaaactaaattattagatatgaccattcccaaaacttcttcccatctaccttcaagacttacctcttttcagccatgcatcccccttttctaagacatgcttctctttgtgttcttgacctcattccttcccatctaagaccatattccacc

SEQ ID NO: 17210 - DNA, 1246 bp, Homo sapiens
aattttgcttaccactttggatctttgtttgaaagccacattttcagaaccagctcatgtattttctttggttatttgaattttattttctttatggacaagagcatcataacataatgataaaaacatatagaaaaactaaagtatcatgatctagatagaagcctgtatttggaatacaggtttgttttgctttctatgttgagaagcattgaaaatgctaatataaaggtgtttagacatttttacgaataagtcagtagtgttttttagtatcagtagtgatatttgtttgtaaattatttacatattgggaaaggtcaataatgaagaaatgaaagaatggaaggaaaggtgtggataggctcattggtatttgaatattctgtctgtcaagtaactagagtattaggctaattgtctacagacctaatttaatcctggctgtcctactgatgatatttggtaaattgtttaacttctgagcctacgtttctccatatataaagtggaaatagtattactatgcctactatatgagaatggttatgaagacaatgcaatgccatgtttagaatcggtttgccagaagaaaattgttttagaattttcccattgacttgatgaatctcaaaagtctcacgcaggaaataattgcttgctgtcagtcaacttccaaacaaaatagatcacagtgtttttattgcattaagctttttaaatgaaaatttcttttttaaagtagtattttatagtcttacagaccagtaaaaatagtaacaagtagaattgtggttttgaaatattactaaggaaaacactctataaattgttttattccttttctggtaggtaaacctgcaaccaccaaggactccaaattgtgtatgacagttggtaagccctaatatacactacataaaaacgttagggctgcctgtaatcccagcactttgggaagctgaggtgggtagatcacttgaggtcaggagttcgagaccagcctggccaacatggcgaaaccctgtctctactaaaaatacaaaattttagctgggtgttatggtgggcacctgtaatcccagctactttgaagatgaggtagcagactcacttgaaccagggaggcggaggttgcagtgagccaagattttgccactgcactccagcctgggtgacagagcaagactctgtctcacaaaaaaaaaaaaagggggctgtacataggcagcaaactaagctgcag

SEQ ID NO: 17211 - DNA, 1245 bp, Homo sapiens
tcgcctcactgcaacctccacttccctggttcaagcaattcccctgcctcaccctcccaagtagctgggattacaggtgcccaccaccacgcctggccaaattttgtatttttagtagagatggggtttcaccgtcttagccagactggtctcaaacttttcctggtgatccacccacctcagtttcccaaagtgctgggattacaggcgtgagccaccgcacccagccaactacattttcttaccaaggtatagctgaaatcaaaagctaattttctagataaactgaaagacacagtggaatatcaaatatatatgttattaatgctactcagtaaaaaggctagtactggaaaagtaaatattaagtgatatgaagggaaaggagaagagatatgttgatttaatggtcagttgcatatttaaatgctttcatgtccaccatatttttagtgaaatttgactattggatatatcctcagcttattttggattacttaacttttttcttgagttgtttgaagatatactatataactaaaccaacttaatttccctcaaaaagttaaaagaaaatgtgaaaatatagttcaagatgattagaagaaatgaatcttaagttaatgtgaagactgggataggaaccaggggctgttggatttaggaaaatcaccttctctgtgaaatgaggggattggtttagattatttttcaagtttcttctcagctctaaaatactatgatttatataatgtctttgtcagcaactgtgtactcaaattgcttttgtaatcctaaataagctgcttaaaactgctcatatttctttcaaagtatactttttggttttaaaaaagtgttctttgaatttaaaataaaagttatgctcattaatgaggagttcacataattttacataagctatggtaataacttctgtgatgctctttgtattgttgaagtaattatataaggattctggttacatggcggtgaagatatattctcctgatatttaacatatctgcttgtttaatgtgagcttgatggtatgcatgtgcttcctaacagaaaccataataaaactgagttgcattcagttttatgcacattactaacttttgatgtcccatgttttgtggtttaaaatagaatatcctatttacatgcaactgaagtcattaactcactttatgtgaaatagcaagctaattattagagattttacatggaatcagtggttcg

SEQ ID NO: 17212 - DNA, 1111 bp, Homo sapiens
cttgaactgcattattcaaaagatggaaattcaatgttcctcaaaagacatgaaaattctatgtttaaggcattagcctcaaaatcagaactacttaagggcccttatttgtttcattcagtgtacatatgagcacctgaaatatgcacagcactctgataagatttccaggattatacatatttttgctaatatttttcgtgggccagatactatgatggaagaaagcctgttgacaagcatttttgaagctttctcatcttggaaagacgttaattagtactatgttttctatcattaaaaccacaaaaattagttatgtaatttccttttgaaggtgagagggttggccttcagtgacaaacaataatctaacctttttaccttttcattatcacagcactaaagtttgcatttagagtagacatgatagttaccactactttatgaaaatgctttctagttagtcacagctttcatcttgaggtagcaaagttaagagctagagtccctggtggagaaatgttttatagtcacatgtaaaacatgtgagaattgtagtgaaatttaaacgtaaatcatacattttccccgtttaacacctgcattaatcattttgtatgggatctaaaaccagattttagatagaaatgtctatcatgctcctgggttcttgagtaaggacataaaagtaaaatgaagctatacaccaatatgtggtcaaaactcgtttctaaagcaaacaagagtcttttgtcgtataattaactttgctaaaattagcatggaaaaggagactataaaggaaaccataagataataataaaaactattgcttagttttttcttctcgaagtcccataatagagaatgttaaattgtgtgaatgttaaaggaaaaagtttgaataactctgtccatgatgaatgaactttaaatagagggatggagaagaaccttctttctgcattttatcctccattgttcattgtaggaagcgtagttatggatctgacgtagggtaataggaatatgtagataatttgaccacaaataacctggaagagtctatattttcaaaacaccagcatatgttttcagaaaatggaaa

SEQ ID NO: 17213 - DNA, 1125 bp, Homo sapiens
gaggaaaagttattcaccgaagtcccaacgttagtttgtcaaatgccagtgtcattcctagaatgttaagggattggtttattttgaatttaaatcataatctttgaaattttaaaatatgtaaagttatattttttaagacatgtgaaccattgagaggcagcattggtttttttttttttaatctcagtaggaaataatttaaaatagtggtgctagctacatctgcagatttgttagactgacctgtataatgagtagttaaaagttgcagtatatctatatgtgtatgtgtatacatgtattatggttttgcttttgtcattatcagatactctttcagctcttttccaggtatgatctggatatgatcaaacagttgaacccagacatggccaaaatattttctcttagcttctgttgggtactaaatcttatctattgccgtttgtgctttagctaaatgcagttattttgcaatgcaaatgaatcattaaatgggccatattctggttgtttcactgagtatagacctgctttaattgttaacgcaggctcacattcttttgttagtctcatgtctgtgctaaataaacaagggacaaatacgacctctgtcttttcggtgggaggaaataattgaggtcaatagcatatcttttaattcagaagactgttaatggcaccaaagaggcttttattcaactaaataatcactgcttgtaaatagtctactgaatgaatatttaagaaagctgcttctgtattctgagattcatggattcttctgaaataatttacttggaaactgtcattatctttttgtattttatgatatccttttcaacataggattcttactggggtttcagttaaatttgatttttatttttaaagcactagctgaaaaatagaacacattttgataataactgctatcggattaatggttttgtattgtggcttagctgttttttggacactgcttgatattcaagtgtgggaatctgataacagtgatttgatttatatttggatttttggataaaattatgtttaggactatgagtttacttcctgctttcttaaacacaattctgcctctcagaaattcttttatcactt

SEQ ID NO: 17214 - DNA, 1193 bp, Homo sapiens
attttattataataagtcatttatatgttctttttccacaatgtacacagcttctgtgttcaagaaactaggtctaacggggaagacagacaggtaaacagaataaagataggacctgaagatgcaatatggtaaaatggcaggccagcaggctatatgtagtgtatatatatatatatacacatatatatatatttcccagagtgttttgaaaaacagtataatgaggtacgtgttttgatccacaatgtaaactatttcatacccattgtcttatctgtgacctcctcacatttgagtttgcaaatcctgctataaagggaagaaactataggaattagcttctagaggaaatgattaggggtttgttctagagtttaggtgggatggttgtcttaaggaagaaatttttttgtttgtttttttttctgcaactaaagggaataagaaaacaatatgtaagatcactggtgaaaaccaggtacaaaagggcttttgcatcatggtctcaatcttcaacagatggagaggtttattcattgataaaaagggcaggtaggaaatttatagaggtgtttcaaaaagaaattctagaataatcactttaagtattgcatttgcccagagattacgtacattggtccaaaaatgagtgatacgaaagctagactgaaatccaacagatggaatatgtaatgaactaggaggtcggcatgggcctgttttgcgtttgtctaaccaatgttgattagaagcagaaatggaggcatttgaggccctcctgatcttgagctaccatcagtctttacttttcactatcctatataaattgtactttaaaagtcaagccaggaaactgcctgttacctgaacaaaaccacccccttagcctcaggcagtattgcttctgactttgctcaagggatcttttttgtatagaatgttttctttcctttgtcaacattctagccatcctccacagctcttccatgaagcctgtcttgatcttgatccgctctcccatttccacctacagtaatatatctgaactcctatagcactttatttttaactcttagggagtcactcttaactttatcttatagttcctatttctttatatattccttaagggctttcagaatactcctattttactttatgcctgtagtaatttatatccttaaataata

SEQ ID NO: 17215 - DNA, 1182 bp, Homo sapiens
aggtattccttactttcttgccaggttatctgtacgttttaaattatttttttaaatattcatcatgttcagttctcttcacaggtagttgatatcagggtacatattctatcatactttcaggaacagaaattaaggtgaccccttcttacatggacatgtgacatctcagaatgactttattcttgttatagtttcctaaacatgagatattggtactagaatacagaaattatggtacctggccttttctgatgtaacttagttttttattaatactcatttttagaatagggaaacacgctattataactacctattgaagaatcagagtgattcaggaggtgatttcatgggcaagaactatgttctgtcgatagttcaagtttccagtccctctttcacacaattcttcccttctccattcacaaaagaaataccttaaaagagaaaagtctaagaaaaaaatcaatacagtctacacagatcattatcttattaatggacctttagtaatgaatgtacatgtgctttgtgtggatatatgtgatttttgatttttcagttcaggactagagggcattgaatgaaagctgcctgcatgcagtcacttcaggctctaggatcacccacagtggctctgcttatcatatagagtgacttgacattgtaggattttgccataggaaaatctgtcttagttttatctgccaccagtaatgggttttaccagggaaacacatatgtcagctgttaagtttcatagtagtgatggaaattgaaaacataatcatagattagccatttttaagtgtaatatgcaccaatgaatgactgtgacatcttaaatgcattttgtttatagatatagaggttgaaggtcaataactggaaaggctggcctttaatttgttagattaggatacaatttagtttctaacatgtataatttaagaatttttacagtttggcaatatagttctttcactgaattcaataagctttattttcattgtctactatgtgtcaaattggtactactttctagtgatataacgatgatcaagatattgctgatggctttgagtgactcacacttaatggaggagccagatatctaaactaatgatagtgcagtatattaagtgctacatccaagatagggagaaaactctgtagagg

SEQ ID NO: 17216 - DNA, 1174 bp, Homo sapiens
ggcgtgagccaccacgcccagcaagtaccattttcattcttaaatttgttcatatgttaaaaaaaaagaaaacataagcatgctttagttttccatcttcacattaggtaacacaatgaatgaatgaatatagttattttctaatactctcacacagattggttcttccatgggtaaatagttctctgtagccctgaattagattttttttttttttttttttccgagacggagttttgctcttgtcaccaaggggggagtgccatagcactcaccatgtctcaccatgttggccaggctagtctcgaactcctgacctcaggtgatccgcccacatcggcctcccaaagtgctgggattataggcatgagccactgcacccagccatgaattagattttgattgatgaaaagggagataataattccaataatcttatgttccataaatgaaattttaaaactgatacatttttatatttaaaaacttcaaaataaatagaaaaatacaactttgagttgtagttttttttagtggtcaatctgatgagcttgggcccgtataaggtatgttggacaagaaaacactatcctaatcaatgttgacttaactgaattcattcagataagtggaaatattgttagatttgttgactggaaggaagtctgagtttgattagtccaaaggtgatttgaggaaaggtggtaagctgaacatgacctcccctgagtattactgaaaggaaggagaatttgaaccaaattttaagatttggccaggaccaaataagatatcattgcagaaaatctgtgctatatgtcaatgacccttcagaaaataaaaagtaaagataaaatggagttggcactccatctctggcctgtgtgtgctgcccccacccccacgcctcccttctgtctctcaagttttgagatcacccctgttaacctcctcttctcttccctggctcagccaatttgtaagctctgatcacatttttttttttttttaccacattctctttgtaccctatcttttgctttcttatagttgcttaatattgtgtaacggaggccaggcacagtggctcatgtctgtaatcccagcactttaggaggccgagtttggcggattacttgaggttaggagttacagaccagcctggccaacatga

SEQ ID NO: 17217 - DNA, 1510 bp, Homo sapiens
tttggagagaggctaatattatgcacactgtaagagaagccattttggaaattcacgaaagtactgctccaccccagttgagttatttagaattttatctcaagtgaaagctgatggattcatctgctttggctgaaattaaacttatcattagtctagctagcatttcagcatgatattgcaagcacttctcattgctaaaaataaataaaccaaagtttaaccgaatcagttagggaaagtgatttaaactttatttaaagaggtattttctaattatgcacagatatctactttatacaaatactttatatggctatttttgagaaaaccctcacattttaatgtttatgctagggatgaacctgaaaattctattacgtttatttagatttcaaaggcaaatattgattcctatgctctgtggtttatttcttttttctattgcttctttctcccttgagtcccttgaaggcagggaatagacttctagaaaacctgagaggaaaaagaattctttttacaggaggcagcagaaaactgtctgaaaggtcaattgttttatctccctttccactctctttccaatttcactttggtggtctgaagaagaaaaagaaattttatgtatgtatgtgtaaatatgtgtatatatttctatctcttgctacaataattccaactaagtgaacttctcaattatcatcatacttacttaccttatattaacaaattaagatgatgctgccaaaacaagtctagcagggaaaacaggttctacatttttcttaaataaattagggagtaaaagttatacttaacttgtctgtctattattttaaaatatgcattgaaataatgtggtataacttctctggagtgcaattttaagtctaattcatgcagatgattgattgtgattattgtaagaaatttcttacatgtatatttcttatgtagaaaatactgtttctactcattcaaagcacattgtagatattcagagagaagaacaaatggctggcttggcaaatccccatctgagataaagtaaacaagtgaccagcagcccacagatgattcctttatatagatgtataatgattcaaactgctgcctttgcctccagtgcatccttacttaggtattatacttctttaaaaagctctgaagctgctacaatagaaaaatcaaaaagggtaacagtatctgaaatttcacagtcctatccgatctgaaaacacacatacacaaatgcacacacatgcacacacacatttaagggacatagcagtaacactgttttttaacaacaacaaaagtttaggttctaatttatgtaaatacctagtatgtgtatttttgactttacaaagtctttcttttctgaaatcttcgtggtatggcttttttaattcttttgacagcttatcagtctgtaggagaatgatcttgaaatgttaaccctgactaaaatttgggagcatatgccttgctatattatcaagct

SEQ ID NO: 17218 - DNA, 1168 bp, Homo sapiens
tgcttttcacaaacattaaaaaaaaaaacctttcagggtctttcatgaagttccaatagttgagtgagttaaaaggtttgtttcccagatttgtaatggtcctgctctagccatttgcagttttgttttagatgattggaaagtatatcaccaaaaaaagtatatagtgacatttttagtatgaaaccaaattacactaaggtcttttgttggccatattactgccacacatgagaagcaccatttatgcagattttcttcagaatatttttaaaaggtacagaatccttaaaatattaacaactaattgcatccatcatctcctttggctgctgtaacaaattaccaccaataatatgatggcttaacacaacagaaacttatttgcttacatttttgaagggcagcaaagccatgctccctccagaggctctagaggagaatctttccttgccacgtccaccttttggtggctattggcattttttggcttatggccacatttctctttctgctgtgtcttcacatcaccctcctctgtatacctaatctgcctctgcctctgtttaataaggatccttatgatgacttttagggactacccagattactccaggataatctcctcacctcatgagtcttaacttaattacatctgcaaggcccccttctccaaataagataaattcatggttttggggattaggatgtggctatgtcttttaggaagccactcttagcccaccagagtctgccctttggcccaaaatttatgtctgtctcatgtgtaaaagacattcatcccatcctaacattaccaaaagtctcaacccattatatcaatcctaagtccaaaatttcattcaaatatcatcggttcaaaagttccaaagcttatcatttagatcatctaaatcaggtatgagtgaaactctgggtatggtctttcctgaggccaaattcctcttcctctgagaaccagtgaaacagaaaagttaatctgctttcaaattacaatggtgggaacaggcataggataacagttacagacatttctgtctcaaaaaggagagaatggaaattggaatggagtctcctgtcccaatcattttcaaaatctagccaggcaaatttctgttatatttcaaggcctggcagtaatcctctt

SEQ ID NO: 17219 - DNA, 1745 bp, Homo sapiens
tcacactactgtagtagacaatttagatagataaactttttgccactatatgacaaggattccctttcttccattttccaataaaatcttcatttccttctaaaccatcactagaaatgcctttaacattcatactactaccatctggtaaaggcaatctagttttttctatcacagccaccaaaattcttctagtctctacccattatccaattccaaagcctttttcacattttaagacatttgttacagaagtacccaatccgtcccagttccacaatctgcattagattcccatggctgctgtaacaaattaccctctagcccagtggcttaaaacaatagaaatttattatcttgttgttttggaggccaaaagtccaaaattgaggggttggcagggctgaacgtcttctggagactctaagggaaacactcttcccgtgtcttccagtttcttgtggctgccatcattccttggtttgtgactgcatctccctctcctctgtcttcacatcacttcccctctgtatatataatctacctctgcctctctcttataaggacacttgtgacgggacttagggcccatccagattacccatgataattcccttattccaagattcttaattatatctgaaaggaccttttttccaaataaggtactatcacaggttccagggagtaggatattgaatatcttttttggggagggggcaccatgcagctcactacactattcattgcacacaaatgaatttttcactttttaagatgcattcttggtgctcaaaccagatcgaagtttgtctctaaaagctattgtctgcacaggctgctgcatgctctgttgttaaatggatggacaggctattctaaattttggttgatacttttgctactatgggcaattaacttgaaaaaaataatcgatcccaactctgtgctctgatgtacctcttctgccccttttatgacacctttgaccaaatgccttctatggttcacagtgcaggcacaaaactacctctgatacagaagggttctttacaagcttattttacataccgtgaatccctcacctaaagggagaggtgaaagcaaagactgctttgaatgggtattgagggagattgtgtccataccaagccaccctgaagaagtatttcacttgcagtagaactgtggatttgtgctgtcatttcaccttggaataaacacctatctctaagcaggaccaagaatgacttgcaatctatatgtaatggctacttacttattcaataaagttaagatatacgttaaatgttgtgctgcctatgataattaagattaaagacaagtgaaaaggcatgaactatcgggggggagaagcttcaaccaaacagaagtgcaggagtgcttttgtatgtgcctggtccagtggagatcatgggatcatattaaaaacatacttgtaggaatcataaggttttctttagcactgcttgccagagtagtggagatatggtacaactgaaaagtttagaaacatcagaagggtgatttacacgctccagagaaactgtttcaacagagaagtttttcgttttgttttgttttttgttctgttttggtattgagtatagaattaagcaagtgggcttcaaatgcttagaagggtaaaaatctggaatgagtaataaaaggactgtagattattattttctggagagccttcaatagaatagctcatcatgggt

SEQ ID NO: 17220 - DNA, 2116 bp, Homo sapiens
ttgtttcattttttgaaattcaggaatacacagagagaaggcctagaggttagagcactagaatgcaaaagaggatttattttcttaagtttaggtagataagtcagctcttttgaatgttttacttatttttgcctgagttcctagctttacgcattactaggaatattttcttttacaggagggagaagggttttgagggagggggtgggtaaggcagtagggatggggttaggtaggggagaacatttctgaaaaagaacttataatgaagctacaaatccatccttatttcttattcagtgctgaatactacctcatgcaaaatattggtgtggctgcaaatttccctctgaagctgacacaattaaggatgaattaccataacatcttcatttttcctcatttcattgcctctcatacagttttctccctctgatttatttcattttggtagtggattttgaattaagtatttatttctctttgcaagtgactatttgattaacacattaaaaattttttaaaaatttcccctttaagttatgatggctgcctatagaatttagactgtttctcaccctgatccatcctgatattatgttattagctacgatttcaaggtcactttgaagtcagacttcacagttttctacaggtgtatttcttgctatgctcagtgggaaccagggagcagaaaagattgtggaaagtgggaacattaattgtcacgtggctgttgagccagagaggccactggctgccatgcctcttaccagccaagttttaaatggttagagtggcattggcattgattttgcttttctcttgggttttcttcatttcttttcataattcatcttcaagctatagatccatccttcttccctatccaaatactttgttctcagtgggcagtcagatttttttggcttccaaacctcactgagcatgttcagagaattcctctcattaaggaaatatttttccccacaattgtctgatgtatgagtcctctcagaagcacaagtgcatactaggaaggctttgtaaactggttttgtaggcaggctgtacctgcaaataggcattctgagcaaggatcctaaatttccctttggctcatgtcccccccgccccaccccaccttctcctttttggcatgtctggtgaaaagctacaaggttcacagggccaaatattctcccttttgttctctaaacatgttgcacacataaactcaagggagtgatttcggttcctaagtcctagggagttctattccatttattctgatgtcccttttaaggaggagttggtgttgaagtgtgacatgctttaatgataactgctttggcaattccccagacaggtatacttcttcatccaaaattgcacctaaggtgttcatttagacaaaattgttcgcttagtgatccactgatctctaatcagaaatatttttaaaaaatacaatttagatctctgaaaattggaaccactcaagagtatcatcttgatagtgttacttcagcatatgactgactgattttatgaagggagtttagctgacttttccctgtagccctatcatattaaaaacaaaaagtggtccacttgaagcagcaaggacaaagggcagtttagggagaggcagggtgaaggggatagctcgattgggcatccagagtggaaaaggattattattgtacataatagcagttctggctggaattccaatccactttctggggatcattttgatgttgaatgttcccccaaagcattctgacaagtttggtccacttggctctttaccccgggtaataagacccttattgactttgaaaaactggcataaatgagcttaagaaatccattgtatacagtcctagtgtttgccttcttggtaaaattacatttaaggatgtcatttcatgagtcaaattgtatctgctgacactgaagtgtattgagatgttgttctttagtttaagtatgtaacaaagtaatattcaaaggggatgtttgggggtggggctgggaccgggtggctttatattgataatgaaatattccagagcaaaacacattgtcctaatgaagttgttgcagc

SEQ ID NO: 17221 - DNA, 1622 bp, Homo sapiens
ttttgggaagacatgtgtttcaatggcgttagtatttgactggtaaaatactgtgagaactgttgttggctgaattgatccctagggcacactttgcattttacttgagccactgactaggaacacataggaaggtcttcattagcaggaatagattagaatgtatgtaagcaaatacagatgttgaaatttgggtaacaagtacattaactttttttctttaattttaggacatttagggtcccccctgtgaattagaaagttgcttggctggagaactgacaacactacttactgatagaccaaaaaactacaccagtaggttgattcaatcaagatgtatgtagacctaaaactacaccaataggctgattcaatcaagatccgtgctcgcagtgggctgattcaatcaagatgtatgtttgctatgttctaagtccaccttctatcccattcatgttagatcgttgaaaccctgtatccctctgaaacactggaagagctagtaaattgtaaatgaagtaatactgtgttcctcttgactgttatttttcttagtagggggcctttggaaggcactgtgaatttgctattttgatgtagtgttacaagatggaaaattgattcctctgactttgctattgatgtagtgtgatagaaaattcacccctctgaactggctccttcccagtcaaggttatctggtttgattgtataatttgcaccaagaagttaaaatgttttatgactctctgttctgctgacaggcagagagtcacattgtgtaatttaatttcagtcagtcaatagatggcatccctcatcagggttgccagatggtgataacagtgtaaggccttgggtctaaggcatccacgactggaagggactactgatgttctgtgatacatcaggtttcagcacacaacttacatttctttgcctccaaattgaggcatttattatgatgttcatactttccctcttgtttgaaagtttctaattattaaatggtgtcggaattgttgtattttccttaggaattcagtggaacttatcttcattaaatttagctggtaccaggttgatatgacttgtcaatattatggtcaactttaagtcttagttttcgtttgtgcctttgattaataagtataactcttatacaataaatactgctttcctctaaaaagatcgtgtttaaattaacttgtagaaaatctgctggaatggttgttgttttccactgagaaagctaagccctacatttctattcagagtactgtttttagatgtgaaatataagcctgcggccttaactctgtattaaaaaaaatgtttttgtttaaaaaaaactgttcccataggtgcagcaaaccaccatggcacatgtatacctatgtaacaaacctgcacattctgcacatgtatcccagaacttaatgtaaacaaaaaaatcttaaagtgcaaatattaaaaaaaactgttctctgtgaaaaaaattatattccatgttataaagtagcatatgactagtgttctcctagagatcagacttttttgattgtatagtttgcattaaaaagttgtacagggagggatgtaacctgtatcttcaggat

SEQ ID NO: 17222 - DNA, 1175 bp, Homo sapiens
gaaaaaagatgacctgcatcctaacccttgaatgactcaaatcagtgccaggtggaggactcccatcaccttctctcagaacaaaatcacttcattttattgtcttagtttgtatattttctgtgacttgaaataaactttgaacacaattttagtacactgcaaattgatacacatgacctttttgcttttaaaaagcttaacactaagggtgaaaccttagatgtgttttctacccttactgcagtattgtactttaacatattgccatagttttgtttttaagttaaccacttattcttcttgatgatatttgagaatttctcagaagcaatgttttctggaacttggtttttgtttagtttgcttccagtaagaattattataaggctttgccctctgaaaatattctagcacttcggagtcttctaggagaaaatatcacatgcttagagctataaaatggtcagaaggctaacagagcaaagagcctagcacagctgtgtgtttagtttagaaaaatccaaatatcaaaatgcatttgtttcaatagcaggtctgaacatgtataattcagagttaagacaaaaattgttttagcactggtttgagtgtgtcagcaacacaagagactgttgacatttacttgtgtgttcttaaacttatcagtctaggcagtcaactttgaaagtttaaaaagccactgatttttcacatgctcaagatgaaataaaaacagaaatcaaatgaacaaaatacatttcatcctatcttccaggcagtccctaacctgcagccctaccctgtaactacgtttattctgggaacttacaacacagaaaaccctaaaacttgtacattcttctcattttaagtggaccaaatgtagagcacagtcagattgctcattaggtctgctcctgcctgcttccttgcggataggtatgaacataattagtgccattagctctaatctatgggtcttattgcctagtatttctctctctcgccgcgccgccgcctcctcctctccccccaccccaaccccatctctctcgtagtggcattaaggaggaacatggtttctctctatcaggccaacctcaagaggttaagagttgccttaataatcagtaaagttctactggaactacttttgagccaatttatattct

SEQ ID NO: 17223 - DNA, 1815 bp, Homo sapiens
ataggatttattatattcattaccatgaatataatcacgaatttatgcctactcccataaatattcaagccttgggatattgattttggcagccatcatatcttgaagtgagtgtgtcaatatatttagacatggagaccaagagtgatgcctttctcattaggaactcgttgtaagtttcaagattccaaatcaaggtcattgaagatgaagttgtcatttggtcagtagttgtctaataagaatcatgtcttcaaggtttcattgtgcattttcccaaagccttattaaacctgaattagctgaaatccgggtgaacaaattggcaacagcagtggtatccctccctatgtaaacaaccatcagtattgttttactgttgtaataaatgaaacatgattagccaccatgagttcatgacctacctttattgtgctcagactagtgacaaaaaaaaaccaaaaacagttttatccctcaagccgtagaggttcctaaactattagaaacaaccatttgttcattcgtggtcacttaatggtagaaaaaatagataatataatgctaattcagtacaaccattcttctaatctataatgagttgaattgtctgggcacaatgaagtgtgaggtttctctcttaagagccctgggcttctctccttctagggattcactgtgacgactaacatcccagagccagtgtggtccttgtaggccgaggttgggtagatggcagaaataaaaagcattctgatagagaatgaaggcattttgcttatgttattagctgaatgattccttagcgatataggtaggagtccacaaaaatctatgaaaattataaattgttattttttaaactagacattaataaactcccttaatagtgataaagagctcctcttgactaaataagtcatcctaacatggagttcaagttttcacaatcgcttttaacagaataatacaagatgacagtatagctgacttgcaattataatacaatttcaattacaatgagcatactttctagattttctttcccaaatggagagcccaaaaagaagtaacaaaagactcattcatcaagtgaagaagaaaatcctttattttttgatgagcaaaaataagaataaattgctgttcacactggataagaccatatcaaaagtgacagtaaacatgtacactgttggtgttatatggggatggggttctcggtaattttgtttattatttatgtttattattatgttttatcattaattattcaataaatttttatttaaaaagtcaccctacttagaaatcttctgtgggggtgggagggacaaaagattacaaaccaaaactcaggagatggtaacactggaattgataaaatcacctgggattagttgtataactctgaaccaccaaacctctgctatcaagccttgctacagtcatggctgtccagaaagatttacagttatttttctgagaaaggatccatgggctttaagaacttcagaactttaagaacttcagaagttcttaagttgctgaagctcaagtaacgaagttgaatgcaatcaaaaaaagaataccagggagtcaaggcttgagaggcacattcttatcctaaagtgactgctcaaacctgacgagaccaagtaaattactgaagatacaaagagacaaaatgcagattaccgtccttattcctataactcaaaaattttctttgttgaagtagaattgaacctttctaggatccagactggaatatcggtgacagcatttgcgcaggctctttgccaaagtccgagg

SEQ ID NO: 17224 - DNA, 1186 bp, Homo sapiens
acagtggctatggcaggagtggcagctatgacagctgtaacaagggaggcagaggcggctttggcagtggtagtggaagcaattttggaggtggtggaagctacaatgattttggcaattacaacaatcagtattcaaattttggacccatgaagggaggaaactttggggcagacgctctggcccctagggtgatggaggccaatactttgccaaaccaccaaaccacagtggctatggcggttccagtagcagcagtagctatggcagtggcagaagatgttaattgggaatcaaagcttagcaggagaggagagccagagaagtgacagagaagctacaggttacaacagattcatgaactcagccaaacacagtggtggcagggcctagctgccacaaagaagacatgttttatacaaatactcatgtttatgggcaaaaaagtcaaggactgtatttgtgactaattgtataacaggttattttagtttctgttctatggaaagtgtaaagcattccaacaaagggttttaatgtagattttttttgcacccatgcaaaaaattgctatatgtgatagtctgatcatgacactgaataaatgtcttttttttttaatgtgctgtgtaaagttagtctacactgaagccatcttggtaaatttccccaacagtgtgaagttagcattccttcagggtgatgccaggttctatttggaatttatatacaacctgcttgggtggagaagccattgtcttcagaaaccttggtgtaattgaattgatagttactgttgtgacctgaagttcaccattaaaagggactacccaagcaaaatcatggaattattggttataaaaataattgttggcacatcctatgcaatatatctacgttgaataatggtaccagataaaattatagatgggaatgaagcttgtgtatcatccattatcatgtgtaatcaataaacaatttaattctcttgaaaaaaaagatagggagctatttaaagattattaggaaagcttactagctaagatggttaataccttgtcttatcttgcacatcagcttctgtctttttctcatctattacctgagttaagttatagttggtctatttggtatccttaaaacttaggggttgctttggttggtcgtgtaatactctaagagagag

SEQ ID NO: 17225 - DNA, 1169 bp, Homo sapiens
ccttaaagaaacacaaggaaagaatagggcacaggtacattgagatcttcaagagtagccgagctgaagttcgaacccactatgatccccctcgaaagctcatggctatgcagcggccaggtccctatgataggccgggggctggcagagggtataatagcattggcagaggagctgggtttgaaaggatgaggcgtggtgcctatggtggagggtatggaggctatgatgactatggtggctataatgatggatatggctttgggtctgatagatttggaagagacctcaattactgtttttcaggaatgtctgatcatagatacggagatggtgggtccagtttccagagcaccacagggcactgtgtacacatgagggggttaccttacagagccactgagaatgatatttataatttcttctcacctcttaatcccatgagagtacatattgaaattggacccgatggcagagttaccggtgaggcagatgttgaatttgctactcatgaagatgctgtggcagctatggcaaaagacaaagctaatatgcaacacagatatgtggagctcttcttaaattctactgcaggaacaagtgggggtgcttacgatcacagctatgtagaactttttttgaattctacagcaggggcaagtggtggcgcttatggtagccaaatgatgggagggatgggcttatccaaccagtctagttatggaggtcctgctagccagcagctgagtggtggttatggaggtggttatggtggtcagagcagtatgagtggatatgaccaagttctgcaggaaaactccagtgactatcagtcaaaccttgcttaggtagagaaggagcactaaatagctactccagatataaaagctgtacatttgtgggagttgaatagaatgggagggatgtttagtatatccagtatgattggtaaatgggaaatataattgattctgatcactcttggtcagcttctctttctttatctttctttctccttttttaagaaaacgagttaagtttaacagttttgcattacaggcttgtgattcatgcttactgtaaagtggaagttgagattattttaaaacttcaagctcagtaattttgaacactgaaacattcatctaggacataataacaaagttcag

SEQ ID NO: 17226 - DNA, 1169 bp, Homo sapiens; identical to SEQ ID NO: 17225

SEQ ID NO: 17227 - DNA, 1188 bp, Homo sapiens
cttttgttatttttacaccctgaatattttttgtgtcaaatgaaaatggctatactgtattttctgattacaatattagaaaagaatgtcatattaaaagaaaaaaaaggaacacgaaaaagaaaattaaagctctacttgcaccttctgctttccttcctgatacccccttccacagcccatttggtgcaggcattgtacttagagagggcaggtcgtgtagggggcgggtggggagtgctggtcttatagtctaagagagaaataagtgattactcaaagaagaaacataaaaggccacagccaagggccgggagtgggtagggggatgcagaccctcccctgtaactgaagatgggtaaactccaaccacaaggcgatgatgccacttgtgggccctcagattggagaggacggagatgagtgacaacgcgtgcgcactggggcaccgagcacagaccagagaacggggatgtctgtgcgtgcggagtggaggaggggggagttcctggtgactggccgccggcccttggtgggtggtagggggtgctggggaggagggcgagctcggcggtgacgcgcggtcctcacgtgacccggagctgcagagctacgcagccttcgttgcagtcgtcactcgcatctggctaccagctccccgctgccctgcgctcggcgggctggcatcgggcccggggaaagcggagcaggtaagggccctggggcccgcgcgccctggccaggccggcagaagctcactgaccccggcagcggttacggggcttgagggggcggtggtctatgctgcctcaagttcgaggagcctttgcctctgattctccctagcccccttgcccccgcctacatctgtgcaggcgaaccgtgggctttgatttgtggggagattgtctctgccagagggaaatacagagattgagatgcccatcgctctaatcactggccacacatgtccgctcgcttcctgctcaatttagtggaagggatgcgccacggtggcgtttgcagagaaaatggtgggccttagagactggacggtggggttggtaagggtggtgtctcagactgtggggagggacgtttgataaccaggttcctgaacccggaaaggcgagtattgggatctatgtcctgggctctagaccaacactaagtggttttactctctcc

SEQ ID NO: 17228 - DNA, 1480 bp, Homo sapiens
tgtttcttgcactccccggactgtggcgaaatggcgtgctttgtgtgtctgtggttggggggaagtgggggaaatgacagcagggaaacctatcggatagtttgttcgtaatcctcctctctcaacagcacttactctccatgttttcgatctgtcatcctgcaggtctgctgtagcaggtggctccgcttgaagcgagggaggaagtttcctccgatcagtagaggtcggtgtgggcgtgggggctgcctggaatgggggaggggttagaaatcgccggcactttggacaggctcttccaatcctgctttattttccttacctccctcccatttcaggctagggagggggcagacctgtgcatgtctgggatagcataaagaggttaaaaacaaacctgataaccggaatggtgaatcaggaaagcaacgaatcaacagtcaacccatcaagtgctccattctcactggctctggtctctctgcagattggaaagattgttgggagtggcacaccactagggaaaagaagaaggggcgaactgcttgtcttgaggaggttagtgcaagggttctagtcaggtccctagggacatctgaggttgtggtgactgagaccccagcagagtctgtggattccattgacattatctaggctttgggcggggtgacctgggatggggagggaaaggctgaaatgagaggcatagagatttcgtcaacaatctacatttcctacctagcattcaattattattatcttgtccctctgtgcagctccctgcatggggcaacacaagcagaagagaaactcaaacccaattttcttcttccactcctaggtcaacccccagaatcagctcttgtggccttgaagtggctgaagacgatcaccctccacaggcttgagcccagtcccacagccttcctcccccagcctgagtgactactctattccttggtccctgctattgtcggggacgattgcatgggctacgccaggaaagtaggctgggtgaccgcaggcctggtgattggggctggcgcctgctattgcatttatagactgactaggggaagaaaacagaacaaggaaaaaatggctgagggtggatctggggatgtggatgatgctggggactgttctggggccaggtataatgactggtctgatgatgatgatgacagcaatgagagcaagagtatagtatggtacccaccttgggctcggattgggactgaagctggaaccagagctagggccagggcaagggccagggctacccgggcacgtcgggctgtccagaaacgggcttcccccaattcagatgataccgttttgtcccctcaagagctacaaaaggttctttgcttggttgagatgtctgaaaagccttatattcttgaagcagctttaattgctctgggtaacaatgctgcttatgcatttaacagagatattattcgtgatctgggtggtc

SEQ ID NO: 17229 - DNA, 1208 bp, Homo sapiens
gctatctcagggaggtggaaaaatcaaggttgagattttgaaaatcctttcgaattttgctgaaaatccagatatgttgaagaaacttctcagtacccaagtgccagcatcatttagttccctctataattcttacgtggaatcagaaatccttattaatgcccttactctatttgagattatctatgacaatctcagagcagaagtgtttaactatagagaattcaataaaggttcccttttttacttatgcactacatctggagtgtgtgttaagaaaattagagccttagcaaatcaccatgacctcttagtgaaagtgaaagttataaaactagtgaacaaattctgattggttatgtaccgtcaaaagacttgaagaaatttcatgattttgcagtgtggaagcgttgaaaattgaaagttactgcttttccacttgctcatatagtaaagggatcctttcagctgccagtgttgaataatgtatcatccagagtgatgttatctgtgacagtcaccagctttaagctgaaccattttatgaataccaaataaatagacctcttgtactgaaaacatatttgtgactttaatcgtgctgcttggatagaaatatttttactggttcttctgaattgacagtaaacctgtccattatgaatggcctactgttctattatttgttttgacttgaatttatccaccaaagacttcatttgtgtatcatcaataaagttgtatgtttcaactgacaaaaagtcgttctaatgcttgaatttaaaacccagatggagagataaggtacataaatacaaaagtatatatacaaagatctatgaaaaataataataataaataaatacaaaaggattactaacagtacctgggcatatgctctttgtcaaatatacactatctgtttaaatgaagcagaggttgctgagaaagcttcaaggaggaagggcgcatttaagctgaaccctgaaggacaacatagaagggcattccaggagggggaaatgctttggagaaaggcatgcaagtgagaaatctgtgcctgtgataggaaggtagccaatttgcttggaatggaagccatgggaagaggaatgatgagagataaatgtgaaaattcagagtgaggaaagtttgaggaagatcctgaaccccaagccaaaatattgaaataatatcttgtcatatta

SEQ ID NO: 17230 - DNA, 1108 bp, Homo sapiens
tgttgggtcctggtttggggccagagaagagaccattagaagagaggctgggtcttgcagcaaatccagtcctaaagctgaagaggaagaagtcattattgggtcctggttctgggaagaagaggccagtccggaggcagtggcaggagtcggctttgagtcaaagcctgggactgaggaggaagaaatcactgttgggtcctggttctggcctgaagaagaagccagtatacaggctggatctcaggcagtagaggaaatggagtcagagactgaagaggaaaccatttttgggtcctggttctgggatggaaaagaagtcagtgaagaagcaggaccatgctgtgtatccaagccagaggatgatgaagagatgattgttgagtcctggttctggtctagagacaaagccattaaggaaactggaactgtggccacctgtgagtccaagccagaaaatgaggaaggggccattgttgggtcttggtttgaggctgaagatgaggtagataacaggactgacaatggaagcaactgtgggtccaggacattagctgatgaagatgaggccatagtggggtcctggttctgggcaggagatgaggcccattttgaatcaaatcctagccccgtgttcagggccatttgcaggtccacgtgttcagttgaacaggagcctgatccttcacgcaggcctcagagttgggaggaggtcactgttcagttcaagcctggtccatggggtagggtcggcttcccatctataagcccctttagatttccgaaagaggcagcatctttattctgtgaaatgtttgggggcaaacccaggaacatggtacttagcccagaaggggaagatcaggaatctttgcttcagcctgatcagcctagtcctgagttcccatttcagtatgatccttcctacaggtcagtccaggaaattcgagagcatcttagggccaaggagagtacagagcctgagagttcatcctgtaactgcatacaatgtgagctgaaaattggttctgaagagtttgaagaactccttttattaatggaaaaaattcgggatccttttattcatgaaatatctaaaatcgcaatg

SEQ ID NO: 17231 - DNA, 1267 bp, Homo sapiens
gatggatctacagggaaaatggtgggctttgcggaagggaggggctcggattgagggcaccccacagggcatactggcttctcaggtggaaaaaaatgaaatgttagagtataaagtcaagtccagggctctgaattttaaaaggtgcctagtagggcctctgtcctcagtgcttatcagtccaccaagaattcagcccattttctctctcttgtctcctaggagtaatggagtccaaagaggaactagcggcaaacaatctcaacggggaaaatgcccaacaagaaaacgaaggaggggagcaggcccccacgcagaatgaagaagaatcccgccatttgggagggggtgaaggccagaagcctggaggaaatatcaggcgggggcgagttaggcgacttgtccctaattttcgatgggccatacctaataggcatattgagcacaatgaagcgagagatgatgtagaaaggtttgtagggcagatgatggaaatcaagagaaagactagggaacagcagatgaggcactatatgcgcttccaaactcctgaacctgacaaccattatgacttttgcctcataccttgaatcctaaaagttttcgctgaggttaatgtgaacactgctttacaagcttgtatttttgtgatttactttttctgtaagccttttggggtttacacttaccagtttctaatggaaattagaattctaattgaatattgttttgtctcagcctaaaagttacggtcagcatggcaattcacctattttaggaaaaatactcttttcataatatgaaatgcataaagcagttcaaaaagcagtctgtattccatcatcttcctttttcattccagtccttatttttgtaagtattacttttcctcctccggctacctggactcaaaatctcagttgtctttgacagtttttttcttgtccctgaccaaaaaagaatgatcatacccagaattcaatgtttgatattttaagaatgtatgttctagtgtttttcagagtgagtctaccatctgtataaaaacaccttgggggcaggcaggggcatttaaaaatgtaggacctatcgtccagactcacagagtggggctccagaatctccatttttaacaaactctcttaagtaattctgatgtgtaccaaaatcagtgccattggtgtgtgtgtacgtaactatatacatatgtgtgtgtgtgtatatatataatgtgtcataaccgtaaacaataaacaatatcaagata

SEQ ID NO: 17232 - DNA, 1217 bp, Homo sapiens
aggatccagctttctctagttggaaaacttttgacaattagggtactgagtcaaaaaaggccagtcgctatgggaccccatactctgactgctggtctgtttgcctggaatctagtagttttgtttccttgttttctaggattaatttattcaaaaaggaaataaaaaatactcaatatgcaaaagtcttgtgaagaaaatgagggaaaaccacagaacatgccaaaggccgaggaagatcgccctttggaggatgtaccacaggaggcagaaggaaatcctcaaccttccgaagaaggcgtaagccaggaagcagaaggaaaccccagaggagggccgaatcagcctggccagggatttaaagaggacacacccgttaggcatttggaccctgaagaaatgataagaggagtagatgagcttgaaaggcttagggaagagataagaagagtaagaaacaagtttgtgatgatgcattggaagcaaagacattcacgcagccgtccttatcctgtgtgctttaggccttgaattcatttttgcctaatattaaaatctggccccagctttctttctgttagcattttctgatgtatctttgacctccattttacttttaatcatctgatgaaattttgttttaggtaatttccttggtaccagcatctcattggattttggattttgacccattttccaggtctatttttcaattggaaactttcacacatttgcatgggaatatgttcattccatgttgtaaagtaaaacataacaggttatggcaaagcagcatatttaatatcagctcacatatgtaggataaaattccaaactttgtgtgtgtgcgtgtgtgtatacatacatccatataacatatatcacaaacttaaccaagcttatttctgtgtggtgtgaaattttatttgttttcttctttttgttctttttgcttatatgtactttttaatgaacacgtgtctcacacacaaaaagaattaaggattttttttacaagtaagagtcaaataatttgcaaccagcttatgagggcaatgggggcacctaaactcttgatgaaagaactttaaaaagaaatgtaaacctcaaattacctctggatctcttagccagaggaataaactggcaattattacagatacacacgtttaagactcagtcttttcatggggaaaatatttgcttcacagggctgc

SEQ ID NO: 17233 - DNA, 1650 bp, Homo sapiens
ggtggcggcgggtcctctctagcgttccgctgcagcagcccccactcttcccaccccggccgtctgcaggtttgcggggccaagtgttgcggcgacgcacctcacgtcgagaatcgggaggaggagactgcaaggataggcccaggtcagtgcgagggacggtggtggggagggggtcagaacatgaggaaagcccagtctgagaccccaatccgtgccttcacccccacacttagcaatcccccacccccaccccttcttcgtcctccattttggtgcctgcagaggcctggagatggatctgcagagaagatggtgggctttgcgggagagaagggcacagactggctcccctcgcccccccgagggtacatggggcctctctggtggaaaaaaaatgaaatttaaaaaaggcctttgaaatccagggctctgaattttgaaaggtgggtagtcgggcctctgtcctcggtgctgatcagttcaccaagaattgagtccattttctctctgtctcctaggagtaatggagtccaaagaggaacgagcgttaaacaatctcatcgtggaaaatgtcaaccaggaaaatgatgaaaaagatgaaaaggagcaagttgctaataaaggggagcccttggccctacctttgaatgttagtgaatactgtgtgcctagaggaaaccgtaggcggttccgcgttaggcagcccatcctgcagtatagatgggacataatgcataggcttggagagccacaggcaaggatgagagaggagaatatggaaaggattggggaggaggtgagacagctgatggaaaagctgagggaaaagcagttgagtcatagtttgcgggcagtcagcactgatccccctcaccatgaccatcacgatgagttttgccttatgccctgaatcctgatggtttccctgaagttaatagggagacccctgcttcctaaacttacacatttgtggtgtacctttgtcgtaaacgttttgatgttacctatttcttgtgggtctcctattaccagcttctaaatgaatgttgtttttgacccagtttgtaagtttctgtcagcaggagagttttacctattgcatggaaagatgctcattatatattgtgaagttaataaaacagttttaaaaagcattctctgcattcttttttactttaaatcttaaacatgcacctaaacagtcatatatatatatatatatatatatatatatatatatatatatacacacacacacatatatatagtaaatagtgtttatctctgtggtagaattaagagggagtttattcttgcttacccataatttcttatttttcaaaatggaacacgtattactgataaaaagcaatgtgaccaccttataaaagcgatgtgagcacttactaaacacttgtgacagaatctcaattttagcttgcctctgggttctctttttagaaatgtaagagacacatctctttgaagataataatatttatcagtaagatgaagacaatcacctcccaggcttgttgtatggaccagataaggtaatgaggttgtgagctttctcccaagttcttgttcttactgacatgcatgacccaacactttagatattcccttctgttattagaggaaatt

SEQ ID NO: 17234 - DNA, 1206 bp, Homo sapiens
ttataacagctctgaataaaaaaaattaaatgctaaggcctctgtccacagcacctgtccactcaccaagtctttaacttactgtcttctttttgctttctagaagtcattgtattcaaagaagaataagcaagaaagaaaagaaggaaggaagagaggtagacagatacaagatgaaatcctgtcaaaaaatggaaggaaaaccagaaaatgagagtgaaccaaagcatgaggaagagccaaagcctgaggaaaagccagaagaggaggagaagctagaggaggaggccaaagcaaaaggaacttttagagaaaggctgattcaatctctccaggagtttaaagaagatatacacaacaggcatttaagcaatgaagatatgtttagagaagtggatgaaatagatgagataaggagagtcagaaacaaacttatagtgatgcgttggaaggttaatcgaaaccatccttacccctatttaatgtagtttaccttgatttttatctgatattaacaataccatatagcttgctttttattagcatttcctgatattcctttgtccatatttctacttataacctgttgctattaatggttttagatgtatctcttgttatctgcatctcattgtttattgtattttgaaccaatctacaagtctctgtcttttaataaaagaactttacacatttgtaaaaaagaggttcttggtaagatataaaatggaaaaaggctaagtaatatgtgaatatcatatttttgaaaggtaaaaagtacatttgtatattacatatatggacataacttgtgaaggatgaaagaaagtacagcctctcggtggtgggattatgaatgatttttctccttttgcttgtttgtattttctatattcctaaaattaacacacattattattgctagaataataaaagttttataaaaaagaagcaacaagcagcacgtattagtttatttctaaaagtattggggcatttaatatttgttgacagaattttagaagaaatgtgaacttgaaagtaactccagaccacttagctagaataataaattttacatattttctcatctttaaaataaagaaaataatctcacaaggatctggtgagggccaaatagagtaatgactgtgagctatgtttgacagagttttgttcccatcccaactccgtaagagattaatt

SEQ ID NO: 17235 - DNA, 1245 bp, Homo sapiens
aaacgaaaaatggtgggtttgggggaagggaggtaaggggagaaagctggagggaggggctttaattggaggccccgtagaggacgcgcggaacttctaaggtgggaaaaaacgaaattaaaaaatcctttgatatcagggctctgaatcctgctggtcagagcaccaagcattcagtctctctccttgcctttgtcttacttgtgttcaaagaaaaacaaccagaaaaaaaaaatctcatcatggcaaatattcaccaggaaaacgaagagatggagcagcctatgcagaatggagaggaagaccgccctttgggaggaggtgaaggccaccagcctgcaggaaatcgacggggacaggctcgccgacttgcccctaattttcgatgggccatacccaataggcagatcaatgatgggatgggtggagatggagatgatatggaaatattcatggaggagatgagagaaatcagaagaaaacttagggagctgcagttgaggaattgtctgcgtatccttatgggggagctctctaatcaccatgaccatcatgatgaattttgccttatgccttgactcctgccatttatcatgagattaatactgtgattcccgctgttttctttttccttgcattttcctaatatgcctttactgatccgtttgctgtgaaccctatgttatttccatgtgtcaagtgggtcttgtgttgccagcttctatttgaagattgcctttgcactcagtgtaagtttctgtcagcagtagtttcacccatttgcatggaaaaatttaaagctaataaagcaatttaaaaagcaatctatacatttattgtctcattaaaaatgtatacttacatataacagatgaactaaaaaaaaatctgagattaaatacactagagtgttaattggtgaacatttctgtgtgttaactaatcccagcactttgggaggctaaggtaggcagatcacgaggtcaggagatcgagaccatcctggctaacacggtgaaaccctgtctctactgaaaaaaaaatacaaaaaattagccggtcgtgatggcacacgcctgtaatcccagctactcgggaggctgaggcaggagaatggcttgaacccggaaggcggaggttgcagtgagccgagatcacgccactgcactccagcctggacgacagagccagacagtctcaaaaaaaaaaaagtaatatgtgacatttttttccttttattatctg

SEQ ID NO: 17236 - DNA, 1157 bp, Homo sapiens
tgttttcttgagacaggagctctttagcctccttatgttgctcaggctggagtgcagtggctattaacaggcacaatcacagcacgctacagcctagaactcctgggctcaagtgtttctctcacttcagcctcccaagtagctgggatttgcagtgtatctcgaatgtgaaatatcttcccattgtccaggcataatttcccaacttttattcatgctattacacatctatgtctgtaaatctggaactaatctgggcagtcttggtgaaaaaaagtcagtgattgccaggagttggtttttatgtgtccaatctactatccaaatccctcggttagtttaggtatgcatcccatttagaacttgatatgatttgttattacatgtgattggcatgtgtatattttctttcggtttaatatttttaattgtataagtgaggtacttcatacgtgtgttgattactcctggggccctgggccgagtgagactgtgactctacttttaccctgaatcccgctgtgttaggattctgtcctctggaagctgtggtgctgagccctagtggtttcatgcagtccctcccctttccctcccctgtggcagtcactgcttggccaactaggtgggtaaacagaggagcctgctgtcaattcaaaggactttatttgtgctagtgcagaaagaagcatgttgtgaaaccactttcatctcatgaccttcactaaaatcttgaaaagtagaaatgtcatctggctgttgaatgtgaggttcatctgagagacgtgcttgcccttcccccgggtgtctgtaatttccctaaacctgcccacctggggatgtcatgtatatagattcatactttaattctaggaccaccctagtacctaattgtcttggcttacacatgttatcattcctaacggtgagcaactttccttgaaaagggcaggggtattttgtttttattgtttttttcacttccaaaaccaagacacttttcttctagataaaaatggaaaatgcctgaagggaataaaatctttaaaaaaccttaaaattttattatgcatggataagcactgtcaagatttgaattttttttcagaagttatattatgcaaatgtaattatatatttaagaatagaaataaaat

SEQ ID NO: 17237 - DNA, 1622 bp, Homo sapiens
ccccctcggaagaaaagggcccgggcagaccccactgttgaaagtgaggaggcgtttaagaatagaatggaggttaaagtgaagattcctgaagaattaaaaccatggcttgttgaggactgggacttagttaccaggcagaagcagctgtttcaactccctgccaagaaaaatgtagatgcaattctggaggagtatgcaaattgcaagaaatcgcagggaaatgttgataataaggaatatgcggttaatgaagttgtggcaggaataaaagaatatttcaatgtgatgttgggcactcagctgctctacaaatttgagaggccccagtatgctgaaatcctcttggctcaccctgatgctccaatgtcccaggtttatggagcaccacacctactgagattatttgtaagaattggagcaatgttggcctatacgccccttgatgagaaaagccttgcattattgttgggctatttgcatgatttcctaaaatatctggcaaagaattctgcatctctctttactgccagtgattacaaagtggcttctgctgagtaccaccgcaaagccctgtgagcgtctacagacagctcaccatttttgtcctgtatctgtaaacactttttgttcttagtctttttcttgtaaaattgatgttctttaaaatcgttaatgtataacagggcttatgtttcagtttgttttccgttctgttttaaacagaaaataaaaggagtgtaagctccttttctcatttcaaagttgctaccagtgtatgcagtaattagaacaaagaagaaacattcagtagaacattttattgcctagttgacaacattgcttgaatgctggtggttcctatccctttgacactacacaattttctaatatgtgttaatgctatgtgacaaaacgccctgattcctagtgccaaaggttcaacttaatgtatatacctgaaaacccatgcatttgtgctctttttttttttttatggtgcttgaagtaaaacagcccatcctctgcaagtccatctatgttgttcttaggcattctatctttgctcaaattgttgaaggatggtgatttgtttcatggtttttgtatttgagtctaatgcacgttctaacatgatagaggcaatgcattattgtgtagccacggttttctggaaaagttgatattttaggaattgtatttcagatcttaaataaaatttgtttctaaatttcaaagcaagtaatttgtagtgtgcctttcatgttactggttggtattctggttattgtagaaataaggttggtattctgtggttattgtagaaattttagaaaacatagtaagaacaaatgcaaataagaatcatgtaattctactggatccttcaaggtcccagcaaataaatgggactcaaaaatgggtgatttgaggagagttaaagaattttttccctgagttgccaccagaggggtagggttgtagtgtatattagctggctcaggctgccgtaagtacctcagactgagtggcttaaacaataagtttattttctcacagttctggatgttagaagtcagatcaaggtgttgccagaggatttttttgaggcctccttggct

SEQ ID NO: 17238 - DNA, 1262 bp, Homo sapiens
ggtacgatctcaatctcagctcactgcaacctctgcctctcgggttcaagcgattctcctgcctcagtctcctgagtagctgagactacaggcgtgcaccaccatgccctgctacttttttttttttttttttttgtatttttagtagagacagggtttcactacgttggccaggctggtctcaaactcctgatctcgtgatctgcctgccttggcctcccgaagtgctgggatcacaggtgtgacccactgcgcccggccttatctgtctctttaagatcctattgcatttgggatcctgtagtattatgccactgcctatttacctaataatatatattgaacatctttccatgtcagtacacagatctctgcttaattcatttgaatgttcttctgtagtattcatacataatttatgttatcattttcctgttgaagaataggtaggtgttttccagttcttcagtattgcaaacaccactacattgaacatctttgtatccatgtgcaaatattcccgcaacatactgtgctagctgttcagccacatcacctttatgaaattctcacaggaacctgtgaaggctataggtaatttgccacattccacagatgagaaaaaggctaagagagcttacatgtcttgcctgaggtctcacaactcataaatgacggagcctaattgaagtaaagatctgtctgacagcagaactcaagtattttctctgataccacgatttacaattgtggtatatgattcatatatgtgtttaaatgtaaacatataaaccacatgtttataaattactcattttttttctttttcttagatgatttcacaaaagttcatcttcattgcagatacctgcctttctttctaggttgtatctcccacttcacccttctagaccatcccagaagatctataagatttcatctgggaaatcactaggagttcttggaagggaaagaaggaagattgtgtaagtcaaaggaattgtttcctctgtcacaccataagaataatggaagactattttttgcatccttatcttactagcactccctgctgcactttacactgtagattatacctttttcttcttggaacgctcatcatctttggcatccaaaataacattcttctaattctgttatggctactcttaacatttttgtttcatttgtggtctctgtgcatcccttaaatgcctttcgtccttaggttttccagaattccatacttgaagttcttcctc

SEQ ID NO: 17239 - DNA, 1136 bp, Homo sapiens
gccctaccctggctagaggatgtaagcaaaggatgttggcaaaaaagctctgagggggaaagttggatccaactgctatttctgtttctatagatctaattattttcccttttctccaatcataataaatctaaagggagttatttggacacatttcccaggctggaaaaagccatttcacacaggagagaaaatatggccaacagagtaagctggtcttggctttttgtgactttaacatactgcacctgttgtagctggaggagcaaagatgaatggcttgaaatccaggggtggggcatcctgcatttgggtattctctatttaggccaaattctgaggggtgtttgtgtgtggggtgtgtgtgtgtgtgtgtgtgtgctggaaaggaacattggagccttaaataccactttgtggcttacatgcctattaaaatagaactttttttcccctggctatctataggggagaaggactgagaagctagagagggaagatatctcaaaaccacgctaaggagggaatgcacagtgtaggaggtaaagtgtggagatgggaaagagtgatttgtattgaagtgagaggggctagaaaaaaagggattagagaatggggaatgaagagggtgctggaggatgaagagaggtgggcagggttctgggaccaagcccttgagaggactgggcagtattttgaaatttcttccagttatcaagttattctattgatcatggcaaagcttttgctctgtccagtttgaaagacagtcctctccaatcagcctgtaaaagttggtgagctgggttacatgactgctgtgtccagagcctggtgctaaggcctgctgaggagatgaaaaagagcttccctttcctggggaagcttatggactagccgggaagacagtgtaggattgcatgggtaaaaagtaaaccactttaggcagtgacatgaaagggggccaccatgctatggagttgttggttgaggagagagttgagaagaaaagatgtgaatggctggctggttcctagaacactcctaactgactcttggctaagggttccctggagatcacatggattttctccctgccctctcagactgaagaattctttttccctagctggagc

SEQ ID NO: 17240 - DNA, 1104 bp, Homo sapiens
aggataagttttaacaatcaaagtcctacctcagcttcccaatgcttgcacataaattggaatgtgtacatcattcattctgtctctctctgtgtgtgtgtgtgtgtgtgtgtgtgtgtgcgcgtctgaagaggagtggggagtataggaaacaagatagtccagatgctgttgccgtggtaatactaaatcgtgtccaaagaggaggctgagattcctttttagttaaccttgtccacatgatttgactatccagcaggcttggattcccaggccccagagacttcgggactgttttccagcacttgaatgtggtatataagtgctgatatcaaaagggatatgtaggaaagacaagattataggcagggcattgtctgaccaggacgaggcccgaagcaaaagtctttgtttgtctctggcacctcttgataattgttgttttactcctagaacccacccactgatccccatccatccctagtaccagtcacggctgctctagcatttcggccttgtcaactactgcaggccctgatcaaggaggcctctgttcatggggtaaggttaaggggtgggttctgggaggagggtaagactgtagtgcagattcgagacctagggaggtggggccagtttctcactcaatgagcctgcctgttgtttagctctattgtatagggttcttctatctctccctttgtcagctggattcaagggacaggctgggaattgtgcagggtacaattggtctctttctaccattcctttcgatgaaagcccttcctctccttcctttgatgagttcccagattcacactgaatttccatcatggagctggtccttgaggcgggcccagggcatgggaaaggagggagggagggttgggagctcttggtgcctgcttaaagagacagcatcaggatcaacacagtcccttgatgaacctggatctgtgtaagtcacattggttctgttgatctctgtcagaccgctgtgaagagcgctggtgagaagggcttaaagttggagtatcaactatcacagattgattagacttgttttgggagtttgtatacaaatgtagccaaccatgacatgat

SEQ ID NO: 17241 - DNA, 1164 bp, Homo sapiens
tgaaaattcttctaactggccattaagagtaaggaagttgaatggtactgctgaagatctgagttgactcactgaaattttattttcttatttttttaacattaaaattatttctttttggctctccctctagttattttttaaattaaggtaattactgttttaacctagagcatataatggcaaattaaattttaatttgacactcataccgaactcagaaaagcttgtttgatcttctctaaattctgtatgtagtactttttttaattgtcacatttctttgttacatctttgtgtccaacaaaacctgtggaaatctgtgttcatttttgtggtgagggatgggggtgaaaaaggggagacttgctctaattatgcatatacatttgactatgtaaaggtagttgtagactatatgtataaataacaagttaacacttaatattctaaattgttctaaggaacagtggcctgaagccatgactagttttgtggagctgctggctcttttaacagtagctgacctattggatttaaactgagactgaaattgacatttgtggttaggttatctagctgaggcttttaacaatggagcagataatgtctgttcctgtagtggatccatttaatttcctatttgagtactctcacttaacaagtattatctattctgaacctttgtgttgggaatttaaggactattgtcaaaggctattaatggtaaacaagtatatgcaaaacaattcacatatgggtaaaaatttcaaattgtgggtttttgtttttgctttttagtttcaaagattagttatgtagcagcaatatcataaccaaagcaagtaggaagttgactggtttggagaatcttcaagtagttttaaatactgtaatgtatcagattgttaaccaggatttttttttcctgtattactgctaaatatattactatattaatgcacttttgtatatataactgtcttctgtacattctgtacttactacagtgtatataaagcctgttttccctgaagctgtgagggaataacaatagttgtatcataagtcgtttctattttgagttccttcttgtacttgaaagtagttcagtagtgaaatctaaatgagtgtgtatggttgtaattaaaactggcaatgtgg

SEQ ID NO: 17242 - DNA, 1208 bp, Homo sapiens
acttctgtcctccctcacttggagcttcgtgagatcgggtatgactcagaacaagtggatgggatcctgtacacggtgctggaggcaaatcacatactggattgagcaccagactgtatacccttctcttctcttatcttctgtctgttctcttttctctccctccctcacgtctctctctctctctctctctctctctctctctctctctcaccctcacctttatgccttatatagagaatctctgtgtaaatcctggctcataatcagtctcctttttatcagttttggtgtggagaaagaggccagtttaaataggctttcaagagtctagggtcagaaaagcaatagtcactaagctaggtgacctgaaagctttaattttcatgacctggatatgtggtctattgtatatctttttctgaaatggtttgtattcatttaggttagatcaatcagcagatattgggtccggtataccaggtattattttggggtaagctaacaagtacaactcatgtttgcagccttcgaagatgtaacaatctcgttggaaacataagacatacatcacattatacacaaaagtgtatgatatgtacaactgagtggtacagatatgacatggaagatctgggggaggaagttcaaggaaggcaccacaccagaaatgggacctaaattaaggcttaaagaatgagcatggccacactgtcagtgagtgttctttaggtggtaggactatggttgatatttttcttcttcctatcttcctgcctttttcagattttcaatattaaacttgttattcttacattggaaaaaaataaattgtttttaaaaagatcaagtaggcttggatttgaatatcaaatgagagattatgtgaaaatataaggtaatgttatatttctaatttatattaaatttagcattacctctggaagaagaaaagcataaacaaaggcatggaaaaatttggaatgtgaaaaatgtgttcgatagaagtggtgggttaatataaaggggactaaggttatatcatgatctgttcgcctgctttggtattcgcattttaataagggattcttgaaaaacctataaggctcaaattaaaaaatatatttgtcatcaaattaatgggatttcaggtagttagggaagtactttagagtggaatctgatgtccctcagaatatacctactta

SEQ ID NO: 17243 - DNA, 1207 bp, Homo sapiens
ggggaatgggaagggctgggggtaacagttgaagtgtatgaagtttctttagaggttgatgaaagtgttctaaaattggtcgtggtggtgatttcacaactctgaatatactaaaaaccaggaattgtacacgttaaatgggtgaattgtgtggtgtatgaattatatctcaataaaactcacaaaagtaggggtgtccatcaataggaaaatgggtaaataacttatggtacatctatttagtacaatactatgcagccattaaaatagtgaagtgtatctatgaatatattatgacctatactcatgtccaaggttgtgtattaagttaataaacaagatgcagaaatatgtatagtatgaatacatttttatgcaaaagcattcatttatgtatagtatgtatgtatatagatatttctgaataaatttaagaaaaagctgggaaatagacatagaaagttataaacctttggaagtgggattgaataggctgaaggaggactttcactttgtaaaatttttaaagtggtgtgattttggggtgatttttacttttttcatttttttttttaactaaaaaattttttaaaaaatattctgccaatggcatggcttccagaatatttgtcaggcctactctggggatatcatctgactatactcaggacaaactcctattcctttgatatactgctcacttaggattaacactctaatttcagacatagttaagtgacaaggaataaattatcctgatatagcctctgatacatgttaccaggggcatacttctaagctggactttttagaaggaagtgcttcctgttaggtagaaaatttcacctctgctttttactagacctacagaccactgcaattgaggaacataaaaatgaaggatatccttcaactggtgcatagataaaccgtagtatatccatgcaatggaatcctactcagcaataaactaatgaaatacacatgcaaccacttggatgaatcttaaatgcattttactaagtaaaagaagccaaactcaaaaggctgcttactgtttgattccattcatattattttctcaaaaagcaaaacaatagggatggagaaaaaacttcagtggatgtcaggggttaaggttggaatgctccttgactacaaagtggtagcatgaggaatttgtcttaataattgaaattttccgtgt

SEQ ID NO: 17244 - DNA, 1154 bp, Homo sapiens
taagtcttcctatatcaaaataacaatgtgcatggattaagcaatactataaaaggcagagatgtcagaaacaagtctgattccacttcatgccatctatttgagacacactttagaagatagaaagagattaaaggtaaaaggatggaaaacaaatatatcacacagacaacagccataagaaagctggagtggctattctaataccagacaaaatagacttaaaaaaatgttactggagataaagagtaaaatgttacaatgataaaagggtcaatacatcaggaagatgtaacaactataaatatatatgcatctaacagtagagcccaaaatacatgaagcaaaaactgaaaggaaaggagaaacagataagtccataaaaagagttggaatattcaatacccctttttcaataatagagcacctagacagaagataaaccaggaaatagaagacttgaacaacattataaggcaaattgacctaaaagacatctatagaactttccacccaacatcagaatacatattcttctcgagtgcatatgaaacatctccaaaataggtcataagttaaagcataaaacaagccttaataaatataagtagactgaaatcatgcaaagcatgccctctgaccacatgggatgaagttagaaaacaatgaaaagttgggaaactcacaaatatgtggaaatcagacacacttgtaagtgactggctgggtgcagtagctcacgcctgaaatctcagcactttggtaggccgaagtgggaggattccttggatcccttgagaccaggaattcaagaccagcctgggcaacacagcaagaccctgtcattaccaaaaaaaaaaaaaaatgtgtcaaagaaaaaaatcataagggaaattacaaaaccctttgagatgagtgataatgaagacacaacaaaccaaaacttacaagatgcagctaaagcagtgtttacagggaaatctataggtacaaatgcctgtacttaagaagaaaaaagaccaggcacagtggcttacgcctgtaatcccagcactttgggaggccggggcgggtggagatcatggggtcaggagatcgagaccattctgggtaacatggtgaaaccctgtctctactaaaaatacaaaaaatta

SEQ ID NO: 17245 - DNA, 1130 bp, Homo sapiens
ggatgaattacaacggattattcctaaggatttttaaaaatctttataatttttctggggtcctcaatatttgtctctagagataacattctttcttagactgcttcgtatacacagaaataaaaaactaattaaatgttgaaatatttctttactagagcccatttgccatatttcatccacctagtaaataaaagagtaggacccccaggcctaagcatcaacaaatgctattaagtcagaactatcagcagtaatagtaggtagtttcataagtcagttgacttatttaatgaatgcttcctccacaagttatcagtcttcaaaaagctatatatttttctagtgaaatattttagatcaaaatgttggtgttctcacagccatttaagctagcaaccattgagtatcattgaattcatagcaataaacattgattaagtgtctaatatatgttaaatattaggcatatgaattttagaagaggaacatacaagcaaagaatgccaaacggaaatggaaataaagcgttctctagaaaagaggatgccagtcacaaatcccccagttgtttgtttatggttgctggaaaataaaaaaacaatatacagagaggaagtagtacaaactggagtcagacctgtacagccacacttaacattctatgaccttggcaagtcacttaatctgagcctcacatttttcatctataaagtgaggataataatgctacttacctcactgggttgtgaagatgaactgagatattatccaggctgaagaacagaaaggaaaacaatgaataaaattgaacaagagtatagaacctgtgtgacaccattaagcattcctacatatttctaatgggagtacaggaaaaaaggaaaagaaatgaaggagcagaaaaatattctaagaaataatggctataaatacccccgatttgatgagagacattaacctatacatcccagaagaaaaagaaattacagacagatacatcataagaaaaatgctaaaacccaaaaacgaaaagaaaatcttaacagcaatacgagaaaaatgagccatcacttaccaaggaacccaaataaaattagtagttgacttcccctcagaaacaatggcag

SEQ ID NO: 17246 - DNA, 1984 bp, Homo sapiens
atgcttggttaatttttgtatttttagtagagacggggtttcatcatgttggccagcctggtctccaactcctggcctcaagtgatctgcccaccttggcctcccaaagtgcagggattaacaggtgtgagccaccgtgcccagccgtaagtggctatcttaaaaatgttatgaagaatagctgagtgcagcctcatgacagggaaacagcacagtgttgcagttttaagaggaagggcacttgcctggctgctcatcagtgtctgcaaattggccagtcatctctgaccatatgatagtaacctgatttcctttcttgcctttctaggtgattgacatctctatgatccttgcagaagccatcaggagaactcacaatggagaatccgtttcttacctattcagccatgtccctttataatagagtaacttctgaggctttttgagaataaaatccaccccacccttgtttccccttggtatttgatgacaaattcagcagaagacccggcttgctccagtgtagctttctacatcccacatcaggtatattagagcttatccgaactggggaaagacggattgagattaactgctgggacctcctacctgcattatctcattctggcttccttgataattctgtgggccttgcagctttaactatagctcagctgctgcaagatttcagacttttgaggatgttgtgtgagggtgtttgactgtgactggggaagctcagactactttgtatgtgaatgcttcagggttttctttgttgagaacaactagcaacaaaggcaacccatgtgtgaccagttctccccaaggtctatgctaaattatagcaagagccctgggcaaccccaaacctagtcctggtagctgagcaccctgtaaggcaggagcaggcagctcagcttgagcagacattgggtggggggtggggggtggttgaggggggaggcagcacagtgcagcaaatgtttcttgggaggaagaagcctgatccatcaccatctgcttgactatgtagcttggattctcctttgtacctatccctttcgatttggctttaccttcatctatcttgatcctttcctggccaaatatcctcttgggcccaaatgaacattgtaccatagtcttctggaaagcaaacatgcttcctgctatgtaattgctaacattcatattagatgatgtgctgtagcttgatcttccttagcctactgccactgaggcagtaggttttaggtggtatcgtagtgccttttgattaatttaagtatttaattttcatcttccttctttggatctatttggcctctcaaatgaactgagattcctgttaaaaaagattgatgttattgtctcttgtagaggaaactaataaagtgtgtgtacctgtgtgatttggggtctgtatcatacataatctgtactgatctctctgctaaaggtttggtttagatagatgtcttgctgtccattgatagctcttatttgtttccaaactacgttagcttcattgttaaaccaagagaagacattggcagcagttttattcaactgtaagactaagatgtctggagtttactgagaatgtgataagagtgtaattctgtgcagtatacctaaattatagcatgtataatgtctggtggatctctggttcttactcctgaagatccaaattaggtattttcttatgggaggagaatttctgtgatttattcattttgaactaattttgccaaatgtgataatttccttccattcatcagtaattgacatacgtttggcatttactttctttgttttttttgattttttggtttttttttgagatggagtttcgctcttgttgcccaggctggagtgcaatggtgcaatcttggctcactgcaacctccgcctcccgggttcaagcaattctcctgctcagcctcctgagtagctagaatttataggcatgtgccac

SEQ ID NO: 17247 - DNA, 1160 bp, Homo sapiens
aaaaaaacctagagtctcgggtttatctgaggcacttatatctcctttaccaatatttataccaattatttcatgttctaactttcttttgcctcagctaaaacatttaaaacactatggtgatatcagacatccttgccttgttcataatgttactggaaagggccttagcatttcaccatttagtatgaagtttgctatttattatatttgaatgctgttttatttagaattttcacttggactggctactgattttgtttaaaaaccttttagaatatattaatataaccctatatgttgattttttctaatcttgaatcattcttttatatttggaataaaaagtgtttggttatggtattttattcttttgttgccctgctgcttttgttaaacatttttctctatatattcagaactgaaatcaatctatagccttactatttctgatatcatttttaggtttctgatattgtggaattatactagatctagtaaatgcatttgagacctttttgtctttctctgtggtcttaaatagtttaagttgtgtgagaatgatttgttctttcaaagtttatggaactcagctctaaaaccatctaggcctggagccttaaaaaaattacagattgttaatcacccttccaatctggtctaaagttattagattcttgaggttttgttactccttcttgggtaaaagcatttaatagattttaaaatcatgtggtatacattgcatatgatagtcccttataattaatatctctccaatggtgtgctggtgctgactttccaattgtgtgcatttttcccatattttggtttggtgtctatacattggtagcttaaaatccactaaagtgtaagttttcacgccatggaaatcagcaagcactacaaattgcggcttttttttttttttttttgagagccaattgttaaatggttatcagcatactattgtctatatctataagtgtatctccttttccattgttagtattgtatttttgttttattttctccctttttccttaataagtaatttcaaagaagcagcttttgatgttaattatctgttaattatcccttgtaagttagtttcattttgattttattagtttgagctttttaaaagtgaatttcctcct

SEQ ID NO: 17248 - DNA, 1180 bp, Homo sapiens
cttttaaactgctttttcaaactttaagctgcacgaattactattaacagtttatgaactgaggcttttctaaattctaaccctgaattattacatgtagtgtttgaggtaaacaactacttatctctgtaaaatgagaaagttgttccttaggctagcatttagatcccttcttctattgtaagtagaaccagaattatgatttacgatctggtattacaaggctttttttgtagaattttaacttacagtctccctatgcaaactgatgtttctttcctgattaaataactttccaatgttaccatttcttaatcatatgcacttcagactacctagcaagaaatcctaaccattacatagaattggtagtgattaattggtctctggtggtccctgatttcagacacttagcctgtgatgaggagagagtggaagaagcaaaactgctggtgtcccaaggagcaagtatttacattgagaataaagaagaaaagacacccctgcaagtggccaaaggtggcctgggtttaatactcaagagaatggtggaaggttaaacagcttggatttattcttactttgtatgttgtgttgttgtccccagtgtcctacaaactaatgtatttgtgcacaagacatcatctatgaatgatgaagttttctcaccttcaaagtcttataaacatgttgactcttgttcctgctgagttacttgttcgaagcttacagcttgttttccaggcatcgaataactgttgagattgttctactgttgtcgtatattcttctatattgaattctggttaatttggagtaactaattctgtggctgttgtgagtcttcagcaccctcccatgtaccttatatccctctctgaaacagaacagctccaatagcaacaagctagttgttctgccagatgtttctatgtggattctgtaatgttcctccatacagttaaaacatcctaacttgtttttcaagctcactcaggcctacgccaaacgtttctgttttttttaaccatgaggtttaatttatttttgtgataggagggatatttacatattttagtggaccacattttaagttggatggtgtgctctaaaatactgaaaaacaatagcccatatacctatgtatttgtttttgatgggttgtttactctgaaataaa

SEQ ID NO: 17249 - DNA, 1323 bp, Homo sapiens
actgctcagtccactcccaacaatactgtgtggaagattgcaagtgattgcttccgttttcaagattggtctagtagttaaaggggcaaaagtccattctcatttggtccattagttccagcaattgaaatttatgtgaattattttgattgtagaagcactataatatgtgctgaaactaaatttctttaatattttctattcctgtcagcaccttttctagcagctgccagtttggagcattgccctctaagagctttaaaactatttttttacatgccttatatacattccactaatgacattcttataataatattaaacacatgatcttggtactaacatactcactgtgaacccagcctattgcaaaaataaaatctttttataatattatctatgggatgtcagcacaatataacactctgggaagaagtggagttttttggttattaggttaattttctagtaaaacacgttgcctgttttcagttaacactggtaatgccattttaatatatggctttttcaaatcagttcagtgaaaatagtacagatttaggtttacataactactctgacatactggaattgcatatagagatgttcagtggtcgtttttcattttaagtaatttttgttttggcatttttttgtgtgaagtaaattaatcaactagagaggtgcaaaacgttctcagttgatatctgagtattgggtgcatttggtggcttaaaagcaaagcttcctaaaaagatttttcttggcagctccaggtctatacatttaggtaatgaatggtagtagaactaatagctttaacaggagaatagggaatgagaaatagaaatccaaggctgaagccaaaagtaaggagggtggccaaatggtaaactattggtacttgttttctacctcctaaaaatgtagcttatttttaggatttaaatcactaagtaaataagtatccttgccaagtgatcatgagtgtcatttttgttctaagactaatatttttagatctttttacttcacctcatacttatcaccaatgtatatctccatttattcaataacttactggggtaaaataacagcaataaacctaaccttttaacagggtctaacatgagagttggagtcaaagccattgttatcttttggtgacacccttaaattttaagtcttccagtcttccatgtgaactttaggcccaaagtttcttatgtatcacacatcccccaaataagtgattttttcccagtgctttgtactgtcaactgcattatctttaattatttaaaggtagaattatttaatttt

SEQ ID NO: 17250 - DNA, 2701 bp, Homo sapiens
atattaagcatgacagaaaatatgtattaacactactcaaagcaaaagtgctgcagggctttaaaattctcttccaaccatttatcttgaaggaaaaattcaatagtaatataatacacaaaatcaaataataccttagaaggtattaagattataattgttgcataggttagatatagagtcattgtaatgttgtgaataattacagtgcctaaaataagaatagaacaacatatacaacaccaaaaaatatctagtaatatatttaaagggaaattgagctgctttttttgaaactttgagatctaaaaataactgtaattatttgaatgactaagaggaaagtacattttttgaaatgctgaaaattgcctttctgtgtttattcaaactgaaaagctgagaccaagagcaaggaaggtaaaaagttaacaggcaaacattttctcttagaaaaggtgataaaatcataagtatttggaattagaacccttgcacagcactgaacctgggaaagagatttaaactctgaatttatctttgataacagggattgattttaaaatgtacatgtattaaattacatttgtaatttaaggtctgtttgctgttgctgattttattcttgatcagtagtttgcatttcagaaagcctttcattttgctttaattttagcaaagcgggttataatgaatgacttccccaatatcttgcttgaacttacaggtgattaacttggatgagttttgggaagttaaagggaagaaaacactgttatcattttttcctgtttgggaagagcttagaaactggaaatactagatttgggagaagggcagagttacttgataagggactgatgtttgtgcagtaacttgggagtgtggtttctttttgaatctttaattaaaacctgggattatatatccctgataaatattcacacttgaaccatagttactgtaaaatgcaaaaaatcttaatactgttattctttgcactttttcttaatcattttttatatatatgcatatatatatgtgtgtgtgtgtgttgcttatgttgttttgtacagatgtgggccaccattgcaacaaaatacattctttttgctctaaaatatttatgaagaaaatacttaaatgttatgtatatggtggtaataagggaaaaatcaagtattataaacaagaatgaaggtttttgtaaagatttctgttcagcgttttgcaaggtaaaattttaggcaagttttccctgaagttatgtgtatgtgagtattctcattcttcccaacttgcctttgaagagtgaaataccattattatcaagtagactactgttcagcttttattcctgccctgctgtttatcccttaagaatgagtttcttagacttttccaatatgtgattttttttcccatttagaatggtgattttaaatgtgtgagtgcatgtactatcttatctcagatatttgcacccccaatctgcccccaactcccaaaagctagaacactgccaactgatctgttataggtcctttagaaacacataattaacacttaaggttgggtgctgctaattctttgcaaaaatccaaatattgttaagggaccagggagatgccactaccccttgattttccatctaaaaatatacatgtttatgtaaacaaatctttccatatccatagtgacttttcaagtatttaagcctaaagattttgatctcacatttttatacctgtttaaattgctcacagttattacatacacatcagccatcaactaaagttgtactttaaaaatttactacaatatgtacatttctaagtcaaacacttgtgacttttgctttaattccatgaatgttcctgcctccttgatatttgtatttattctttttttctctagagtagaggtataattgtgtgatatttcagaaatacagataaatgattcaaaaagtcacagttaaggagaatcatgtttctttgatcatgaataactgattagtaagtcttgcctatattttcctgatagcatatgacaaatgtttctaaggtaacaagatgagaacagataaagattgtgtggtgttttggatttggagagaaatattttaatttttaaatgcagttacaaattataatgtattcatatttgtactttctgttaaaatgcatgattgcagaattgtttagattttgtgtttattcttgatgaaaagctttgtttgttcttgtttttaagtttgcactcaaatcttaagaaataaatccacccatgttatcaagccaatttgtacttcattatgcattgagataaaatctccaagtttgaagattattaaccaaacttttaaacacatatttttaaagtactcatctccaggtttatggaattgcattaagcagttaaaccggcttgtatagtcccatccattagttcagagtatttgaatcccaaactgttactttggtccagtcaatagagtaaaacccctttgtaacactgatactttgggacaaaacatggattatcagtgggcgctaccaaattataactgctacttttaggctaattaatattttagagagaaattaatttgagttatatgagggtgtgtataaaatggcattaagagctctatttcctggctttgccactgtagttgtgtaaccttcagcaaattaat

SEQ ID NO: 17251 - DNA, 1268 bp, Homo sapiens
gtatttagcagaatttctggcttattgtgtgcactaaataaatgttagcagtttttaatagtaatagtattacttaacatttcaagatcatagtggtgtattgggtaagagtacaggctctagggtggtaaaagcctagattcaaattctaccactagctctgtaaccgtgggcaaattacttaacctctctgagcctgtgttcccacattcataaaatgatatgatcaaacttgaacattaccagagttgttgtgaggattaagtgagaaaaatgagaaaatattaataaagcatttaagatagtatctggcacataagacacattcaatacatttaaatgatgatgatgatgatgacgatgatgtcggcaactaagatggtgagggtgatgatgacagtcatcatcattctcactatggctgctgcttcgagcctgggtgcctgttgttgcaataagatggtagggatttgatacaggaaagcttttccaagaaaatcttccctggcatcataatttcatgcagtgggcaaaggtattggttccatgaagttagcacccatgtaataatttctgcgggacagggttgtttggctgtttgaggcttaaggacgtgtttgtgggtaatgtgaaggtactttaaattatccagtcctttctgggtgactgggtgattctgtttaaaatggcaactcttcttacatctctaagatttaaagaatttagaaggtggctctcattgttaggaagcttagctttccggggacctattggcttaattattattgctctttatcaatgggctggctccatggtgcaaactctcttgagattggtagtctaggaaaccagtgagtttgtgacagaagtatgaaaggagtgagcttgggggaatggggtgggcatagactggtgaatgggtttttttttttggttgtttctttttttttttttttttttttttactttttcatttatttcttttgattaaggggagtgcaactttctccagtgccaactattaccagagctgggtaactgttggaagagaaagggccacccccagagctcctgggtgaaaggcaggttcaagtgaacaagtatcttagctgaaggagaagcacagtatagtggaaactgtgctgctttcaggagaagacttcactgtgccttggctttttgcatcagcaaatggacagaaaaaaaccaattattcttacatctccgggatatggtaatcctctctccttaagaccagctctcctcct

SEQ ID NO: 17252 - DNA, 1999 bp, Homo sapiens
cagacccattctacggcccctggtatcgcatctgggcctcgggacaccagactctcatgaccatgacccacgggaagctggtcatcctgttctcatacatggctgggcccttgtgtaaatatctgctggatttgctccggcttccagccaagaaaatagactgaaggtgcttattttttttttttttcctccctgaggaagcaagtcgtgacttgacttggagaacacccagttcttgataaaatcatgggagagggcagtaggatgtttggtgtatttctttttcctcctttctgtccctttcttctaccactcttcctttcccagctcttccccctacgatgtctccttgagcctggggtgtagtgctgggcgctggattttcctccttccctttggctctctctctgctcctagtggccttacatggggagattgcagtgagcggctctttcactctgcttgtcggtgctttaacaacagctggttgaggagaaagggaacaacaagtagtagttcttttggcatcgaagcaatgagattgggttgtgtttcatttctccactgccagggacctccaggcttatgctggcgtcccatttagtctccagcacagcccttaccacgggggactgaggccttgtttctataccagcggcaagcccagagccgagggatttcacagctcgtggtcaagacagaaccagccagattctggtcactggtgtcccatgactcaaagtaaacagccaaccagccactccctccaggatgctgcctggggtgggaggtgagagcaccacccagcccaagggctagattccattgagagggttggagatctattgcaatgacaaatccaaagtgaagagggtcaagatatatacagtactaggccagaccctgtgtaagttctgcctgtgagagttgagaactgatgcatatcccaatcagaagtgagcacagaaaactgtgatttgaatcatacactctgttttaggaaaatgttgataatagataccattttaatcttgagtgccccttaaatgtgttccctctccctttccctctccccccacccctccccctcccccctccctccctctttccctctctcaggcagcttcagggaagaatgagctggaattggctggttggttggtttttgagtttggagaatcctcgcatcagggcccatttctggaagattctgtagatctgtttcttggttttacagggccagtgttgtttccctagggccagatttcttcagtgtatccacactcagtgctgaattgtttaatgtgggggacatcacgtcctcctcatcctgtctacccccaaatcccatgtctaggttgaaagggggctgccaaagaattaagtcctcatgggtggaggttcaggtgctccacaaggaggagcttttgttgaaggacttcagctcagttatgcacggacctcaagcaggcaggaagtggctgggcattgctgactccacattgactcccactaggaacagatttgcttaagaacagaaaagctcatttggtgattttgtctgatgagcctcccttcccctgtcccactctaggcaacacagttgacctagaccagttccagtatttccagtttgaccgtgtttgacctacactgagcttcggtgcctcagtggtcataattttagcaagtggacctataggaagcaaccctgggagggaccgtccttctgcagaggcctgcgggcattgaggctatcaatccccagggcttggggagcaggaggggagggcaccaagtgctcttactctcctgagctccttttgatgcgtaagctttgtttttggccctctttgaaggcagggccaaacttttcttagtgcctctcaccttagggtggccctccagggaaggtgctccttgaatggctggattggccctgcccaccgtcaaactgctacatgtaggaatagctgatgaggaaatacacaaggcctca

SEQ ID NO: 17253 - DNA, 2195 bp, Homo sapiens
gtggagagaagcaacccaaccagactcttggcagcctgccttacagggtagcccaccttatagggtagccctcatatctgccctgtgccggccctctactgccccagctttggtacaggagtgagggagaagctggagcttgcacacccagtggccagtggggctgtcttcccagctcctcctcagggctttcctgtcagtgccaagccagttccccagccaggtttccgtgtgccatttgccagcgtgtgggagctctgcgcgtgtgtgagggtgtttgtagaagagggcagtttcctttcaaatggccttaggaagggaaaagagtactccctccagcccctaggtagccttggccagggatgtgggccaagaacagtctgtggagctggccaacttgtggcatccactccaaatagcagagacccagtcacgcctgcttctggtcctccctgccctcagtatttggttttgtacaccaaagatgatctggcccatcttcctcccagaggcacaacagtaacatgttcctctgtcagcctgtgaaggcatgcagggttctgaagccacagactcagtctccccaagtcagcaatctctttctctctctctcctcaaacttcatcgcattcatagaagctgcttgcagggtcgccgggctaaccagggtgatcggcgaactttaccgtacagtacctcagtctagctgtcagatcaccccttttgctgtagcctctgttgaggtttttatatttgtgatcattggtaattcagtgtcctatgaagtgggcacagctccccacagagagcaagttgtcagcaggtctctgtgcactggtattggggcagggcagtgccctgggggtaagctaggtggctcagggagtggcagaagggccatttttccctctgccaaaaagacttccttggatttgtagatgttgacccagagtcctctgtcccctcctgaagaggattttcttactggtttctactgaaggggaggtaggggaggaggaaaaaaggaccatgtgtgatgctgttagacaagacactgacgctgattatggagggtctcctgcaggcccttgtgggctccttggcaaggccccaggctgggaaggagctccccccactgcccatcctgcccgctttgtggcgggtagagtcagtgacagggaggcagccctccttttgtgtatatagagtgagctgatttgggctcaggaaaacctagtcgcttgttgctctcgtctgtgacatttttgtacactggtttgctactcatggcaagaaacagacaaagccccatgaaaaataaaacaaaacaaaagtcatttcaaacaaagctgttgttttgaaaactcttgctttcttttggtgtccattttgtgttctattttaaagaatctttcatttatattggtgttattgtagtgaagagaatgtgataggctgatctgtaatggtttctgtcaggagcttagcaaatgcctctgcccctcttcccctacccctgtccttcctcagttcccagctgggattgctatgcactgggcagacccgtcactgtctcccctgaacccccacacagtggcttcccttagaaccagtctttgtactctccctaaacagcagcaggcttaggatttttgtcaggctggttcttgcgtgctctgtgcccccaccagtttgctcacctcttggggcattttgtaatgtgttttctctgtcttgtaaaaccttttgattgtaccgaaatggtatctgcagtcgcctttggaaataaatggtcattaatttgtgtacttagcattctgaattttagtctcaggtgtttctgttgttgaagatccttgaatgaaaaggaaccctcaccatggggcttactgttataatgtttcttcatttactgttattaaaagatttatgagaacccaggagtcctggccttgcttcccagaaccctctcagaaggccctctgctttgaaaaatagacaaaaggggcctctggccctccgtactgtggaagaccctcaaaggacagctgggctttctcagcacacttttgtcctgggagctgcgtggctggttgcccttgaattcccacacattgcctacttctgccagggacccagcaggccatttgctcttagcagagggcttgtctgccgggcacgtttgctgggctctc

SEQ ID NO: 17254 - DNA, 1512 bp, Homo sapiens
tccattgttgaaataaccattttcagttgtgatgccttaactaagaagccaattgttagcctgaaatgcaatcttggtagccagtttcaatgaagctagagattagtcagaaaaagttagctgttgggctttagaaagggattttgagtcctgtcatttctacttgggagcattttggagcagattagtctttcagtataaaaacaagtggctacctgatggaaacttttcttacccttatagggaaactgagcacaagctgaatgatattgtctgctgcaaaaaaaaacaaacaaaaaaaaaacaaaacaaaaaacaaaaaaaaggaaaaaaaggtaaataaaacaagcaaactgaagagagacaaaatagaccaatattatcgtgaaatccatcttatccatcatctcatcggttcaacaggctcctcgtcctgggtgagcttatggttagaagtttttttagcaaagatttattacatacatagatgtgtgtgtgtacatatacttacacatacatacatacatatatgtgtgtttatttaacggtgctaatcaatcttgagcaggtcacgtgactggtcatgcggactctaaaatcatatcagattttttaaaatccttgatatatgcagatgttatacagattttcttagcagtgtaataacgttaaactgaagaaataaccatcctgcaggcttcaaaggacgaggtcagcaatatttcccaacatggcttgggggaaaaggatagttttgtctccttttgtattcaagtaatgcaaagtgcatttttgtctctaagtagcttttgactaaaagactttgtagtgtaaagggtgttatacaaactgtaatggtgtgcttcaaacaaatgctagaccctttcacctttgtcgtatatacaaagctgttaattatgtggtatgaattaactttgaacatgttgaaatatgtagcatgtctttaactcagacgaagattctgattgcacaggttgtgttctagccagttgtgatttatttgttcagaaacacaaatgtgaattgcactcttatcatcagaatattgtatgagttcagtgatctttaaacagctcagaagtaatacttgaacttcatttgagtagcacaaagtttacatagccccttttaaatgttaattcgttccatttaagttttccattttcagatgcaactgggtatttttcctcttggaaatagtacgtactttgctttggtatgtagcaaaaggcttccatttctggaagggttttcttgttcttaaacaaggtcagccaggtaccagattctaaaagaacaaattgtcccccacccctcaagtggccttctgactgcacgagaatgtgctactaccctctgtagtctcccctaacacgagaggtcagtgaaattgatggaggaagtgcaaggcttgcttcccctcacccttaaagcttaaagcagttgtaagattttcagtccagcacatacagtcccagtgcccagcacacc

SEQ ID NO: 17255 - DNA, 1251 bp, Homo sapiens
tttacaagactcctctccccgcgtgtgggccattgtcatgctggtgggcgtcccgcccacctgaaaggtctccccgccccgactggggtttgttgttgaagaaggagaatccccggaaaggctgagtctccagctcaaggtcaaaacgtccaaggccgaaagccctccagtttcccctggacaccttgctcctgcttctgctacgaccttctggggaacgcgaatttctcattttcttcttaaattgccattttcgctttaggagatgaatgttttcctttggctgttttggcaatgactctgaattaaagcgatgctaacgcctcttttccccctaattgttaaaagctatggactgcaggaagatggtccgcttctcttacagtgtgatttggatcatggccatttctaaagcctttgaactgggattagttgccgggctgggccatcaggaatttgctcgtccatctcggggagacctggccttcagagatgacagcatttggccccaggaggagcctgcaattcggcctcggtcttcccagcgtgtgctgcccatgggaatacagcacagtaaggagctaaacagaacctgctgcctgaatgggggaacctgcatgctggagtccttttgtgcctgccctccctccttctacggacggaactgtgagcacgatgtgcgcaaagagaactgtgggtctgtgccccatgacacctggctgcccaagaagtgttccctgtgtaaatgctggcacggtcagctccgctgctttcctcaggcatttctacccggctgtgatggccttgtgatggatgagcacctcgtggcttccaggactccagaactaccaccgtctgcacgtactaccacttttatgctagctggcatctgcctttctatacaaagctactattaatcgacattgacctatttccagaaatacaattttagatattatgcaaatttcatgacccgtaaaggctgctgctacaatgtcctaactgaaagatgatcatttgttagttgccttaaaataatgaatacatttccaaaacggtctctaacatttccttacagaactaactacttcttacctctttgccctgccctctcccaaaaaactacttcttttttcaaaagaaagtcagccatatctccattgtgcccaagtccagtgtttcttttttttttttgagacggagtctcactctgtcacccaggctggactgcaatgacgcgatctcggttca

SEQ ID NO: 17256 - DNA, 1226 bp, Homo sapiens
tccagcaaacacatgaatggttatttcctggagccggaagcacttgggggtcgtggtaattcccaatgttttctgtgtcctagttttaccctttctaaacactgtcctttttgaaagtttgaatatatccacattgtattgaaaccttgaaactaaaaatttagactcttatcgtcatcttaagttcttcatgatactcttaacctcccaaaaagcagtatctaagtcacatacatgatgtcttgggcattttctctctcagccatggagagctgtgaaaggaagaatcgctgcttttctcaagcaaatcggtttcttgatgtcttttggttctcactccttgcctgttcctgatgctttgaccccttttatagatcagagtgctctagaataatggatggtcttggatggtggataaatagggacagggacagttaaattgggagcctttcttacaaccttgataggcttttttccccccaagtttccttctccactgaaatgccacactaatgcttgttggattcatgaggtggccagaccaacgtgttttttttgtttttttgtttttttgttttttttgtttttttgtttttttagcttcccttgagagaataaacggtaatggagagaactatttaacaaggtcctggtttctcttgcaacacagtagctaaacttgcctgcttttatatgcatttctttgtagggatcagcttgatagacagtattagcagagaaacgacaccttgatcttggtttgcaagcccttcccccatcagtcctagattaggccctgctcagccatgcaggggtgttggtttatgcgtgctgcagcagtgggcataatgaatataatttacccagtggacaaaggtgtgtaccaagtgaatttaaataattggtgtggattggccagtagctaagaagtgggcttttaaagagtattgaagattgaaaggttttttttctttttttaaaaagaaaaaaaaaactattgattgtagataatgaaaagctagggtttgccctcttcatgtctactctccttccaaatagttatatccaaaactgtttttccctttcccctaccttgcccccctattaaaatagaaacagggattgattaatgtcccactcctgaatacacgtaaaatttgtacaaaaatatcttccatgaaaatgatttgtaacctgtagacttattacctgggagatgtcttgat

SEQ ID NO: 17257 - DNA, 1501 bp, Homo sapiens
ttgtactatcaaagaccttttgcttcaatggtcatagcagcattaaccatactaccccaaagtggaaacaacccaagttttcatcagctgataaatggataatcaaaatgtggtatatccatgcaattaaatatttttggcattgaaaacaatgaagtacccttttttgcgttctctttccctctcccaacatggcggcctcagcaaaaaagaagaataagaaggggaagactatctccctaacagactttctggctgaggatgggggtactggtggaggaagcacctatgtttccaaaccagtcagctgggctgatgaaacgatgacctggaaggagatgtttcgacaacttggcacagtaacaatgacgatgtgtatagggtgcctccaattgaccgttccatccttcccactgctccacgggctgctcgggaacccaatatcgaccggagccgtcttcccaaatcgccaccctacactgcttttctaggaaacctaccctatgatgttacagaagagtcaattaaggaattctttcgaggattaaatatcagtgcagtgcgtttaccacgtgaacccagcaatccagagaggttgaaaggttttggttatgctgaatttgaggacctggattccctgctcagtgccctgagtctcaatgaagagtctctaggtaacaggagaattcgagtggatgttgctgatcaagcacaggataaagacagggatgatcgttcttttggccgtgatagaaatcgggattctgacaaaacagatacggactggagggcttgtcctgctacagacagctttgatgactagaagaggtgatgatagctttggagacaagtatcgggatcgttatgattcagaccggtatcgggatgggtatcgggatggcccacgccgggatatggatggatatggtggccgggatcgctatgatgaccaaggcagcagagactatgatagaggctatgattcccggataggcagtggcagaagagcatttggcagcgggtatcgcagggatgatgactacagaggaggcggggaccgctatgaagactgatatgacagacgggatgatcggtcgtggagctccagagatgattactctcgggatgattataggtgtgatgatagacgtcccccccaaagacccaaactgaatctaaagccttggagtactcttaagcaagatgattcctctgctagtacctcccagtccactcgagctgcttctatctttggaggggcaaagcctgttgacacagctgctagagaaagagaagtagaagaacggctacagaaggaacaagagaagttgcagcgtcagctgagtgagccaaaactagaacgacggcctcgggagagacacccaagctggcgaagtgaagaaactcaggaacgggaacggtcaaggacaggaagtgagtcatcgcagactgggacctccaccacatctggcagaaatgcacgaaggagagagagtaagaa

SEQ ID NO: 17258 - DNA, 1118 bp, Homo sapiens
aggtgaacatcacacattggggcctgtcgcggggttgggggcaaagggagggagagcattaggacaaatacctaatgtaggtgacagattgatgggtgtagaaaaccaccatggcacatgtatacccatgtaacaaacctgcatgttctgcatgtgtatcccaaaacttgtgtaataaatataaaaataaaaatagctgcatttttaaagcactcatgtgttcatagatgcttgctcaacactgttttttcaccactcccctgagttgtagaggcaggtgggtactgacaaatgtctttatcagtgaaaggtgtctccgagttgaggtgagagctcttttattttagtctttcagggatcactttccctctgaaatacacttgacttaaaatgtaacaagatggcatatttactgaaaggaataatgcatcttaagatctgtcagatgatgataaactctgtgctctcctggataatgctcagattagttcatattccctgacactgatttccctgaagctttagacatgtcagtgccaagaaaactgtcttcccaaatagtacacatctataaattaagagtaatggggtgggtttttgttctttgagactatttttcctaaatttagtttcaagaattgataaaccgcttgccccttctgttatgttagtttattatagtcacatgtggaaactttgtaatctatttcactgaggcatttaaaaatattctgccttttacatcatagaataccaggagatgctgaatagatatttcagtatttttcttattagaaatcatagtgtccattgtagtacattttgaaaatactgtggtataaagaaaactaaaatcacctctatgatcactgtatactttatatattttcttacaattttgtattttacaaactatggattatgctgtataatttttaaatcttttaacaatacaagcattttttctttaaatatttgacagcatgattttcgttgcctgtatagtatttcattacgggtatataatttatccagttccctgttgttaaatactatgtgcaatgttttttgcttttaaaaatactataaaagacacctttgtatacaggtcttttaga

SEQ ID NO: 17259 - DNA, 1201 bp, Homo sapiens
ttcttctcaaattcatggtgctataaatcctgggccaattggctgtattgctccatctcccccagcttctcattatgtacctcagggtatgtaagatccagcagtatgaagtattcttgcactgccattttcttgctgtttttgtttttaaaaagtattttatgttagtggttaaatgatttaggtgattagtgtttactattgtatttgtctttaaaattattttatcttttgatttaaaatagtactttaaaattaaggggtattattttgggctgtgactaaggaaattgagatggatgtacaactagccccatattgagcatacttcattgtattcagctgttttcctgtcagccatttgtcagctttatattagctgatggtaccaattgataaaatgaatataaagtatttcattggttcaaaaatcacacatcatattaaaccatgcagaattggagtaacttccacttttttctagaaagtaaaaccaagagcctttgcttctggataactcacttaatattaaattaaagagctcttcacgtttcttgagaattatctgaagccagttgcattctgtgatatcagttttgaaggcacatggttctctgctttagatttatcccatatgctattgtttaatactggatgtatgtaagtgttttactgcactgtattgaattggtgtcttttgcacagttagcagtaaataaaaattagcatttaaaattgccaaaacgagtgggattttttctttttgcattttcatgtcagcaaagagtaccggacatttgattgtttcaacatgttttttctctggcattttggttgcaaaagaatgtgaatttttagcatgaactggtggggagtagttgcagggccacttgagatgttatttaatctagagtcattgcagcacatactaccatatctacgccttttctccagaaaatgttccttttatgttgtatgtgtgtgtgtgtttttttaaagcatttataaccctcttatagaacttcagacttctcattatcctatactttcaatagttgtaggagccaagggaaaactccttcaccctctaaaggttcaccaaaaactcagctcacaaaaggcagataaagagaaagggcgtacaaattttattaatgtgtacatgggaaccttcagaatggagacccaaaaatacagggga

SEQ ID NO: 17260 - DNA, 1157 bp, Homo sapiens
cacctggggcttcaaggaagcatgggtgagaaaagcaaagcaaaaaggttaagcacccaactgcacctctgatgattaggtgcaacaccccttcagtcggttgtaagatggacttagtgtgtataggtattaaaaaggcaaataataatgaaagtaataataaaacaagaacaaaaatggagaatgtggctataaaagatggtgcaaataagagtttcactctcctttctggggggcaggggcagtgagggaatcatattctgtgtcacctctgagagcaaggaaattacagatttctgttgagttccagaacagatgattagggcttgacttagaggcgagttgtaacttgttcttcctgtccatcaccccatttgtgcatgagcaagtcacaagcctctccccaagtttcaaatacatcctctgaggagtctaaaagtttagaatttgaggagcagatgctggatgcacagtgaagagagctggaacaggctagagggcattcactgctctgagcagcgccctggacttcacctaattctacctcactgaggttaatttcactttgagaacaggcctctgctttccctttctccatctgagaatatctgatgtcctgccacatacagtgctgctgaacaattccatcagaaattgtgtacattggctctgaactgggttcagacatatgaccattaaatttggagaataggagacccagtttcttgagagaaggacccatgaaggagcgtttgcttgatgactcagcttttgactttccttgggcaccactggaccttggcatggttctgatgagaggtggcccatggcaagtctttttcttgcagcctaaattaaaagagacactcttggatttggcccgagccccaccactgccatcattattatcgtctctctgagacagttcagtgctgctagtggaaaagctccttggatgttttctatttcccaagaggtcaagcacttcataccgaaagctggagatgtcttgctttaattcctgggaaaagagaggagacatattatgtcaagaagcttggtctttatttcaaagtaggcacattagatacctttggtatgttccaggtttttgcctagtagcaaatcacaaaacaccagaaaaatctgccattatt

SEQ ID NO: 17261 - DNA, 1195 bp, Homo sapiens
tggcaaataaataccttagttaatgactttttatgtagaaatttgacagcattacaaattaagtgaccattaaaaacacagcaatcattcatactgctttcataggtgttatgatagtctctgattaatcaatctagtatgaattattttacaagtgttgtcctgtttcatatctttgaagtagtagtgaaattgtaggccattttcttataacatttcagttacttttcagttaattattcctttaaaaagaaaatacagcagaacctcactgtagcattctttactgcagagcaaaattcaatttaagatgggcttctctgaggtccacatcatggcagttcatttactcttgtgccaaatggcaacaccacgtctaaagcagtttcacagcatggtcccctacaatgttataccaaggctctgatgtatttcttttagtagtttctaagtgtaaaatttattctaaatgtttttatggctattatctatttcatcagttattgaattaagaatgattttcattacttgagtgggatttgtgatttaatgacagttgaataatcaaaaatattttattaggcccccaaaatttaatagatatctatttctgttacattttattactgtatggcacaagaaagaagtgacattgggtatgttagaaatgaaataaggagtaaaaatgcattaccatttgtttaataattatctttacagaatgctagtttaatgacttttttaactgaattttttgaataaatcagaaatgtttgtattggtcacagatctatcataattgcttttctgatgcatttaaaaataaatggaacacttaaatgtatattaccgatgcaaactgtggataaagttgaaagaaaaaatttaagtctggtatttcttttctccctctctacctcctttcttaccatcacatcatccattttttgtcagcatttgatagatggtgtctgtgttccctagtgtagaaaaatagccagactttgagggaatattcaaagtaagtggtttagaggtccagattcactttatattgtgaaaggaaaataaatcttggggccccaacatcactaagctaaaggagaaggtcaagctgggaactgcttaggagaaacctacctccagttctattcaaagtcatcactctgctcactgagataaatgcctatctgat

SEQ ID NO: 17262 - DNA, 1277 bp, Homo sapiens
ccgaacttctttgggggaaaactggattaacttaataagagtatttgataaactcaaattctctttttactaagtcagttgataatcttgattatttttcagaaagcagactgatactaaatttaaaatgtagtttcaatttaataatcacattaggtttaatttttttacatcatagcatattagtaaacatctggataaaggtaattttttttagcaatttagagcaattctatatttgagttatttaatacacttctaattctagtttatacacaatttcttcaatctttggtcttagttttctagaaaaaaggagtagaaaaaacaattctggctttatattaaattcttttagtattataggttggtgccaaaatattttcagttgtactgtagattgtttacatgtgaagtgcctgtgtaattgatgactcttacatagtcttaagcatttttgcaattttttaaatgtattaatagagtcaatggaactttaaaatattttagtagattttgtaaagtcagtaatatgtgaggatttaaatgagcctcacattgtgacatttgtggttttttagttagtccattgcagtttcccttaaattggttatttcatgttgtcaaaaataccaatgttaatatgattaatttatgctatttaattttgtgaaacttaatcatcttttaaaatgtattatttgaagagtattttatttctgtattgaaaatgttacacaaagcagtaaagtttttgagaactagtgaagtactaattatcaaggacattttgataaaactgccaaagtttgggtttatatcttccctttgagcagcattctatcagtgctgcctttagctatactcagagagcagcagttgaggaataggtttttactcaaaatctggccatttgtgaatcctgtaaaccttgtgatcttcaattactttgatgttaaattaaacacagactcttctataaatattttcatgagatactgtgttacacaaagtccttgttttaacttaggtatgggtaaatttacattggtggtattgcaggaatttttcaaaaacattactgtaatgaataactgagtttcctatagaagaacctgaataattacttttgtagtaaccaagcaagcatcatatcttaagtatgtgatcatttgcacttgttacctcttaatatggatgcaacttattaaaaatgttggcctgggtatttcaaagggtatatataaaaggtaaaaaactagtgtgccaaatggtat

SEQ ID NO: 17263 - DNA, 1181 bp, Homo sapiens
gagaagaaagatggaacatttacgggaagagcgagagcaaatacgacaacttcgcaacgtaagtcagattgctctttcagatctgctttgtggaaatgggtttaacttggaaaattaataaggcgtacagatttcattttcaatgctccttaaaatgtttggatatacaacaattagtaatataaacatttaacatgtatgtttagatagagtatctgatttatacctgtttttctatagaatcttgaatccaggttaaaagtaattttgcctgatgacattggagctgcactgatggatggggttgttctttgccatttagccaatcatataaggccacgttctgttgctagtattcatgtaccatcaccagcagtggtaagttttgtttacaatttgttagttctctaaaggaagatatagcttcttaaaattgtctttaaataatatacctcagtgaacttagttttcagttttgattaagttccatagaaaaatgcctaaaagtacattttttccctcttactttacagcccaaactgagcatggcaaaatgtcgaagaaatgtagaaaattttcttgatgcttgtaaaaagttgggtgtctcacaggtaattgttatttatctaacaacgtgatcacttaaatttgaatttattacatgcaaactggggttcttcttagagcaatgaataatgctttctgaacatgaaaatgaatgccttctcttggtaccttctcctaagctccagctttcactgtagcagttatctaatgaatgtttttaagctacctttaaagtaatttataaaatagctacaaatatggaaaatcatgcacatcactgaccaaacataactcggtggccatatttacaacttggttgtgatgtcattgttaccatctttttttccttcttttttttttttttttgctagagaacatttggaccccattgtaattcactggatagattctgattggaagatttgcattcagtgtgaatagctttttaaactttatttaaaatgcaaaattggaaattataccagcatattatgataatacctgtattggacaaactttgaaatttttaggaattgtcttatgtttcatgtaataattgcactactatacaataatcattaaagcagtattgtaaatatgtaaggaagatatat

SEQ ID NO: 17264 - DNA, 1836 bp, Homo sapiens
attatatatgaggaaatagatgtcttacgtggtgtccttaactgacaagaatttcatcctgattttgtttccccctaaaataggtatgcagtgtcaatggctagaagaatcggagccagagtgtatgctctccctgaagaccttgtggaagtaaagcccaagatggtcatgactgtgtttgcatgtttgatgggcaggggaatgaagagagtgtaaaataaccaatctgaataaaacagccatgctcccaggtgcatgattcgcaggtcagctatttccaggtgaagtgcttatggcttaaggaactcttggccattcaaaggacttttcattttgattaacaggactagcttatcatgagagccctcaggggaaagggtttaagaaaaacaactcctctttcccatagtcagagttgaatttgtcaggcacgcctgaaatgtgctcatagccaaaacattttactctctcctcctagaatgctgcccttgacatttcccattgctgtatgttatttcttgctctgttatcttttgccctcttagaatgtccctctcttgggacttgcttagatgatgggatatgaatattattagacagtaattttgctttccatccagtatgctagttcttattcgagaactatggtcagagcgtatttggatatgagtatcctttgcttatctttgtagtactgaaaatttgccgaagtaactggctgtgcagaatgtaatagaagcttttcttattcttttattcttaagatcagtatctttttacagtattctttctacatgatccttttttgtacatttaagaatattttgattatattaaacaagactgctgattttgctactttttttaaggggtcttcaagtaagtaaaacatacatcgtagctagaagaaaaatgtaccttaaatttgcatcttccctctcatacccaagctgtaaacaattgaaatattttgtcttaaatcacttggttcaatacatgcttatttgttttaaaacctgtatcatcaaactctctctctaaatttaaaatgctgttgaatatgatacttttgaggagagagtgtgctcagaacttagacgggatttggtaggccaagtatgctaagtgtacaatatattttttaattttacacctgaaacaaagaaatgtggtcactaaaaataaaagtatatatgtaggaattaatgtactcttgctttgtcaagctgtttgctatagtttccaaggtattatgttactctaactctgaaaagtgatgtaatctggtagcaatgtagtagttcaaataaaggcatttacataataattagtctgttcttcatgcttttgtctcttaggaagtatgccaatgtttgtcaggatttttttctttttgtttttctgatgtattctgtaaaatggtgtttgttaaatttgagttttgggagctgaattagaggtactgaattaaggacagtacaaatgaagtaaaaaggttttctccaatttaccaaaatttctttatccagttcctgcttttttctttcttttccacctccctcagtcttttcaatgttctatgatatacatatcctgaaacagtggggatctgaacagtcacagaggagaaatggttcatagtagatcttctcaatctcatccatatatgacatttttggctggataactctgttggggtggggagaaggggctaccctgtgcattgtaggaggtttagcagtattaccggcctctacccactagatgtcagcacatgcccggtggtgttgaccaaaattgtctccagacataaccaaatgtctcctgggtggcaaa

SEQ ID NO: 17265 - DNA, 1879 bp, Homo sapiens
attcacctatccttgaccagtggaccccaattgctgccatgttaagagggcagagtgatgttggggtcgctgtcttcgaaaataaaatctatgtggttggggggtattcttggaataatcgttgtatggtagagatagtgcagaaatatgatccagataaagatgaatggcataaggtttttgatctgccagaatcccttggtggcattcgtgcttgcacactcacagtttttccaccagaagaaaccacaccatcaccttctagagagtcccctctttctgcaccttaagatcatctctacaactaagatgctgtagttctatctttgcaatgtgtcataaattctcttctttttcccccttaagtagtatatatgttaggattaccctctggtaattgatacagatattggaaaaaagacaacattgatgttatttgtgctctttgtttggcctagaatgtttataaagtggtaacacaaccattctggaaatgtatcccatagaagctgatgtttaacatatgaaaaaaaaagtattgtctataaaatgtttcttcagtactttttaaatgctgtgtattgggtgtaaggtatttgtcatcttacattagtaaacccaataagccaagttgaaggtggattatagtaaatgtacaactgtgctcactaggcttcaagtaaaaagttttcctttcatctttgactgtaagatgtcaaagggaggcagcctgcttgaacaggaaacaatacacaaaaggttgccaactcgcatgagctacctccctcttttcataaagtatttttgacatatctgtcaacccacttgactgtgtgggtgcattgagaacacaaagtttcctagacacacaggagaagtagcttaaattcactaatattaatttaaaaagcagcatgaaccctctacttataaacaagggtttggtgtttttaaagtgtgtatacatacatacacatacacacatgcacatatgtcaaatataatttttttaaaaattgagtggcacatcaaagaaatgtgaaattaaaaagaattcttccaaaaagcagcttccattaaaatgggaattcagtatgcacatactgaatgcatatatgtagaaccatacagaatttaggtggataagggctagaaattttgagcaacaaaatttgtcacttgaccagattttatcttcaaaaactgtattctactccttctcctttgctgttgaggtaacttgcatattatatgtattctgtatactcagttcataaggttatttagcacaaagtatagcagcttcacctggagagctgcttttgctcagtaaattcaacttccatgttttatctttttttgttcaataaaaacatttaatgtcattttggtctgagacatcccattattgtctgatttgacttcctttgattaaatatctatatttttggcatggcaaaatgtgatcagaatttacagctctgagcagcttggatgagtgaatatgcctttttattcaaggaaaaaaagaatttgacaaaatctaaccttattcatcaaaactcattgctggttgtgtttggggaattagattatggaagatgctaactggcttttcatcaccacagaagaactgccagccatatctaaaccagaagagcagttacaattccgagtttagtctccctgatcttcaagaggatccatcttgcctgatgagaagggattgtgtaaaattaccttagagatttgtcgacctgggatcccaaaggaaaaatgtttttgtgaaagattatttgagaattatattagcatcgtattgtgatcttctctactttatctgcagatgatcagattaaatctgagccaaaaatttagg

SEQ ID NO: 17266 - DNA, 1239 bp, Homo sapiens
actggctgcaatgatggtgggtatatacgaactattagctttaaagtataaatgtagagaaattattatcagtgtccattttgtagtctgtatatgaattaaagcagtgggcttcagaacataaaccaagaagtgtgtatattttcattctcaatgtaaaagtttgcttcttatgtattaacgtttgtttctatcaacatggggacccagaattgaggagtttttcatttcttttgatttttttcatcctttcttcctatgtttttagagcaaagaaaatggagaaatgtcaaattataaatatgtaagcagattacagaataaatcttagtgatttctgcaatgacagaaatttgttagattcttacactatctagtctaatgtaacatgtactaatggtttatattattaatatagtctcaataattactgtaagagctcccccaaagtcttacacatatctatcatagctataatagatatgtttcaagtgtttggatattattactgttccacttaagagaaaaataattaattgctaaatttgaagttaaaaataattttcttttctttttttttttaacagccacagtagaatgttacaatccaagaacaaatgaatggacctatgttgccaaaatgagtgagccccactatggccatgctggaactgtgtatggaggagtgatgtatatttcaggtaaacaagtatcatgtgaacacaatataatatataagcttttaactatatggttatctttccatatagtggtagtaataataataataattcaggcgtcaggagtttgagaccaggcgggccaacatggtgaaatcctgtctctattaaaaatacaaaaattaactgggtgtggtggtgcacgtctgtaatcccagctacttgggaggctgaggcaggagaatctcttgaacccagaagacggaggttgcagtgagccgagattgcgccactgtactccagcctgtgtgaaagagcgagactccatctcaaaaaaaaaaaaaatccagaaaaacggagaatcaaaatataatttatgttgattttagaaactatttttgtgtgtatttgcatatgaatgtcttgggcattctgtaaatttataagagtactagtaaaccaatcctgttgtaaggtataacttagaaaaaattggaaagcattcaaattttgctttccagtccccatgctctgtattctgataaacaccattcatagt

SEQ ID NO: 17267 - DNA, 1883 bp, Homo sapiens
aactttgaaggaaccaaaatgaatgatagtaatgagtgatgcctatttacgtgaaagggaaatctagggtttgggtattagagcttttctgttcatggatctgctagctgtgtggtatttttaagaataatgactaagaagtggattgagatgaatcataatagaacaaccttctattttcccaagtttccatctggcaggaattttatcagtattttgggggtgggggtgggatacatttttgaggagagaagagtaactggtttggccatattccagttataacattgtttcttagagtagcttctaacttactgactttgatcattttcttttagtcagccttctagtggattaagtaaaggtggtttgcaaattatctgtttgtagatcattgatacatttagataagaatcctatttgtatctatttgaacattaaaagcataatttactcttattctagaacaggtatttgtgctatcaagatgtgattgccatgaaagtagtcatgttttaattttttttaattggcttaataggtcactttagacaactgtgttgaagttggacggattgccaacacctacaatctaaccgaagtggataaatacgttaacagtttcgtcttgaagaattttcctgcattgctgagcacaggggagttcttgaaactcccttttgagcgtcttgccttcgtgctttccagtaatagccttaagcactgtactgaacttgagctctttaaggctacctgtcgttggcttcgcctggaagagcctcggatggactttgctgcaaaattaatgaagaacatacgatttccactgatgacaccacaggagctcattaattacgtgcaaacggtggatttcatgagaactgacaatacttgtgtgaatttgcttttggaagccagcaattaccaaatgatgccatatatgcagccagttatgcagtcagacaggactgccattaggtctgacaccactcacttggttacactaggaggagtgctgaggcagcagctggttgtcagtaaggaattgcgcatgtatgatgaaaaggcccatgagtggaaatcgttagcccccatggatgccccaaggtaccagcatggcatcgccgtcattggaaattttctctatgtggttggcggacagagtaattatgatacaaaaggaaaaacggcagttgatacagtcttcagatttgatcctcgatacaataaatggatgcaagttgcatctttaaatgaaaagcgcaccttcttccacctaagtgccctcaaaggatatctgtatgcagttggtgggcgaaatgcagcaggtgaactgcgtaagtgcatttatattaagcatagagacaaatttcttcactcagaaattcttatcaaatcataaaataagcagtcctgtaaaatcagataaaaatgtagttagggttttattttaaaactatttttctgagaaaatattgaagaccatctttatgccttatctgggcatatatcgttggcaagggaacaaattgtacgttacaaatacatcagtatattgtagcatatttcacctgtgcagtatatatggtcttcatcttgaaggttcatctaaagagtatacttagctcatttaaattataataaggtcttggatagaagtttggcatgttttctcattttctgcttttaaaaggccatatgatattttactgaacaggttacaatccttcattacagaaaactttcattgtttcttcttttacaaaatatgttacctattagtggccacaaagataattttctttatagattaaatgtacaaagttcaacattatccaaagtttgttcactgtgaatattatgatctatgactgttttaaaaa

SEQ ID NO: 17268 - DNA, 1997 bp, Homo sapiens
aagtctcaaacttgaaacttgaaagatatttggccaggcagcagcaatgtactgagtataggcttctcaaagagatgaagtaatacaattagtagaaagaactatcgtgtacttaatacagttgctctctacttttctttctcaacctcccccaaaacaaaacaaaaccaagatgcttcagtcaagcactataaaaggactattaaattatcgcgaaaaggaatgttaagacagtctaatactctcattctgcagatgggaaagtagaagtgcacattgtaattatttttcaaaataaggtaaaagctgataattgtgtaaataagcaaaagtatatactttttccttaatcgtttttaacctaaattagtcttaattttgtgttattcctacagtgaaagaaaacatgcattgtcacatatcaggaaagttgtgcagttattttttcttctcccgaatattctgttggctttatgttccacatatgttgcaccacattaatattcaaacaattttagcacacgaagatttgtaacctcattttaccttgattagtgactcaactcatgttcttgttgtagggctttgaccagcttcgacttgaaggattgctttgtgatgtgaccctgatgccaggtgacacagatgatgctttccctgtgcatagagtcatgatggcatctgctagtgattacttcaaggctatgttcacaggtagtttgccttttaaaactctgaaaccacattaaaacaatatgaaaaatccgtgtttaaatcttttttatttctaacatgaaatttggttcttttggaaacagcttcaaaagaagtacacaacagtatgtatggttttcggtggtgctgttttaacatggaaaattgatgcacttttttcatactgtccatctttatctcacagcttttctttttcaagcttatatctagtgggccatcagagactctgtgtcctcctagtacaatctctactctatgtcaaaaaataggaagtgagaacattttggaagcacttgcatcatatatgacctccattagtatagagattatcttttttaagtactttcttttaacagtaaaatgtgcagcagactgactctaatatgactgcttatataagataagactttcctttgattttattgcatctaattagcagcagaagtgagtttgaccataattatccaccttcatttaattgaatgtctttttatttaaggtggaatgaaagaacaagatttaatgtgcattaaacttcatggtgtgagcaaagtcggtctaaggaaaattattgatttcatttatactgcaaagctttctcttaatatggacaaccttcaagacacgctggaagctgccagtttcctacagattctgccagttttggacttctgtaaagtgtttctcatatctggggtaagatattttgaaatctgatttttcctgtggtagactctgatgtagcctgtttaggactcatgaaatctgctgtgcaggaatgtgaaacttgccattagacagatgtgtcttgttgtatgtggtctgtaagcaaggtgagattgaaacaggtgcatttttatgaaatagaatcatttaataaaagcctctgtgttggccgggcatcgtggctcacgcctgtaatcccagcactttgggaggccgaggcgggcagatcgtctaaggttgggagttcaagaccagcctgaccaacatggagaaagcccgtctctactaaaaatacaaaaattagctgtgcatggtggtgcatgcctgtaattccagctacttgggaggctgaggcaggagaatcgcttgaacctgggaggtggaggttgtggcgaactgagatcacgccattgcactccagcctgggcaacaagagtgagactccatctcaggaagaaaaaaaaagcctctgtgtaatcaaatgacatgagatactaataatgtttgatgaagatatatactttaactgtttgata

SEQ ID NO: 17269 - DNA, 1164 bp, Homo sapiens
gcactttatcattgtcaaactgcctctctaaaataatgcctaaatgaatttacttcttctttttttttgtcttttttttagacggaatctcactctattgcccagactggagtgcagtggtgccatctcggctcactgcaatttccacctcccaggttccagcgattctcctgcctcagcctcccaagtagctgggactacagacgtgtgccactatgcccggctaattttttttgtatttttagtagagacagagtttcaccgtgttagccaggatggtctcgatctcctgacctcgtgatacacccgtatgggcctcccaaagtgctgggattacaggcgtgagccactgtgtccggtcatgaatttacttctagtatatatccactgtaacttgattctcttataagacacacaaaagcaagtatgtacttacctttaataccttcccagaagtcattacgatctctcctgactgaagtaaacttgcttaggtcatggtaggtactccagatataaacatacttatcttctgaaccactaacgaggtaagtaaaatcatggctgaattttggggagaaaggaaaagcaaataaaatgtgtgtgtgtatatgtttaaaggtttcctttatcagtgcttcctactttgtgatacctaaaataacacttgaagggtcttgttgaatatgtagacccatggtctcactctagatgttctaaatgtgtacgtgtgatgtagtggcctggcacttgtatttgcatcaaagctctaagtaactgtgatgttagttaatccacgttgggaggaatgatgatttaaggtgtgaaagacaggagcagaatactttaccaattgaattaattaatgtataattcaagaaaaaagaactggtaagaaaacggcaaaagaagagggctagaaagaagaaaaggtagctaaccctatttcaggagagtgtccagaacccaaattagaaatttaaataataatgatatgtaaagttttgaatacaagaccctgtgctgtggggtgttaaaatgctttcttagaatcctaaaaggttccttcctttcctaaaaggttcaagacaatggggcagggaggggagtggcgggatgagccgtaagccccctcttaaaagcgtaaacaaaggtacaaaagca

SEQ ID NO: 17270 - DNA, 1150 bp, Homo sapiens
ctctgaggcttagtattttttcacggtcggggtattgagtttatcattggtaacacatcgtaagatcaaaaggcctccattatttcttaggtgaaaatttgcacctgtaccaagttagcttttaaaaagtgacttgccatgaactaattggaagcataaatttaccgttatttccctgataccaataaaaatttgcagtgaaagctaaattgctgccacaggagggaaaatgaaatggatttctttgcagagtttaaatttgtcaaaattatgatgtgttatatttggcaaatcactcgacattgagaacgaaatagcactccacgtctggtatgaagggttccactaaaatcagcatcagactactcagtcttgtctttttgggttcttaaagttgtcatgtgatttttttggtcaattactaagaattatgttttttaaatcgctctttgagaatgcaattcatgtatattttttatacatgcaggaatgtgttaatgattattaaactgaatgatctttgcctgtttttttccctgctatagattgtattacttcttcatatgtgcccttgaagccttttgaaaagaattgccaaaatattactgtggaggttgaagagtttgttccagaaatgacaaaatattgttatccatttactatttacaaaaaccatctgtatgtatatcccctgcaattaaaatacgatagccagaaaacatttgccaaggtaaccatgtaaactatacatttttggagtataaaatgttatttataatctgctaattgtgtgactcattttgactgattaatcattttaggcaaggaacattgcagtctgtgtggaattccgggattcagatgaaagtgacgctagtgccctaaaggtttgtttatgatattgataggcatatgtttttagtagagatggagattttggtactcagtagtcttatgctctaggtttaatttgtatcaacatcaaaaagaaaatgttctaaagtgacaaatgtaatactttcttttctactcttacatattaactataaggcttagtttaaatattaatgcagtaggagcatatatagctttaaaaatgccaggttttggcttttgctcctttttgattttgcaattgcttcaatgccca

SEQ ID NO: 17271 - DNA, 1097 bp, Homo sapiens
ctttgggaggccgaggcaggcggatcacttgaggtcaggagttcgagagcagcctaactaacatgatgaaaccctgtctctactaaaaatggatacaaaattagccaggcttggtggtgtatgcctgtaatcccagctacttgggaggctgaggcaggagaatcacatgaacctgggagatggaggttgcagtgagccgagattgcaccactgcactccagcctgggcaacgagcaaacctgcgtctcaaaaaaaaaaaaaaaaaaaaaaaaagggaaccagataatctattattttacctaagtactgcctttgcttctagttgcatgggtgaaatatttcaatgtatggggagaatatagggtgaggagtaagagtaagccctgatttagcttgcttagtgctagtttgagtccttcagtggcaggacagcctgtaaagtaccacaagtatgggagtgttataatggcagagtgaaacgattagagcagggaggaagtgaattgtgccattagtaccttcatgcaaattataccatgtgattttggacagtgaatgatttttgcatcattcattcacagcccatcactctgttaaggtgagagtgtaattcttacttctcccatcaccacctgtagctagaaacaggaaagggagaatgagatgatccagacaacataaaaaagatgcatgtaagcagaaaccagatggtcttttctgcactcacttaatggacattatgttgccagagtgttgtgtttatcagatttgatgtttggagctagtctgggcaggtgaagaacagaaataggcggaagtataggcattatttctgcgcaagcaaactccacaaagctcagggagcagaaaagactccccctcccacctggttcccagaccatgtggtcataacacaatcctaatagtttctggttatctagtgtaaatgcaacaaagaaaaaggccctaagcttctctacttattagatatattatttttggcaattgatttaacttttgccaaccctcagttttctaatctatgaaatgatagtgataagttctgcatatagggttgttacgaaaattaaatgaga

SEQ ID NO: 17272 - DNA, 1905 bp, Homo sapiens
cagcttgggaatgaagggtatacagaagaaagacataaggctaaatctaggccagaaaaataagacttcccccacagtagatagtgccacttatttagttagtttttctgtctatcatgactgacccagtctttgcctagtaggttatattttgtatgtatgtatgtatgtatgtatgtctttgtgtgtgtatgtgtgtgtgtgtatgtgtgtgtgtatatatatatatatatatatatatatatatatatatatatacactaggtagcaagcagacatcatatctttctgctttgtactgtactactgctgctagcaaataaccagcaaaatgtagaaaatgaaaaaccaattttctgtagacaacctggagaaaagagtgcctgcccctgacttagcggggcagagaatgacaatttttaaagtttgccttttctgaaggttgcttttagcccagtgctgcctcagcagcaaggggcaagcagagtcattgcgcatgtggcgcttccagctctacctgtggagctggcctgggctcagataatcccctgtgactggccattggagcggcggagctcctgaggctagttcacagcacccagaggtctcttacagtcaacagattgcatactgttgacagactgcaatccgtctgtgttccccacaccaactccatttccaagatgggaattttattcaggaactcatttttgagttcccaacatgttgacttcgcatccatttctgctcaccaaggcagaaccatagcagtggtgtgtgacaaagatgcaaatggagggcagcccaaacaatggaaaagagaagattttcagcccattcttggggctaagtgaggttttgatttatggtagaagacagttctaaaaagcagctggcagcatgggcttcaatttgtggcccttctgagttcaaacagaaggaaggaaaaggagccacataaagtgtacacattcaattcatcttagaatgatagctcccaccttattacactgtacaactatttaataatctgggttacacacatccagaggtgaaataaagaaattttcacttacaaatgtgtatttccaaacatgctaagttaacctccagagagaagtgcctgtaatctctgttcctggtgtcactttaaagcttttgcttcatgactgtagctgttgtttaaaatgtttttgcagcaaacgcgatttaacagaagtttacaaagcaacactgtagctaatgcataattttaaaagttgactaacatttatctattgttaaagcaacactaataatggaataaaaggaaagcaaataggccaatgtggcaccataggcttattttaggtaaattagttccatcatcttatgcagttgtaagtaatgccaggattaaaatatcaagcaagccacgtaaacagtggcaaatgtgtgtgtgttttccatttgtttggtaagcagccattttactcttgcactgtaatgaactgaagggaaatataagataatgcttttttccccccatattgctattcaactacctctatatgcttgatttctttttaggattcccatcctccaaatctgtacaaaaacgtttcagctcatctgtgttgtaataacaatgtgatacagacagtttgtgtgaaagttgtttgttcattaaaaaatgtttcctattgcctcactttgtgtccaacaaaactgtattcctaccttaggaaaagaattatccaactagcttcagtatcacttcggtggaagctgaatagaaaggaatgcttcaggaacatctatttgttcttgttcctattggttgtaataccagaagatcctttaaagaaatatacttgcattcagacagcaaactcccatgtatgtgacagcgaggcaggtgtgaac

SEQ ID NO: 17273 - DNA, 1715 bp, Homo sapiens
gccagacgttgccacctgttttatatgtctgtcttctgaacaaaacaaattccctgttggcaaggacggtggtataaaccacctttgtatccttcaagaagcccaacacattgctgagtatattgcaggcctctaataaatgctttaaattgaaacgtggtaatgatgttttagaaagaatgagaatgaccatttgtgttttcttctctacctccagtcaagtatcatcacgtgggcaaactgctgaaggagggggaggagcccactgtgtactcagatgaggaagaaccaaaagatgagagtgcccggaaaaatgattaaagcattcagtggaagtatatctatttttgtattttgcaaaatcatttgtaacagtccactctgtctttaaaacatagtgattacaatatttagaaagttttgagcacttgctataagttttttaattaacatcactagtgacactaataaaattaacttcttagaatgcatgatgtgtttgtgtgtcacaaatccagaaagtgaactgcagtgctgtaatacacatgttaatactgtttttcttctatctgtagttagtacaggatgaatttaaatgtgtttttcctgagagacaaggaagacttgggtatttcccaaaacaggtaaaaatcttaaatgtgcaccaagagcaaaggatcaacttttagtcatgatgttctgtaaagacaacaaatccctttttttttctcaattgacttaactgcatgatttctgttttatctacctctaaagcaaatctgcagtgttccaaagactttggtatggattaagcgctgtccagtaacaaaatgaaatctcaaaacagagctcagctgcaaaaaagcatattttctgtgtttctggactgcactgttgtccttgccctcacatagacactcagacaccctcacaaacacagtagtctatagttaggattaaaataggatctgaacattcaaaagaaagctttggaaaaaaagagctggctggcctaaaaacctaaatatatgatgaagattgtaggactgtcttcccaagccccatgttcatggtggggcaatggttatttggttattttactcaattggttactctcatttgaaatgagggagggacatacagaataggaacaggtgtttgctctcctaagagccttcatgcacacccctgaaccacgaggaaacagtacagtcgctagtcaagtggtttttaaagtaaagtatattcataaggtaacagttattctgttgttataaaactatacccactgcaaaagtagtagtcaagtgtctaggtctttgatattgctcttttggttaacactaagcttaagtagactatacagttgtatgaatttgtaaaagtatatgaacacctagtgagatttcaaacttgtaattgtggttaaatagtcattgtattttcttgtgaactgtgttttatgattttacctcaaatcagaaaacaaaatgatgtgctttggtcagttaataaaaatggttttacccactatagtgtggtgacttatttaaatttttttaaaaaccttattctagggaatctgattcagacattttactttggcttaaaattcagtttcatttttgagtgcagagtttttgtattccaaaagaaacaaggggcaaaatttcatggagaccccacaccaaaaaccaaataccagcttgtcctgt

SEQ ID NO: 17274 - DNA, 1584 bp, Homo sapiens
gaagacagcagcattaaaaacttcagaacctgtgtgttttatatttcccaaagcttgtcaatacacctggagtcattttgacctatgctttcaactttggcaagagaaataataatttgtatttgaccctgctcaagcttttaaatgctgcttgatccaaggatagacatttctatggttcagctaaaactttacttctacgccagtgaaggagcagattaacattgagaggggttgagatggccctctatggctccttaggtgtcataacatcatcatttagtgtcatttatctccaaagacgacagcagtgaatgaataatgatccttttacatgttctttgatttggtcagaaacaccacgtgcagcaacaaactttcctgacttttatttagaaataattgtagataaaagagacgacagttagaacatagacttcttcatgacattaaagagttgcatgagcacccaccaggagaaaattaatcttattactatgtttaaatactcaaagagttgtctttttcaagacaaagtcttggaagaagaatctaaaagtggtccagattgtcctttgaggtttaaatggatagtatttaaacccattagcagagttgttgttttttttttaagaaccccatgtctttccattttagaaaaacagcaagattgaagtaatataaccactggaatttgcaaaaggaaatattgaaaaattgtggggcaccaatgatgtcacttgaaaaaagatgctgtgactattccacttcaggttatgtaaccctttcactcagggctggattacatcagtttgtaaagtcactgaatatcccccaaactgaactttattaaacagtaacaagtgcctctcttctcaatcctcagtgatgccatcaagttttcaaaaagagtaaagagaaaagcctatagttttgtagctagggaaaaatgtatatgtgtaggatttgtaaactctcaacataagcaattgatctttttacctactagtttttgacttcataaatgtttttaaattgaaatattttatggattcttaaagacttacatcttagtgcagtgcatgttttatagaaagctccgctgattcattctgccttaccttgcatttaggacctcaggggcaatcgattaccttttttttctccaacaaaactatgcctgacctggtaattgaagacattaatgagattagagactgtcagcaacaggaaaaagtcatttttaatccacagaagcagtaaagggcaacactttgatgtgacatgattcattcaaacactcttaatttgacattctgtagaaaagtaccagctgatagagccaggtagaatgccagtcattgtggttgcccagaatatcacaatgtgtgcatataaccagccttttgagcaaacgggtatgtgaaagggctacaaaagcttatttatctgaaggaagagccacaagttgtttcatcgatctcttctaatcatagagctatgttagtacatgcaagaagtcagaaatgaatgtaccatagcagatgatgtttattattaataagataataaccagtggatgat

SEQ ID NO: 17275 - DNA, 1229 bp, Homo sapiens
agatccatgaaacagatgcattttttgactatcttttcaattattatgaacctccacaatatactcgtatctgcctagaaacaagtcaggtagcaggcacatgtcagtggcagagggatgtccaagctaagggagatggatttcagattaatttgagaaagtgtaggcatcactcaatcaattcgagccaagtagaaaacctggaaaggaaagaacaggttcaagaaaataattactcatcaaagatttgtactcaggatcctgagcgtaaacgaggaaaagtagattatgccaaagaatgtactaatgggtttgaaactcattgccaggagacagcccataaagctggtggtcagctgtccccaactgatggaaacagctgtctgttggaaaagactcatagttatcatattgaagattccaaatccacaaggaaaagccaagtgtccccaccccatgagtcaataggcttaggtttacagttgacagatttcttagaggaaattagtagtgattctgaatgcttcagtgaaacccttagtataaacaaagaggagaaagagaaatctgtggccacatttaatagtttctcagaaaaagaacctcttgacactgacaaaatgatcactcgcaaacaaaatacaaggtcgagtcagcagacctttttttcaaagtggaagcgtgatggtgaggaaaaatactctaattacaagtttaggacaccaggtaggaagtctgagtatgaaccgagatggatatgttcatggcctaggggtgaaagtcatttcattagacatgaaaacaacaatggacaaatgaagggacaactagcccccagatacttgtttgatgaaggctactaccaggaacccagttccagttatctaaagaggtttagtgatagtacattggaccagaaagtgaactatgggccctctcaggtgcccgtaatgtcatcaagaagtgctaggtctttctattttggtaattttcacggaagaagagggactccttggaagtcagaatataaccagaattcaagatttagaggatgtaattataactatttgaagttcaattctgattattactataatagacataatggtcaggagtatattgactatggaagctattcaggaaataactgcactggttctttaaattttaaatgttttgatgaccacttagatcaggagtatcctttttcacaataaacatgttacaag

SEQ ID NO: 17276 - DNA, 1102 bp, Homo sapiens
ggagacttttcctttcctttcactttaatagtgacgctcatacagagccaccttgcctaagggatgtccagacatctacctatatttgaaaagcatcttttttttttttttttctgactgctaacgcaatgctactcagttagaagaatttggttcacaaaggggccagacctaaaagtaagatgacagcagagagttgaaaatacaacaaactaaaggtaaggctccactcctctccactaccctgaaggcttagaacctagcagtgtttgtacctctggacaggtaatttgactctgttaggcaaatagaactctgttcctactaagagtagatgctatgccaaccgggaaatattgaagtaggcagaaaacctggaactttgttagcacctcctcgcagggatagttataacaatttactctcccatcctggggctttgcttctgctcccagccctgccccctgtggtaggcgggctttcttcccagtccctctgagcagttgtcgttcaaggctggccaaagacctgtgtctactgaatggtctatgcctgtggctcactgctcattacggcttctcaagtcaaagcaacaagtagggctttccattgccagactgccagggactaaagcagaccccaggacagcccagttttccaaagattttttttttttcctctctctaacttgagttaaccattccctggccaaagccaggctcgttatgctctgagtgtttgtgtcctcccaaaattcatctgttgaaatcctgactcctagggtgatggttttaggaggcagggcctttgggaggtgattaggccatgaaggcaaagctctcatgaatgggattcgggtccttttaaaagagatggaagaaagctagctcccccttccaccatgtgagggcaaagcaagaaggctctaggaagctggccttcgccaggtatcaaatctgccttgaccttggacttctcagtctccagaacggtgagaaatacattttggttgtttataagccatctagtttatgatattttgttattgcagcctgaacggattaagacaaggctatggcctctcagtttctgagcttgcaaa

SEQ ID NO: 17277 - DNA, 2546 bp, Homo sapiens
gcagctcaggagacttgaggcgtaggctgcggtccccaaggtgaccgcgccctatgtgggactcgccctaatgcctctgaacctgggtttgaggtaatgacctttctcctaggtctgaaggtcacgggtccgctggaggatgccccctctccactcagaggggtggaggcttaatgctactggtgcagatcacctcttcccctgtgacagcctcagagggttgggagggtccagccagtatgatatacgaagactagatttgagagaggggagcctaccttaaagggcattgatcgagatggcataagctcttctctttcccttccccatggttataactgtccctgttggcttccttcctgtctgttaggtgcagcatgccagcaagcagatcactgcagataagcaatacaaaggcattatagactgcgtggtccgtattcccaaggagcagggagttctgtccttctggcgcggtaacctggccaatgtcatcagatacttccccacccaggctcttaacttcgccttcaaagataaatacaagcagatcttcctgggtggtgtggacaagagaacccagttttggctctactttgcagggaatctggcatcgggtggtgccgcaggggccacatccctgtgttttgtgtaccctcttgattttgcccgtacccgtctagcagctgatgtgggtaaagctggagctgaaagggaattccgaggcctcggtgactgcctggttaagatctacaaatctgatgggattaagggcctgtaccaaggctttaacgtgtctgtgcagggtattatcatctaccgagccgcctacttcggtatctatgacactgcaaagggtaagtttgctgtgggctttaacgttgtgttcttaggagacagtttaaaagagcattgtaccaacctaacagtccaagagctaaagagttgtttttttaattgctaaaggaagccaagatcatccaatgcaacccttgtgtacagatgacgtgtttaggggatgtggggaaaggaagtcagtaaaactctgctttttggtaaaagcatctctttcctattcccaggaatgcttccggatcccaagaacactcacatcgtcatcagctggatgatcgcacagactgtcactgctgttgccgggttgacttcctatccatttgacactgttcgccgccgcatgatgatgcagtcagggcgcaaaggaagtaagttccacttgagcagaagataaagttgtagtcgtggggcaatctgctgccacaaactggtgatacatacctttaaaatggctgtctgtccaagtcaagggatggggttgatagcatctgtgtctgttccacaactgcctttgagctggcccttcagatgcctatgaatgagggtgcttaaatggtgttagaggttaagaccaatgggtagtctgtattcctgtggtcatagcattaatatttcagtgttgcccatgctaatgtgtgaatgttggatttaaagctgacgttcttagaggtggggctctgctttatttagcctagtgaatcttaggatttttcatcggccttcagtcactaactccatgtctttattctttgcagctgacatcatgtacacaggcacgcttgactgctggcggaagattgctcgtgatgaaggaggcaaagcttttttcaagggtgcatggtccaatgttctcagaggcatgggtggtgcttttgtgcttgtcttgtatgatgaaatcaagaagtacacataagttatttcctaggatttttccccctgtgaacaggcatgttgtattatataacatatcttgagcattcttgacagactcctggctgtcagtttctcagtggcaactatttactggttgaaaatgggaagcaataatattcatctgaccagttttctcttaaagccatttccatgatgatgatgatgggactcaattgtattttttatttcagtcactcctgataaataacaaatttggagaaataaaaatatctaaaataaattttgtctgcagtatattttcatataaaaatgcatatttgagtgctacattcgaataaatactacctttttagtgaatgctacatttttaataaatgctacagtatctccggagatgaagaactgtctttttaaaaccaattgtcagcagtccgcttaacagaataacttggttgtgccacccacaaacatttccaacacattagcaaaggaattcaggcccagtgcatccaaaaaacattgttccattgcctatggatgatcatagctgaatgagctttctccaagaaatactgtgaacccaccttctctagtcctatggttattaatcatgagccatgagctgaattatccactttaaaatggttacgtttgttgcatgaatatcacctcatttaaacttttagaatcaataccaatttcatccagttgccttcattttcacctggctcaagccattttttttttttttttttttttttttttgagacaagagtcttgctctgttgccaggctgg

SEQ ID NO: 17278 - DNA, 1256 bp, Homo sapiens
gttgtatatatagatgttattttatgtcacactgcttcaatgatacctatatccatgtgtttgtatccatgtttttatccattcaactgtattaaaaggtgttgggacaggagttgtgttaaccttcttgtattatctacaaaaagttgcacttagtaggtgcccaaggcaggttcgtgaggtgctaccgggagatgatagtaggatagtagggcaggtttttttttgtttgtatgtttttgtttttgtttggtttgtttgtttgttttgctttttttctgatctccttatttgcaaggcaaagtaggttagatgtgagctagcaagaactgggaaaaagaggggtgggggtcccaggaaggcccaggatggggctgtgttaccttcttcccagttattttcctgtatccagtgaagtcttcgcaaccaattcttcctctctaccttgtttcccgtcctcattctgagagataattaaccgtcatgtggatgagaaaccataaccttacagttccttaacctcaactccagacagtgacctttacctttcctgcactttagccacaaactcccataccacagcctggatgtcatccactccacctctgaaatccagtactctgctctctgaccacaacctatccttgctactctcatgtgctcacttcctctaaacctattttattttgtttttagatttgaagggtgattattttattaacagtaataatgaaaaaatagtagtaagaatagcaacaataatactagctaccttttattgagcacttactatgtgttggatgccatggaaagcactttacaggtattatcttaatctaaacaacacgacatcctacgggacaggattaactgttaccatccttgttttagaaatgagtactccgaggctcagagagttttaagtttctcaagatcctatagcccagtaagcaataaagccaaaaatctgactctaaaacctgagctcttaactatgctgaactccctctatgaacttaaaacatatatgttattcagaacagattataatttcattttgaaaaataaagtgcaaagtcaagacagttgcatagaggaccccctgtagcaagtgtatggttacctttctacatattttctgaaatacttgtctttagatactaatcctaaaccatttcaacatctggttgaaattacacatgttgcttcatctataagactgtaaaacgtcattagcaccaagcaagcatatgctt

SEQ ID NO: 17279 - DNA, 1310 bp, Homo sapiens
acacagatttgactttctctagagagctgactaatgatgaacggaagcaaatacatcagattgcccagaagtatggtcttaagagtaagtctcatggggtgggccatgataggtacctagtggtaggtagaaaaagacggaaggaagacctactagatcagctcaaacaggaaggccaagtgggccattacgagcttgttatgcctcaagcaaattgagatcttactaatttattttgtaaatgcctaatgaggcagatttttgaattaaagaaatgctacatgttccggttgcagagtatattcataagatgtctcaccttgttcatttcacatagtggtttattagatattggaacctaaagaattctgtccacttgtattagcttaatccagcagatgatattgtgcagttactgtttgtgtctttgatattgctgtgtccctcagattttagtagtttgacaagcaagaacacatatccaaatggaattttaccctgagaaattatcattttaaagggcatagcacagcaatctgcaacaatatgtaaagttgatattgactacaataaaaatccagtcttaattccagatttactgaaaatgtcagatcattttgtattaatctattttcatctttgtgtgaagccagttatagaatgtttgacaataaattgtgctgtacacgtaaatgtccttaccaactaaatgatgtaaaactttcttaaagtaattttagtgttcatttatttataacttctaccatgtgatttccagactattggaagtgatttactgtatcttgtgatatatgggttttaacaaattctagtcttcacgctgagagagcactacttgagagagcagttgaaagtttcaaaaactttggttcaatctgaagaaaggaagcttgaactgtttgttcttggtgccttgcagagagactcacagcaactctccattatagctttcacacggtttggatgtgcagcacatccaaggcaaccacagctgtggtagagcttggtaaaagactgaagatacattggtgctttgatgaaaaggtcagttggctggtccctctctcaaaaagcttattaagcctgaaaagccaactttgtaacatatttaaaactgctattttcgcttatttctggaatgtaaaaaaaaaaaatgtataaaaagaattagtgtatgcttcctgaataaaaaggagccaaagttgatcagaatggtggcgtgctcatttccgggcagcagccttgtagcaacactgggtctttggagaagggaagtggtgtttgcacag

SEQ ID NO: 17280 - DNA, 1207 bp, Homo sapiens
aaacatatgcacgcacttttcttgttgacaaagcaagaatataggtttgctgtgtaggtttggtgctctattgattggtgagtgaccagagcaagtatgaaggtgatgctgccaaagcacaagccagtttcttgggaaaattcaagttacagtggagtatttttttgaagaccatatgcttggaggtagaaacaaaccaacgaccaaaaaaaaaaaaaaaaaaatctgctcagatactcagccagtagctcagagagatgctgagttaggcctgtcaggtctccttgggaaaggcttcatatttgcaactttgatgattctatgtccagcttcagagctgctttcccagaaattcacgcttaaacaaccaaccggtaaccaccacttccccacaccgccgcccggtaattatttgcattacaaaccggaggcgccctcatttgcatttgtgtacagattaactagttaaggcttgagaagctctgaataattcaaaagtattagacccacacagccttggagagaccttcagaaactaaggaggagttttatattaagggagacattttagtcagtaagacgatataacctacttactccgtaaggggaaatgaaggcccagagaagggaagggacttgaccgaggtcccacttctgtttcgaggcagaagccagactaattttcatgcctcctgactcccaatcagtttcacaaagggattcaatctgtttatatacgttacattcctggatacgaggtcttttgatgttcagagtaactgactagttagtattagaagaccctcgaggtttttttccacagaaaaacatctgaagatggattgggtgagggctggcaaaacgaaggcatgccgggccagctccttaacccaatgacccagtgatgctgcaaggctggaacggggtccaggagactgtgtgtaacaggtgccctaggtgacccttataatcagggaagtttggtgaacaaaaatcgaacccatgagtgaacataaattaaaaagttgatcaacctattaaaatgtgtatttcattgggtagcttttctcactgtagacagattttttccttcttcaatgaaaaggcttttaaattagtacaactgttactatttaaaaaaaaaataccctaagtactctgtttacttctggtgaaacaaaaccagtcattagaaatggtctgtgct

SEQ ID NO: 17281 - DNA, 1467 bp, Homo sapiens
ggtgacagggtgaggccctatctccaaaaaaaaatttacccaagcatataaaatagtaattaccaaatggttgcttttctttggagatggagagaggaagtaggcaagttgtcatttaccgtgccctcacatttttggtcttaaatgacttcacttgagcatatattcatacataactatgactcttaaaaatcccatataaaagcttagtagcattgttgtaatggtaacatattttattgtacttcaggatcgtccagcgatgcagctttaccaaccaggagctcgaagccgaaatcgactctgtccccctgatgacagcaccaagtctggagattcagcagcagaaaggaagcaggaaagtggtattagccatagaaaagaaggaggagaggagtgataagtccagatggccttaggtgtcctgactgtctaggcagccaaagagcacacgttaagcaatccagaggtgccttcagggcaaagaatagagagaaagggagccgctgtgctggtggggtacactgcagaggagtaagtcttgtgtcaaagcaggaatctgatcagaggttcagaattggaagtacaatttcattgcttttgcaatttctacaaattaattttaaagtgtcagaaaaaggtgacggcaaggacatgcattgcaatttgcagggggaattgtcaagtgaggacttcatcacatatgacacgagagaaaagtaagagctggttctaaaatcaaaagctgttgttcatcctgaattgaattttctgaatttgggtggagcagagtcgctttgaagccttgttccgatctaattctattgtattgttgatgataagtgttgacattgggtagtgtagaagcaacaagcatgtccttgtagtacaggtacagtgaaggatagaacacactttcgttgatacaaaaatttaaatagttatgttacttctgtatccagtgtcctaaagttttaggattagttttagttttttgtttgcttatatgagcttagcgtaaagaatatttttaaacttcgtgttttgtcatcagcatcttttctattaagaggtaaaatgtagtccttgtttgactcttgacaatccagtgtgtttgatcttaggtctcatgatctgagtgcataccctctccaggaaggaaactgcaccagtgtctattcctgttaaatagcaacttttagtctcagcttgtttcgttttgatgtcaataaatagtaacagcattcaagtgtgaagctaagtgtgtttattaactttactaaatagctatgagttttgagaaattaaatttttgacatctgacatcactcaccttctagtgaagcctaagggagctttaactcatggcagaaggtgaagtagaagcaggcatctcacccaaaactgtaaacaaaagtaagagctggttctaaataaaacaaataaaagtctattaatttaaacata

SEQ ID NO: 17282 - DNA, 2624 bp, Homo sapiens
attacctgagtgataaggacattctgattatactattgtaaaatgcccgcttgccttatatttttaagtggttgtttttcaaaagtgtttaaataaggcagtcatatttcaaagtatagagcaaaagtttttttattattatttttgagacagggtctccctctgtcacccaggctagagttcagtggtgcaatctcggctcactgcaacctccacctcctgggctcaagcaatcctccacctcagcctcccgagcagctgggactaccagtgtgcaccaccatgcccagctaatttttgtatagttagtagagacaaggtttcaccttattgcccaggctggtctcaaactccagacctcaaacaatccgcccgcctcggcctcccaaagtgctaggattataggcgtgagccaccacacccggcccaaagttttataattaaacagtattaacagtcttaaatactattaaatatatgttccaggaaatgtctacttttaacccgcaactactgaaaataagagtcagcatgtagcagcattaatgacccctgaatttgaaatgatttctgtttatttatacctaattgtagttgctgcctagcctaataaatctgtagttttcaaaagttaaaagaaactagttcccaaagttttgagtctcaatccatctacttccctgaataataaaacctgaattttgtaatacccacttaaaaattttattctcagctgggcgtggtggctcacacctataatcccagcactttgggaggccgaggtgggcggaccatgaggtcaggagatcaagaccatcctggctaacatggtgaaaccccatctctactaaaaatacaaaaaatgtagccgggcatggtggcacgtgcctgtagtcccagctactcgggaggctgaggcaggagaattgcttgaacctgggaggtggaggttgcagtgagccgagatcaagccactgcactccggcctgggagacagaatgagactccgtctctaaataaacaaacaaataaaaatgtattctctaaggacattttttttttggttactggttcctagagatgaaatgattatcttattttcagtaggcaaggtagtttaaatgcagaaattctgcgatatatgaatattgtgacatcaagaacagcttcattggcatattctttgggaaagaggcaagaagaataaaagggctaaaagtattttattttcagcttatgagtgttgttactgcttcaaattgtgtttagtcacctgagccataaatcagttgtagtagggctattgtattttaaatatattttttgttctccaaggagacttatctagtttgccacctccttgcctattgctctgatgtggttttccctccttttttatttattgcacaaatatctaacagttaaaaaagaaaaatttcagtaccatatcaattgtctttcatattttgtgttcctcctttccagtgcttttctatgtaagtaaatattctgatgtacttgtaagtaatcactcagagcataatgtaattttgtctttggtgtcttaaaattttgcagccaggcaagagaggttcacagggaaggtaggaacaagtgattattcagtgtgaggatgggaagaagatcaaagataagtaagggcaatgattgtatccttcccgtgtcattgcccctagtccccaagccaccctcctgcaatcatgagtatagtggtgtattgtggaaggcagcatgcccagttttccagtttcaaaatatattatttagcagtgaggcttaactcccagtaaatgaaggggtctgtgagtaggggaacccttcagactggttatattatgagctgtagaactgttgccattttgttgttcccagttgtgcccataaagagatgtgtctgagctggagacttaggctcagatggggaacaaacagccaagtaccaaccttagtttggtccaataggtgaattttagcaactctctaaactcagctctatacctgtaagactcagaagtgatacatatagtgatagaaaaaaatactttagaaaatagaaaacaacttactggttactctgctaatgtgatggaggttgcagaatggaaaatgaatgaatgcaaaaaaatacagctggattgtgtgccacaagtttattactcaataaatattctgtggtttgacgtgctgtattgtatttttaatgtatcctgatgagaaaaacaatcctaagacatcctgtaagtatcagacacgattgaataagaaggggaatgactccatgaaactatatttggcatcagtaagattcttctgccagttttctcgaaagcgaaccattcctggtctacaaaggaagaaaaacaaacacttttaaagtatttttaaatcaaaagcttttaaaatcaaacaaaggggattccctatttactcttttatattcctagtaagcaagaagcctcttttattggcgggggaggggaggtagctaaggttctctatgtctatcctttactgtttcttaagcccagtcaatgaaaggatttatgagcttatatgtaaagatactttaagagagctgctataaaagggattattatacatga

SEQ ID NO: 17283 - DNA, 1146 bp, Homo sapiens
tggtggcagacacgaaatttggttcatgataagacttcctttccccacctcctgatcagcattatttaaatctgtatttttctgttagttaagaaagaaatggcttcatgatattgtatttaatagcaaaagtttggctgtcttcttcattactgttaatagctactatattttaacaaggagatttctttttttgttgttgttgttctagagtttggaatatactgattatctcagacttgacatttatactgaaggatgaagtaagacctccagctttttttaaaaaaggtgttgatttggaacacctgtatgggttatggtttattaaggttatggtttagaaagtttttttccctcagagccttaacttgttaagaaggttcatttatcctgcactgaaaacaaaaactctatatactttgtttgtgtgcctcctgcactctcccattccctatgtgaatatgctctagttgatatttttaatatattgatttcttttttctcacagcaacaagtgcttactctagaggttagtgggccctgatatgtcatcagtcagatgcctgcctagccaaagctggactaagattattctgtacatttgttgatcttgatatagacttatatccctgtagggactgctaatggctccggcttctggagtaaggtactggagaccactcatccctgtgtctgcttgattggttcagctgttgaattgcccttttatttggaagcagtgttgaagttgtctagggttcaaatggctgctttgtacacctgtcattagtataaggcagatgtttattttatcaagctattttatctctacatttaactaaaaacaaaagttcccaaagatctgccttcacttcagaaattttttttggattaaaaaaattaagcctgaaccttaaataaagtgagttggttattcattccaaggattaagtcccaatctacctctcagcacaatgcagaagctcaccactgtattgctgccattaactcatgccagaaccctttgccaataactggaattacaaatttttgttaaagaaaatttatcaagatctttctttactgccttctctatatgtacatctcaaaaacatgtacatctcaaaaactggagtagaaagt

SEQ ID NO: 17284 - DNA, 3072 bp, Homo sapiens
gaagttgatcttgtaagaacatttctgacttttaaatcaacatctttgacttcgagacattcttttgtgattatactcattatttattacacactttttctcacctacagcccaagagtgttcgctggatgatgacaccattctaatcccaattatagttggtgctggtctttcaggcttgattatcgttatagtgattgcttacgtaattggcagaagaaaaagttatgctggatatcagactctgtaacactaatcaatacgtgatctctgttacaaaagaaaaaagcaagtacaagttccaacatgcaatactggtcaacttaaggtatatttagttgcagtccagctctttagaatgggtggtatgggggatttcaaacttaaacaaaaaactatcaactacaaattagttgcctgactttggtttttccaaccaaggaatttaaaactgttatttttacagcaaaagatgtgcaaaatcactggattataagttctattttactgtcttgaattagtatttcagtgttttcattttagacattcagactaaaaatacaccgtttagaaaaaacaatttttgaaaaagagattttttttccctgcaggtagttgagttggaacaacatgttctaccgtggatttgtacttgctccttttgctctttttgtgtgtgtgtgtgtgtgtgtgtgtgtgtgtgtgtgtgtgatttttgtttgcaggttaacttagctactttggcattgctgcatatttgacctttgagagatataatagtagatttgaacaggggctggtattattatgttcttagcaataaatgcttttctaatgccttttgaatacatttgtatttatgtggctgtaatgacaaaagatacaaaagctttttaaaatttagagtaggtattaatcttattgtttaatcttttttttaaaaaaactggatatttcaatcttttaaattgcaatatataagactattccaactgggcatttcaatccattttttaggtgctttagagataattgcttgccagtgccaattgagggcattagtactttgtgctcataaattggcctctgtatgcagtactaaaattaatgcagatttctctttagccttccaacatttcttgttgatagtgatgtattttattattttctttttcttaagaaatgccagtgtgtcctagaacctagataacgaagtgcacttacacttataaaataacttgcatctaggctgggcgtggcggctcacgcctgtaatcccagcactttgggaggccgaagtgggtggatcacttgaggccaggagtttgagaccagcctggccaacatggtgaaaccccatctctatcagaaatacaaaaaattagctgggcgtggtggtgggcgcctgtaatcccagttactcgggaggctgaggcaggagaatcacttgaacccgggaggcagaggttgcggtgagccaagagcgcaccattgcactccagcctgggcgacaaaaacgaaactccatctcaaaacaaaacaaaacaaaacaaacaaacaaacaaaacttgcatctaaccaaaaagtcttggttttatcttaatccattaaaaagttgttctttgtttccagcttgcattgattgctacaacatcactaatttggctttcacatttaaatggttctgtgctaatcaaaactttcgttgttattattcattatggtagaatcatttttaattcacgtgctttgtgttcagttttgtggtctgagagatgtaccaattgtcaaattaccgtgtaccacctaatgtttataggagaaagcaaaatacatcagcttggtagttaacacatcaaatatttcttgctgcttctaggagaacttttttggtgtgtgttggaatggctgagcaaatattaaaattgttaatatgcagccatatatggaaggttcctgtggggttgttttttcgtgttttttttttttttgtggtgggattatgtgcctcccattcactagaaaatgagaaaattgtctgggttccaaaatattgacattgaatggatcaatacacacacacagacatatatatatatatgcacacatatataggcagttgcatgctagcatgggtatttttataacaatataactgagttatattggaattataaatattttccgtcacttaaatttgttctttgtttagcctgaaaacctttatggctcaagatcagattcctgactaacccctctcttagagctacagcgagctgcattaccagcttaaaacacttcttagggattaaatatagatgtaatttttcaaaatcgtttttaatttaaactgtgttttagtgtaaaattgttaaccttgtaagatggataatgtgtataagaatgtaggccttaactatttcacatgagtcaaaacaaagcagctttaaaaaaataattggaagcacaagtgcatggcactgactgaatgctgttaatatttctaaaagtttctacattcagattatatgcctgattcatagtaaaatacctctaataaacactgttttatagaaaacctgacttcagtgaatatttttgtattttacatgggccagtttatatactgctatttacactattatttcctatagctacatgttctttgtaccttttgtagttttatttgtattactagattcataccttgatggtaacgctctatctggttttgggtgtttttcatgttttagcatttgtataaagaaactggtccatgtaaatactttccatgttttttcttcaaatgtttaaaccactagttgatgtatggtatctttagatatttgcctgtctgtttgctcaaaattgcttctaaaacaataaagattcttttatttcttaaggcaatttgcttaccttttttcccgttggttaaagtcaagattttgtatactacataatggcaatttctttcaaatggaaaaactttagaaatgtttagaagtagaactgaattatttgcaaaatgttctgatgttctgtctgtatattaccatctggaagaatagt

SEQ ID NO: 17285 - DNA, 2542 bp, Homo sapiens
gactccttttttactaccgatgaccaaatgaagcagtgtaattaatggaaatagttgagtggactttttctcagtggttaacatgcccattttaaagagtaatacttacctttaagaagaatgttgttgaactctttgcatgttatttagtatgatgtgcagaaaacacttaagaacgtacctggtcttcatgaattcctctttggaactgggaaagagatccctgtggctattaaaaaggggggagggttcttacacaccattaattatgaagcaaaaggtttatttgcttaaaatgtcatttaaagatacttaaactgcatgcaaactttatttactgtacagagttctggatgtatttatcaaatagaaaaaccacccttgacttggttgttcacccgttttgtgatttcccttgaaaagagaaatgaattgtcatagctattgatattttactaggtgatgttctgttacactgaaagggatgttttttaaaaaaaattatttggaaacaagttttcaagtagggggacagttgcttacataatatcttgtatattcacatcctaaaaattttcatttatgagtatgggatgtgtgtatatggcttagccccaagttaactgtgctgattaacaagtacttataaaaatagctaaagtagaaaattaatgatcagttgtactagaggaacatcatagaagagaaaaatccaactctttatattaaaaatgaatacaataagaaaattgcaaaagagaccaaaatgaacgtgttttgtaaattgttacaggagcaaaaactttgcaactagttttcaacatactttagactttaaatgttgtttggacagttttgtcttcaacttggaccaattgtagattgttacaggcttcctaggatttagcattcctattttctctaccaaagttttttttagaagcatcccaactcttctctttgttgataaataagcctttcctgtcatcttcattttaacttgctaaaaccctagatacaaaggtcctccctcatttttcccacagagcccctgtttgggaatttgagattctgtgtcatgctggttttcctttcagaattgcttgaaatcgagttctcttagccactggacacctagttttcaggagaatgtcccaagattgtttatatatacaaaatggcaaaagtactgtttttcgaattgataattcaagcaaaggcttctctttactgtcactgatttttttttgtttttattttgtttccttgtttctatttccttgaagctttgaagggaggagaagcagaaaattttgtttatgtttgttaaaaatcagaactacttaatgctttttgccacagcatatttccttgcctgttggagccgttaggaagattacctatgtcctaatcttcaacctgagaagatttttgactcttgtgtctactgttgattgtttgcttgagttctcaaagacctgtggccaggtattttaaaaagtcgtctatttctttctagttgcatcaacttgcacactggtgtctaactatatgtggtattcggaacttgtaattcttattgagcagccattgcctatattttctcagctcctcactgatttctttatatgagctcagctgacaagcaaatgcagctattttgtttaccctctcttcataccggaccatcaacaacagtgttctaactcatccctgatggtctgtgagatgtagactattacacaagattcaagttactcgtaagcaacttttagatagagttggtcctgttaggaggagactcttgatgtcaccttcagtatcttgaaagcgggtcccctccccgaggctcttaattctttgaaaacttgatgctgtttcagctgaaaaattagcaagactgttaaaaaaaaaaagttgaggggagctgtttaagaaactgaaaagtaattgcaaactacattggataattgtgactttcagttgttgttctgtatcagttgaatttttgtgctcttttccctgtgtacgtggtggttctatttttctccaataaaacttttatttaaaaaaagtttctagagaagatctttaaaattcaagtattgtaagaaagttataaaatcacaggacttaaaatcttcctaacaacttctaatgaactcacatttgttgattttgttatttttaaactttttaaaaattttgtaatggttttgtggtaatgctataagagtatgggggagggcatggttaacagggtgaggaaaattcccaggaatcctcaaggtggataattattcttaaacatgcggatacaagtataaacattgcttcattcaaatcctcagtgtcaaattgtttcataaagtcaatatgaaatgagtctagatttgagttcaggggagaagaaaagattactcttagttatggcatttgctctgccttttctgttaatagttttttgagttctgggccagatactctcagagtaagatgttcctcaaagtttttgaacccagttcctgagtctgcttgaatg

SEQ ID NO: 17286 - DNA, 1123 bp, Homo sapiens
taatattgaagatagctaacattccctgggcatatattaatttatgaagaagttttttgttagccgaggggactaaagtttgctctggaatgtctatgattgtgattcattttgctgctgaccatcaagagttcactcatttaacattatgcaaaagtccatgtatacacgaaaatagaatagtatcatgaactcttccccctcccatgtacctatcatctgcctacagcaatgatcagaattcactgattcttcagtattgaaaccagttgataaataaccaaataagctttcaataccagtacagtgaaaactgttttatgtcttagaactaattttgtctgttgatttgagcaaagaagaaatccacaaaaagaaataatacaacaaaacttagttatggaggaaaataggaatttagcttcaattctcagtaaaggcaaaatgagtttcctgtgttctttaatctaataatgttattcaaaattaaatgtgtggattttattttttgacaattgctgcttcaaagccctggagccctaattagcatgggaacatgtggtaagaagttaagcaaacctcttcagaagtggtattgtcaattaatttaggttatatgtgttttttattttagggacatgggactggagttatttagggctcatattataagtgatcagaaagtgcagaataagacaattgatggcattcttctcttgattgagagggaaaggaatggtgaagcaattgatagaagtttacttcgaagccttttaagcatgctgtctgatttgcaagtaagttaactactacacctactatacagagctgattgctatcctagttttttttccccccacatcagacaggtaatgtgctgatgtcataacaaggtttgaaggaagcacatctcatatatgagcataaaaacccaatcatcatgcttctcaactacaaaaggatcctagcttgatgtttaaaaaccaaattcataatgctgtttacatagacatagaggacatttagtaaatatttgctaaataaatgatctccttcattttgttccccctccagatttatcaagattcttttgaacaacgatttttggaagaaactaaccggc

SEQ ID NO: 17287 - DNA, 1136 bp, Homo sapiens
ttgactagctatgatgaccttgggcaagcttactaaatgagttccagcctcagtttcctcggttgtaaaatagattcctcagggtattgttgggaagattaagaggcttataaagtaccttgcacatagacagtactttaaatctcaggttaaaaattcatgtcgacttaggttttacacatgatgaaataagatcaggattgttattttttatggtcattcttgaatttttatttttttgaagcaatacaatcaataggagaaaaacctcaccttcaattttaataggtgagtcaaaatgacttaaacagtattatggcatttcaaattttattctttatattaagcttaaatacagtggttactttaatgattaggtgtaatagttataaagatcacaatttaccctaaaattagtaatgctattatattttatgaatctttggttactgtatctgacatggtattctgatgccaaccttttacatatcatctagataagcctaaattaccagaaaactacacagatgaaacctggcaaaaactgaaagaagcagtggaagctattcagaatagtacttcaattaagtacaatttagaagaactctaccaggtatgtattaatatgcataaccagatttgattaacataaattgaggtgggatgtatatggattttgctttctgaaataggttcttaagtagacttttggttcccttctaattttagtttctccattaattgatgaactctataattagaccacgtattctcacataaaccatgggtacagtcataccagtataagttgtgcttatatttgaccctcctgataagaaattacagttacgtgtaccttggtgtaatagaagttctacctataatgtaatcctatagcatgaatcccaaagatgatttctggtgacatgtcattctattgtgataattgtttcttagttgtgttacctacccataggaaaggcctcaagacatgcagatattattcatatcctttattctacctccttcttaatagtagactttgccatttctttttcttgctctttacatttttctaatacctgggctacaagacgcaccttagcccagaaatgagtagcagtttgtagtccagc

SEQ ID NO: 17288 - DNA, 1121 bp, Homo sapiens
aatatttagagaactagtaaagatatattatcaaaacataggcagtatatttaaaaattttagaacccatttgatgaccaaattagtggtattaattttgtttcagggttaatgtagcactttgatattcccctagtcttgtgacattgttactctggttctatagacccactagttagatcactaaaatcacttttagatatgagctgccacagagtaatgtagtttaatataaacaacaatgtaattgtgatgtcaataagttctttacttgtggcttaataattaaaaaataacaatatactttgaattatatttatcacgagtaagactataaaaatgcataaaagtatgtttatgtgttttttttccttctacagtgagaaagtcaacaaaggaattggcattgaaaatatccattatttaaatgatgggctgtggcatatgaagacatataaatgagcctcagaaggaatgcacttgggctaaatatggatattgtgctgtatctgtgtttgtgtctgtgtgtgacagcatgaagataatgcctgtggttatgctgaataaattcaccagatgctaaaattctgttagcttcagaaattattttaagttttcttaaactcaagttaaaattgggtagcaaacttggacattaaaaggtatctggtaagtaagcaaactcatacaactaatgtcctttcttaggctaatgatataagagtgaagagcaggacttggtcaatggattgccattttatggtagacctctagagaaactgtctagttaaatggggctagaaactagactaggaattttattctattactccaggggacccagcagtgctcattctcgtgtgtgtgtgtgtgtgtgtgtgtgtatgtgtgtgtgtgtgtgtgtgtgtgttttgttgattgtttttttaaaaaaaacttcaatggaaaattctaaacatattaagaagtctggagaatagtataatggacctctccatatccatcacccagtttcagtttatggtcagtcttatttcatctatacctcaattatttctccccaccccccaattattttgaagcaaatcccagacatcctatcatttcatccataactactt

SEQ ID NO: 17289 - DNA, 1240 bp, Homo sapiens
atgaagcttcttacatgagcattttaggaatgacaccagggtttagagataaaacatttgttgttcagggatttggtaatgtgggcctacactctatgagatatttacatcgttttggtgctaaatgtattgctgttggtgagtctgatgggagtatatggaatccagatggtattgacccaaaggaactggaagacttcaaattgcaacatgggtccattctgggcttccccaaggcaaagccctatgaaggaagcatcttggaggtcgactgtgacatactgatcccagctgccactgagaagcagttgaccaaatccaacgcacccagagtcaaagccaagatcattgctgaaggtgccaatgggccaacaactccagaagctgataagatcttcctggagagaaacattttggttattccagatctctacttgaatgctggaggagtgacagtatcttactttgagtggctgaagaatctaaatcatgtcagctatggccgtttgaccttcaaatatgaaagggattctaactaccacttgctcctgtctgttcaagagagtttagaaagaaaatttggaaagcatggtggaactattcccattgtacccacggcagagttccaagacagtatatcgggtgcatctgagaaagacattgtgcactctgccttggcatacacaatggagcgttctgccaggcaaattatgcacacagccatgaagtataacctgggattggacctgagaacagctgcctatgtcaatgccattgaaaaagtcttcaaagtgtacagtgaagctggtgtgaccttcacatagatggatcatggctgacttcctcactaacctcttcacgtgtaacttctgcagacctaccacaagtttacatgtaaccacagaaatccctttctctcctgactcattactaatggataccattctcaacaagtcaatccaaatcagcccgttaaggagaaagaaattaatatacaagctgagtgtgaaagtagaaatcacctacaccagagagctattttggtattttgcctttaaataaaaagcctcctccatatggctgtgcagccttgctctgtggcttttcccagcacaatcagtgctagtgctggggaagggacagtcaagagcagtcagttgcttacttattttgctctggatgagtctgggacacgctgtaactttaacacatttaagaagaaggtgtgtggccttttcag

SEQ ID NO: 17290 - DNA, 1282 bp, Homo sapiens
ggtgcagctgtccaagcagccatcctgtctggagacaagtctgaaaatgttcaagatttgctgctcttggatgtcactcctctttcccttggtattgaaactgctggtagagtcataactgacctcatcaaacataatactaccattcctaccaagcagacacagaccttcactacctattctgacaaccagcctggtgtgcttattcagctttatgaaggtgagcataccatgaccaaggacgacaacctgcttgacaagtttgaactcacaggcatacctcctgcaccccgaggtgttcctcagattgaagtcacttttgacactaattccaatggcatcctcaatgtttctgctgtggacaagagtacaagaaaaaagaacaagattactatcactaatgacaagggccatttgagcaaggaagacattgaatatatggtccaggaagctgagaagtacaaagctgaagatcagaagcagagggaaagtgtcatccaagaactcacttgattcctgtgaattcaacatgaaagcaactctcaaagatgagaaacttccaggcaagattaacgatgaggacaaacacaagattctgcacaagtataatgaaattatcaactggctcgataagaatcagactgccgagaaggaagaatttgaacatcagcagaaagagctgaagaaagtctgaaaccccatcattaccaagctgtaccagagtgcaggaggcatgccaggaggaatgcctgggggattccctggtggtggagctcctccctctggtggtgcttcctcagggcccaccattgaagaggttgattaagccaacccaagtatagatgtagcattgttccacacatttaaaacattgaaggacctaaatttgtagcaaattctgtggcagtttttaaaagttcagctgctatagtaagttactgggcattcctaatgcttgaatatggaacatatgcacaggggaaggatataacattgcactttataaacactattgtacatggaaaaatgcaatgtcttaaataaaactatttaaaattggcaaaaaaagaaatgaaatggtaaactttaaactttacaactgactccacagaaatacaaaggatcattcaagactattatgaaaacctctatgcacataaaccagaaaatctagaagaaatgaataaactcctggaaatatacaatccgccaagctttgatcaagaagaaatagaaattctgaacagatcaatagcaagcagtaaaatttaatcagtaatta

SEQ ID NO: 17291 - DNA, 1282 bp, Homo sapiens; identical to SEQ ID NO: 17290

SEQ ID NO: 17292 - DNA, 1191 bp, Homo sapiens
aaacgccccctaaagatgtccacatcctgccatcacacaagtctttccttagtaacctgggcgatagctgtggatgtttccaaggattgtcttcagtcatggccttgggattaaagtgctcccgcatggtccaccctgcctttcgcaattatcttgcagcctctatcagacccgtttcagaagttacactgaagaaagtgtatgaaagacaacatggccataggcaatacgtggcctattcagctgtaccagtccaccattttgctaccaagaaagccaaagccaaagggaaaggaaagtcccaaaccagagtgaatattagtgctgcctttgttgaggatataatcaacttggaagaggtgaatgaagaaatgaagtctgtgatagaagcacgcaaggataatttcaataagactctcaatatagggacctcaccaggatcccttgacaagattgctgtggtaaccgctgatggaaaacttgctttaaaccagattaggcagatctccgtgaagttgccacagctgattttggtgaatatggccagcttcccagagttcacagttgcagctatcaaggctataagagaaagtggaatgaatctgaacccagaagtggaagggacactaattcgggtacccattccccaagtaatcagagagcacagagaaatgctggtgaaactggccaaacagaacaccaacaaggccacatactctttacggaaggtttgtaccaacgcaatgaacaagctgaagaaatccaaggatacagtctcggagggcaccattaggctaacagagaaacagatcagccaaatggccgatgacacagtggcagaactgtacaggcatctggcagtgaagaccaaagaactccttggatgaaagtccactacagaccagcaatacttcagagcccagtttctgctggatcccatgggtggcacattgggacctctctccctcccccatccacacagaagactgtcaccatgctgacagaaggctgtctttgtgaggcccagccttccagtggaacactcagacttgttcattctcttcctccttctgctctgggccttctgatgtgggtggctctcagaaaatacttgctgctggcaaagggcctttactcaggcatttgctttgacttgatgtcaccaagagactgaggacattggcaggctta

SEQ ID NO: 17293 - DNA, 1752 bp, Homo sapiens
caaacttgccatttttaaagtgtacaattcaatggtttttagtatatccactatgttgtgcaagcatcaccgctgtctaattccagagcatttctgtcaccccaaaaagaaactccatgcctattagcagtcactcccagttcttcccttcctcggcccctggaaaccagtaatgtactttctgtctctgtgattttgcctgttttggacatttcatttaaatggaattatgcaataatttgtggccttttgtgtttggctttcacttagcatcatgttctcaaggctcatccatgttgtggcatgtatcagtactgcattcctttttatggctaaatgatgtttcattgtatgagtgtgtaccacattttatttatccattcagcaattaatggacaggaacaatggcttttaagtattaaattgtaagttcaacattaaatgtatccacagttattgataatatcaagattatacatggtgtgaacagaatgctgtgtcgaaatggtatgtaaattatttgtcagcatttcatgtaagtgattattttctaaggacccttctagccctggttttaagaaatatgtgaatgtagtattttcatcaataaagtttaatgcattaagcattagcttaaaatttgaatgaaggcagatgtgaagatatttgccacatgttgtaataatcatgttttgaaattatttcaatatgaagtatttgaaaaatgtcaatacataaaggaaaggaaatgagtataattaagtcaatatatttttaaagcaatttttataatttagcagacactgcatcttaatataagttactattaaaattgtgtccttgtgaaaaatgtgatgtcattttcctttttttgttgatcatgtaaaataggttacttttctttgctacattttctatttaataagctattgcttgccgttgtggaatgttttacttgttgctccatttttttctccctacccccacccctctctcccacacgcacacaatgttcaattttttttttaagtcatcattagtgtgtttatctttaatggattctaagaatggacaaaaagaaacacacaaatatttcatccttttctggggactcaagtctttgttaccgatggaactcattaacttcttgttctttcttaaatcttcctccctccttaccttttcctctccttccttctcttcttcttcctttcttctcccctccctccctccctcccttcttccctccctcctcctttcattctccttctctccttctcccttccttttctcctacctcctttgactaagcctccctcccctactccctcctttccttccttccttccttcttctctatcaatataatcactttgtttctttcaggtgagatcggactggaactgttcggctgcgaccagaaatttattttcctgagtaaattgccgagaattaagaatgaagagggccatttgcatctccttaaattattcagttacctgctttattgctccatgtggaaaacttaaaattgttaagttgtgcattactgtattttaacttgttgcttagtttctacatgtttattttcagtaatggctgaaagtgttaactgttccatacttttagcacaatgtgctgcataaggttacctgtgtacagagttttactttagattaactaaatattgcctgggttcagtttttatttccattctgaaatgcttcctttttattgtttgaaactgaaaat

SEQ ID NO: 17294 - DNA, 1157 bp, Homo sapiens
gtttggcactgcttcatcactatgcaactttcttcttgatgacagctagctctttctgaagttcagtaaacttgggggcagttttcaagtttgtaatcctaacacctcagcattattttattaaaatactctgtggacactgccaagagactgacatccagtatcttctttccacttgctcttgtggttgctgatttgtcattccaggctatggacagaccccctaagccgaaagtctcccagaggaggatgccaaagctccgtgcgtcactctcagaatgatatctcccataattaagagcttctggtgctgtccatttaatgggaatctgctttaagtcagaagatgagtacacaccaccatcctcttgacgagacattccaaagtcactgattttcagaacattattttcacctccaggcagtttcttacagcaaggtccctgtgtatacattttttactcgagatacaccatccagaatcagcatctaatgaaaatttcactgagttttagttcattcttctttctctgaaaggagaggaaatcgcctccaggaaccagttccttaatgacgtagataggccgtctttgtgtgtgaactcctatacttttgacattactgggatgattatattgcttgaggattttggcttctagtaaaaattttaatttcagttcctggggaagacgttcttgacgtgttttaacagcaacagcaattttatcctttaatgtgaccttaaatgtgtcaccaaaatttcccttgcctcttgtaacgtggcacctttatgattgagaacccatttcttattctcctaatggccatactgtgataccatgatgctcttaattggaacattgactttttttttttttgcaatttaaacaattgagataaaattcatataacatcaaatttacctttcacttttttttttttcttttggagaccaagtctcgctgttgtctcccaggctggagtgcagtggcgcgatctcggctcactgtgacctccgcctcctgggttcaagcaattctccttcctcagcctcctgagtagctgggactacaggcgtgcaccaccacgcctggctaatttttgtatttttagtagagataggggtttcaccgtgttagccaggatggtctcgatct

SEQ ID NO: 17295 - DNA, 1149 bp, Homo sapiens
ttttcatttagatgatttaaatttatccctttgtgttattcagtagttcacctttcccaaattggatccatattgcaatgctttatttaatttggagtttagcctttaatggggaaatttgtaatgtttttaatggaactgctatatattttcttgggtaaactaataaattcaacggaaaacatcactgttgtggtattacattactttagggactctgtcagacagaagatgtgaaactttgagctgcgacttgattttaaaaggggtacagaattcaggtacttcattctgtcaaattataagaaaataactgaaatttacttagaaggcaaatggtcacgaataagttagacttcttatttatagttttatcaattgagaatagtgtttcctttttatatgaacaagtagttggtattagctattttatgaaattttaatgtaccatttttagcttcttccggctgataattgcattatggatgaacacaaacgagaaattgcggaagctaagcaaattgttagaaagcttacgatggttgtgttgtcttctgaaaaaatggatgagcgagagaaagaaaaggaaaaagaagaggagaaagtagagaaagtatgtaattcattctagtaaaattaacactatcttctggattttgaattatgaaatttaacttctaaatagtcatttatggaagaataatttcttagttttcattttgctgaaacctcattttctggatcatttgctacagtggttttatttttaatctgaatggctcctttttaagagaagctgtcatattttttttcttgtataaatttcaaaatgttttctaagtaaaatcacaagttgtattgactttaattgtcctctgtgtattagtggccctcaaatcctaaagagattctcagagatgatgaattctggtttcctgtggcacgacataacatgaagtagaacttaattccaagtctataaactgtaatgcctgtgtctgtttttttttttaataaatttattattatttttgagacagggtctcactctttcacccgggctggagtgcagtggcatgattacagctcattgcagccttctacctcctgggctcaagtaattctccagccttagcctcctgagtagct

SEQ ID NO: 17296 - DNA, 1679 bp, Homo sapiens
tagttttattctgcctgcttaaatattactttcctcaaaaagagaaaacaaaaatgctagattttactttatgacttgaatgatgtggtaatgtcgaactctagtatttagaattagaatgtttcttagcggtcgtgtagttatttttatgtcataagtggataatttgttagctcctataacaaaagtctgttgcttgtgtttcacattttggatttcctaatataatgttctctttttagaaaaggtggacaagtcctattttcaagagaagatgacttttaacagttttgaaggatctaaaacttgtgtacctgcagacatcaataaggaagaagaatttgtagaagagtttaatagattaaaaacttttgctaattttccaagtggtagtcctgtttcagcatcaacactggcacgagcagggtttctttatactggtgaaggagataccgtgcggtgctttagttgtcatgcagctgtagatagatggcaatatggagactcagcagttggaagacacaggaaagtatccccaaattgcagatttatcaacggcttttatcttgaaaatagtgccacgcagtctacaaattctggtatccagaatggtcagtacaaagttgaaaactatctgggaagcagagatcattttgccttagacaggccatctgagacacatgcagactatcttttgagaactgggcaggttgtagatatatcagacaccatatacccgaggaaccctgccatgtatagtgaagaagctagattaaagtcctttcagaactggccagactatgctcacctaaccccaagagagttagcaagtgctggactctactacacaggtattggtgaccaagtgcagtgcttttgttgtggtggaaaactgaaaaattgggaaccttgtgatcgtgcctggtcagaacacaggcgacactttcctaattgcttctttgttttgggccggaatcttaatattcgaagtgaatctgatgctgtgagttctgataggaatttcccaaattcaacaaatcttccaagaaatccatccatggcagattatgaagcacggatctttacttttgggacatggatatactcagttaacaaggagcagcttgcaagagctggattttatgctttaggtaaactttattataaaaccaataaatagcttcccaagtatgccagggctcataaaaagtaaatagatgcccttagccccctgaactggtaaatatttaggtataacttggcatgattatatatatatctgtattattccgtgaactcttatgttgaacctgtaatgtaactactgaatttatgtgaaaaagactaccatattatgagtcatgcttctcttcatgtaattgtttttaggaagtagataacttgcaaaagatggtagacatccccaatagcaaaatgggtctaatagtaatattaaccatcatttattgagcacttactataagtgctcaatacatatacttcatgcattttctctaagcttcacaatagctttgtttgtttgtttttgagacagagtttcgctcttgttatccaggctggagtgcaatggcgtgatttaggctcaccacaacctccacctcccgggttcaagcgattctcctgcctcagcctcctgagtagctgggattacaggcatg

SEQ ID NO: 17297 - DNA, 3939 bp, Homo sapiens
tgttccttgtggacatctagtcacttgtaaacaatgtgctgaagcagttgacaagtgtcccatgtgctacacagtcattactttcaagcaaaaaatttttatgtcttaatctaactctatagtaggcatgttatgttgttcttattaccctgattgaatgtgtgatgtgaactgactttaagtaatcaggattgaattccattagcatttgctaccaagtaggaaaaaaaatgtacatggcagtgttttagttggcaatataatctttgaatttcttgatttttcagggtattagctgtattatccattttttttactgttatttaattgaaaccatagactaagaataagaagcatcatactataactgaacacaatgtgtattcatagtatactgatttaatttctaagtgtaagtgaattaatcatctggattttttattcttttcagataggcttaacaaatggagctttctgtatataaatgtggagattagagttaatctccccaatcacataatttgttttgtgtgaaaaaggaataaattgttccatgctggtggaaagatagagattgtttttagaggttggttgttgtgttttaggattctgtccattttcttttaaagttataaacacgtacttgtgcgaattatttttttaaagtgatttgccatttttgaaagcgtatttaatgatagaatactatcgagccaacatgtactgacatggaaagatgtcaaagatatgttaagtgtaaaatgcaagtggcaaaacactatgtatagtctgagccagatcaaagtatgtatgtttttaatatgcatagaacaaaagatttggaaagatatacaccaaactgttaaatgtggtttctcttcggggagggggggattgggggaggggccccagaggggttttataggggccttttcactttctacttttttcattttgttctgttcgaattttttataagtatgtattacttttgtaatcagaatttttagaaagtattttgctgatttaaaggcttaggcatgttcaaacgcctgcaaaactacttatcactcagctttagtttttctaatccaagaaggcagggcagttaacctttttggtgccaatgtgaaatgtaaatgattttatgtttttcctgctttgtggatgaaaaatatttctgagtggtagttttttgacaggtagaccatgtcttatcttgtttcaaaataagtatttctgattttgtaaaatgaaatataaaatatgtctcagatcttccaattaattagtaaggattcatccttaatccttgctagtttaagcctgcctaagtcactttactaaaagatctttgttaactcagtattttaaacatctgtcagcttatgtaggtaaaagtagaagcatgtttgtacactgcttgtagttatagtgacagctttccatgttgagattctcatatcatcttgtatcttaaagtttcatgtgagtttttaccgttaggatgattaagatgtatataggacaaaatgttaagtctttcctctacctacatttgttttcttggctagtaatagtagtagatacttctgaaataaatgttctctcaagatccttaaaacctcttggaaattataaaaatattggcaagaaaagaagaatagttgtttaaatattttttaaaaaacacttgaataagaatcagtagggtataaactagaagtttaaaaatgcttcatagaacgtccagggtttacattacaagattctcacaacaaacctattgtagaggtgagtaaggcatgttactacagaggaaagtttgagagtaaaactgtaaaaaattatatttttgttgtactttctaagagaaagagtattgttatgttctcctaacttctgttgattactactttaagtgatattcatttaaaacattgcaaatttattttatttatttaattttctttttgagatggagtcttgcttgtcacccaggctggagtgcagtggagtgatctctgctcactgcaacctccgccttctgggttcaagcgattctcgtgcctcagcttcctgagtagctggaattacaggcaggtgccaccatgcccgactaatttttttttatttttagtagagacggggtttcaccatgttggccaggctggtatcaaactcctgacctcaagagatccactcgccttgccctcccaaagtgctgggattacaggcttgagccaccacgcccggctaaaacattgcaaatttaaatgagagttttaaaaattaaataatgactgccctgtttctgttttagtatgtaaatcctcagttcttcacctttgcactgtctgccacttagtttggttatatagtcattaacttgaatttggtctgtatagtctagactttaaatttaaagttttctacaaggggagaaaagtgttaaaatttttaaaatatgttttccaggacacttcacttccaagtcaggtaggtagttcaatctagttgttagccaaggactcaaggactgaattgttttaacataaggcttttcctgttctgggagccgcacttcattaaaattcttctaaaacttgtatgtttagagttaagcaagactttttttcttcctctccatgagttgtgaaatttaatgcacaacgctgatgtggctaacaagtttattttaagaattgtttagaaatgctgttgcttcaggttcttaaaatcactcagcactccaacttctaatcaaatttttggagacttaacagcatttgtctgtgtttgaactataaaaagcaccggatcttttccatctaattccgcaaaaattgatcatttgcaaagtcaaaactatagccatatccaaatcttttccccctcccaagagttctcagtgtctacatgtagactattccttttctgtataaagttcactctaggatttcaagtcaccacttattttacattttagtcatgcaaagattcaagtagttttgcaataagtacttatctttatttgtaataatttagtctgctgatcaaaagcattgtcttaatttttgagaactggttttagcatttacaaactaaattccagttaattaattaatagctttatattgcctttcctgctacatttggttttttcccctgtccctttgattacgggctaaggtagggtagagtgggtgtagtgagtgtatataatgtgatttggccctgtgtattatgatattttgttatttttgttgttatattatttacatttcagtagttgttttttgtgtttccattttagtggataaaatttgtattttgaactatgaatggagactaccgccccagcattagtttcacatgatataccctttaaacccgaatcattgttttatttcctgattacacaggtgttgaatggggaaaggggctagtatatcagtaggatatactatgggatgtatatatatcattgctgttagagaaatgaaataaaatggggctgggctcagtggctcacgcctgtaatcccagcactttgggaggctgaggcaggtggatcacgaggtcaggagatcgagaccatcctggctaacacggtgaaaccccgtctctactaaaaaacagaaaattagccgggcgtggtggcgggcgcctgtagtcccagctactcgggaggctgaggcaggagaatggtgtgaacccgggaggcagagcttgcagtgagccgagatctcgccactgcactccagcctgggcaacagagcaagactctgtctcaaaaaaaaaaaaaaaagaaataagaaaatgggaagcaatatttgacatagttctttttagtcaaatctacttgttaaaaaaagggtagcagtttattcatctgtgaaaggaaaataatacttatcttacaaggttgcaagagct

SEQ ID NO: 17298 - DNA, 1161 bp, Homo sapiens
tggagaccagcctggccaacatgctgaaaccctgtctgtacaaaaatacaaaaatagctgggcatggtggcgcatgcctgtagtcccagctactagagcgactgaggcaggagaattgcttgaacctgggaggcggaggttgcagggagccaagatggcgccaccgcactccagcctaggtgatagagtgagactccctctcaaaaacaaaacaaaacaaaaaaattagacaaatgctacattaatgtttgggtggtcagattctactttgaatctgaagtttgcagatatgcctatagatttttggagtttaccactttcttattctgtatcattaatgtaatattttaaattactatatatgttaccatttttctggatttagtaagaaatttgcagttttggtttgatgtaacaagggttttaatgtaatttatgttagattttgcatttttttcattactgttatattttaacctgactgactgatctaattgtattagtattgtgaataatcatgtgaaatgttttgagacagagtactatatttgtgaatataattttatggtttttttcacttagaacctttctgtgtggaaaactaagaaaattgctttctgctgtataatctggcattcattgtagattaaagcttatttttctgtgaataaaacgtattcaataaaatactattctttaaaattatatcatactaccttgtatttgtttcactttcttagaaaaaataaaatcaccctcttaaaaatactgcaatgtaacctcctaaatatatcttatgccattgtacgtaggcgtaaggtacacattaggtcatgccatgttttaaaagaaaagacatcagttttcacattaatgtatggaattctataagtgcatgaaatgtcaatttttaaaatgtatatatatatgaacaatggtaacaccactccctccaaaaagatatgcctggttgtctcaggagatagtatactcactataacagaacttgaacaggcaaatagcaatgaacctaaaaaaccactgcccctttgaggcaggcagcaaggaaggatatttgtgagtttgcggaagcaactgccagtgagtttcagaagctgtgagcaatctggtgggataaagaatgagggaataaagaacctt

SEQ ID NO: 17299 - DNA, 1195 bp, Homo sapiens
gtggatcacctgaggtcaggagtttgagaccagcctggccaacatggtgaaacctcatctctactaaaaatacataaattagccgggcgtggtggtgcatgcctgtagtcctagctacatgggaggctgaggcaggtgaatcatttgaacctgggaggcagaggttgcagtgagccgagatagcaccacttcccaacagcctgggcgagagcgagactccatctccgccacccccccaaatatatataatttattataaatatatatattttatataaaaataataaaaaatttttttcatattaatgttttaatgataattgttaatgtgtaatgatgctacctaacacgtctttcttacagcaagcaaactaaggcagtttcttctctgtcctttcatctatttgacgtcaaaaaatagattgctgtttgagagtttgtagatgatgtcaataaagtttccattcttttgagttaaggctagtatgataattgtctaagaccacattgctctttttaaattttagttacatgagcatgcagcataccttgtggatagcatgtgggactgtgctactgagctgctgaaagactgggaatgtatgaatagcttgttactggaagagccacttagtggagaggaaggtaaggatgtttaattatgatatttttgtttagacagttttgtaagtagatttttactcattccatttatttgtccttttagttttaagacaatttgatagaaaaatcttacttcgtgcatagttttgttttcatataaatattatgctatgtaaaaagatgtaattgctgtcaacattctttatttttttgtatctgggttattttttttacccaaatgtatggatctgtggtggatagatttgggatgctgagggttttaggaaggtgatgttttctgtgataaagtaatgggattttctttagtaccttagggcagattctgtttacaggcagaagaaactgttatgtaataattacaagtggcatatagggagaagaaataagctaactctttctgactttttttttttttttttttttttttagcactaacagataggcaagagagtgctctgattgaaataatgctttgtaccattagacaagcggctgaatgtcatcctcccgtgggaagagggacaggaaaaagggtatgccaatcaatgtc

SEQ ID NO: 17300 - DNA, 1122 bp, Homo sapiens
acatattattgtgcataaatattatttcttttggttcaagtcctataattagaattgctttgtcaaagaagattaaaattcttaagcttttgctatttcatgttaagagttcttgatgtaaagattcaccacttaaacgtaaataacagagcatggttgcctaataatttgctggggttttttttcccctttatatttttatatgctatgttaatatccaattaataccagcaggatagcattctgccaaaactaacctgaagggtttctaatgttaataaaaacctccagtttaaatatacgaagtactgcacttttggtcatttgcatcatgttttagtgttttgcaataaaatacagtgcctcatttattgaacacctgtattttaaatgaaaatgtaatattttaaaagatgttaatctccaggtattaagaactttaacatgctttctttctttccaaacagctttttaatgaaatgatacaagaaaatggctataattttgatagatcatcctctacatttagtggcataaaagaacttgctcgacgttttgctttaacttttggacttgatcagttgaaaacaagagaagccattgccatgctacacaagtaatctccagatattttattcagctctcatattttttagtcatgaaactttatttttaaatctagccctttcatttggaataactaaattaaatttatgctttattattagcttataaatctctaccctatctcctttcttaattttaaagaaccagttacagtgctatctcaattaacaaatgagttgggccaggcttggtgctcatgcctgtaatcccagcactttgggaggctgaggcaggaggatcacttgaggccagtagtttgagaacagcctggccaacatggtgaaacccgtctctactaaaaatagaaaaattagctgggagtgggggtgtgcacctctagtcccagcaactcaggtatgagaatggctcgaaccttggaggcagagggtgcagtgagctgagattgcgccactgcactccagcctgggggacagagcgaggctctgtctcaacaacaacaacaataaaatgagttaggattaaaactccgtttat

SEQ ID NO: 17301 - DNA, 2676 bp, Homo sapiens
atgtgaggtaagtagcatcttgattagtcctgatgttatttcattatatatcatggtcaatttaattttagaattatacatctgaagagaggggaagttttcaaagtggttttattagcatgttatttaacataataaagtattaatgtaatatttatggatatatttaaagaaatgaatgacttttaacgagattttctcccctctctctctctcattaggttcttggagtgtcaatgttttaataccagtacacaattaaatctgtggtgaagtcattttctaagtggaagaggaaattttaaagtgtggtagatacagtgaaattctgtacagatttttctctaaggagaatatgacatgcttatgcttaccaagatcaagtgcattgaggggcagttttgtttgcctgaataaacgtaaaggacaagtaaacaatttgatgataagctacagtttttcttagaaagtaaatattttatttatgcgctgttagttggcttttgaatcgattatttcatgcttttttttaaaaaaaaaaaaaaacaaaataacaatctgaagaggcatttggtacagatatgaattctcttacatttatttactggttgtactaaataatgatgacctctgctggatttctgtttacatccagaaaacaatgttaaggatgtatttattcccctaccctgaagaaagtgtaggatagaattgtttttagcattctaaatttaaatgcttaaaacgtcaatcaacaaaactttgttttaaatattgtaattgtggagaaaagtaaacttataagcagaacttttacaattttttcatctaaaagtattttaagatatttttaaaatccaagagcttctctatacttttcagaaatatccagatgcagtgaactgccagaaggtaaccagtctcaaacatgcttatcccattatcaaccctgaaagtttgcttgtcctttaagataaaaatgtaatgttgtgatattccttccagtaatgccactgtattttgtctccaaataaaagaagcttattgtagtatgtttgcagaaaaattctaaacaaaaattatacagcttattagagtgtgggaatagggatctaaattttaaataaaattatatatatatataaattggtgctgattttataattgcgcagtttgtttagttttttcttacttttaaattccaacttaaaattatgaggtttcagaaatatattgaaagtttaacaatgtttaaaaatagaaaagcatgagtgttcatgctttaaaatgatttttaaatttgtattttatattgttttatctatctgtctttgcaagcagtcttcaggttaaagatacttctaacaggttacagtacatttcctctgtatgtaaattagatgggataatagaattcataacccataatattctttgaaagctaagctttaaacttcattttatgtcctttcacaaataaattagtttaaaacagaaagtggctacttgccattttgacatcaactcattttgcgaggcttaggcagctagacatcgtttaaaacaaaatattaacttatattacatgtgtatctatctattgtcagtcgtctctcagttcttgaggtatattattttaatcattccatgccttaatatgcttgcaatacaagaatatcttcagatgggtgaataccaaaaggctttcagtttttagtcagaaatcaagcattgggctgtggtagccaaaaaccataggttagctaaaaagatcatgatacaattattttattaagtcatggttaataacaaatgaatccagacttgtctaacagattttccatcaacaaatattgttatgtgcaaaagtattgcctatgttgttttacacaccactgcattaactagaactgctgagaggactgtatatatgattttaaacctaagttgattttttttctcactcttgaaaggagtacttctttgtgaaagcagttcttacagctttgttttcaaccagctaaaaatgttttatatattactctaacctgttgtcctccacattctattgtcctaattgtactgttttctgatttgtatttatgtcttgagacagtaactttttgaataaaaataaacctacagtatgttgtatgttttctcttgtactcaaagggggagggtggctataaatggtttgcaaatttatatctattatcacatcttttaatgtgtttggggaataatttatagagaataccatcagtttatatttttaataaatcatatgtatttacaatgaaaccaaatccctaattggattattactttaaaataggaacctgtaaccattattgctttaattttcatctggtatgagttaaacacatttacaaatgtttacattgtttatacagggtacatttgagtgcctactgtgtgctagcatgtgttaagagatctctccttcatagatccattggggaaaacaaaataatgaaacttgtaataaatgccaggaaggaaacaagcaggatatgctgaggtagagaatgagagagagacagtaagagagaaacctgccttaaataaggggctcatggcatggaggtaaaaccatttgaaaaagaatttactaattgaattcttattgaaaactcatcaaagaaagtgtta

SEQ ID NO: 17302 - DNA, 1357 bp, Homo sapiens
tgctaaagtgcttttttgaagtttattctctttcaaaataagttatcatagaatcttgtgcttgtatcaaactcctaattggtcggaacactttaggagtgcaggggttctgcttcattgcattttcagaattaacctgaaagttgaaacaaccatttttttttatttcaaaacttatttaagttgttatcacctgtccttaaatagataaaagaatgtgtattttttcacttgttgccttagtactatcaagacttgtgaatatatttgaatgtatgttgtttgaaaaacttgcacagggcattggagccatcatgaaaagcaggaaatgtaaacgtggaatgtatggcaggctgggcagaatgtatactgatccagggtatagactagatatttttgctgttgctgtttttattataaaatgttatatttgaggatatttaacattttccaattctgcttaagaggtaattcacaataaaaaaaacaaagaccaaaaatagcacattctgaaaaaaagattcttaataagattttattttgtgaagttcaaagattctttcctaaagtataacgtgttgttaaaaagtagtggtgttataactctcaatgtaatagtatgcaatatcaagaacacaggaagttcgtttcaagataggtgagatttaaaataaataggatgaggttgaagaaaagtatattggagcgcagataaatataaattgtggactgctatgaaaacaggttgtacttctccatatgtgagactactggaagtgagaagcaatatttgtcatttctaaaactggccaggctgtgctgacccaggattagtaatttgttatgtctgttttcccttagatgtttgggcactcagatgctatcttggtgcacacacacaacattgctgttcagtcacaaatccgaacaacttaatataataaattgtactaaaagtcatttaagaaataccaaaaagtaagcttttgtttctaaccattgttataaaggctaatataattgttgttatatagcagtaagatatatttgtgtgcatgcgtctccaagtcagttgtaaatgtcttgagaacagagaatacaattgtcatctttatattgcctcatttctccactaatacttagcaaataaaaggcaataagtaaatatgtactggttgaatgcctctggagacctagagtttaaagttttaagtcaataaataaataaatatttactcttaaataatatagaatcctgttgtgttttccccccttttttggtaaactttgccctgatttatttccaggtcaggctattgtgcttatccattcataaacttacccatatgtgatacta

SEQ ID NO: 17303 - DNA, 1145 bp, Homo sapiens
catatttcatcgaatctaagatgccttccattgtaagacacagcattattttatgtaccactgagggaaaatgctgccaggtgtaatttgtcatcagttgtaagttgcatcctgatttcagagatgctaaaatgtgaaagaaatgtgtatcatagaagatatgaaatatggtatgttaaaacctatcataagttttttaaaaaatatatactcataaacaaaattttgcccagaaaacattaagtagttctttaagataagagtacatttataataccatgtgtaagtagatacttgatgactatttttgatgggtattttatgtcttttcataaaaagaaacatctttgaaggttattttacattgggttatatagtttgttgggctatatagaacattaactgtgaatataacatttaagtgaatattcatgttaaaatttttttttaatgcatttacatcctagatttaacattgttgggccatttaaaatgtgcatattggagcagaacattaaatctgtttccattttagtcacagaaaagaaaagcagagtcagctactgagagctctggaaagaaggatgtcaagaaggtgaaatcctaaagcctagaaataaagttttaaatgggaaactgctattttcttgttcccatcttcaaatgctaattgccagttccagtgtattcatggtactctaagaaaaatctctttggttttgatttcttgcatattttatatattttacaatgctttctacctgaaatgtgtagctttatattttatggcattctagtatttttgtgtactgtattttgtgcatttcatgtcttcatcaaaatcctctcagtccttgttcttttgaagcttgtgctgaggttttagcttttctatgttttatatgccgctgctttgaaagagaacctagattctatagttgtattattgttgtttcatactttaaatttatatggctgtggaaaaacgaattaaaatgttttgaggagaaagactttttcacttctttgttgctttcttttctattgagtctgggcttgtttgtgttactgcatactgtgattagcataataattgtttctttgaggtcatctaaatatttttttcctaaaggaataaagggtga

SEQ ID NO: 17304 - DNA, 2619 bp, Homo sapiens
cctacacagaaaaatacttttagacttatattgccaagccaaagttaccatattttggtgtttttgtgttttctctttataaggcaaaaagatctgtatttacactccttcacctagggatgtgtttgttgccctcctacccaattgtcatgattgtccttagtaccctaggcctagattctgagatcttcccattctaggcctacaagcactacttgctgtagctgagacttgtctagagtcctttgttttgcacttttgacccaccccttcctggatcactcctttgcactccactcccctcgttctgtcactttgaacgaagtctgagtgaggctagtgactccttgggtgtcctcaacagtgaattcactgtctgcgtgcagttattacatgcatttgtgcatttctactacaatggcatctttatgtctctgtaacattggccttttcatggctccacactgggtggaaccatattctcttagatcacatttagtagcataactgtagggactattagagatggcatctcatcgatgagagagaatcacaatcagaatggaagcactttgagtatctgaagagtgagagcattcatgtttgacaggtcctgcttcccactatccttttcctgttattattcaaattttacacaaggactaatcctgggtgtctctgagacccatctcctgcctagacatccacctccagagcaacactggccccacagtaaaagaggaagtcttgtacctcaggcaggcccatctagagctattgctccttcccacagcaaaggtattgtggatgacccttagaatccattctctggtcttctgaaataccaagggcagatgtcacctccttcctcagcaggactgactctgggctctacaaccagctccttcacataaagggtttagagactccccttggctcccagtcaccatatccagtgttgtgtaaagagactggccaacaggaccaaccaagcaccttacctctcccatacaagatgaccctctgagcttttcatttattcaagctctgtggtacagcctttttttaaaataaattaatctatattggttgacaaacaagccaccaaccactgactgcaaaactgcctgatgcagttgggttcctcctggttttcttttgttacaaccacccttgcctgtttacattaattgcaaggagcataacgtacaggctgtatgtacaatcctgggcattgactctgtgacatttctagcatatccaaggcaccaccagtgatttctcctgtttcttggtgggggtgggggggaaggtacgtattctgcaatatggctaaaccctttcctgattgagagttaaagcaataggagtcaagttactggtgccacagatctggaggtatgataggtcaggggctaggtgttgaacttagttaatggaagactgagagcagaacaggtttgtcatctccgcaaggccagaaagtgatcacaaaaagaggcagatgatagacactggggtagggtcataccacagggaaatacctttcctgggcttgttttctagcatatcactgacctgggatctttgggtgatcaagggtgtggttagtggaggctctgtgctgcacgtatgcagtatcctatctctttctacatcagatcaaaacactaagttggtgtactgcctcgaccttttttcagctcatcctggaacatatacagagttgagagttttagacaatctctaggtagaggagacaagatgtagacccagacagaagaaatctgcttccctaccatggctattccagcaccccaacctgtaattgccaagtcctctaaggtactaatttgtagctgctctgaagtaaggatttcggattcagctggtagggaaagactctgcacctgctgtcttagggaagaaatggttcaaatccatgtggtgacattgcattagtctccctttcactgttttcttattctgtaattgtttgttatatttcccaaaaacgtcttgatcactaagcaaagctgctagtgggattctatatttcgtgtcatcttttttattataatttattgcaaatttttttctgaataaatatatgttgtgtgaaaaagcaaagtgtgattttggtgaggaagcactcagaagggagggcttatgtgtcactgggttccattcgacttgactgcagtccccatcagctgtgcctgcactgtcatcacctgtcttacagggaaataccatttataagaattcttagtatattcaccctcagagatgagaagaaaccatgcgttttcagaggctaataaaggtgtcctgtactttcagaggccagccaagtacccttattttaaccctaaggattcaggcaacaaaacaactcaattagaggaaaggatgttgattcttaatgcatgtaaatgtcacactaggtcagatctgtgatccctccggccccagaaacaaaccctaagatacacatctggggagaacccagctacccctgctcagtagtctcagtagtttagacgcgcttccccaaagagcttgttttcacataatcctattttgcagcttttgaaaaccagttttgaacttttatga

SEQ ID NO: 17305 - DNA, 1223 bp, Homo sapiens
gaccttccttccagggcttttcctttgggggaggcggagaggggagaagaaggaagggaagggcagaaggaaggagggaagaaaagaaagcaaaggaacagaaggaaggaaagaaagatgggaggaagtgcagcaggaatagcaccctctccccgggaggccctagcttccgtgaggggccatcaccagccattccttggagggggctttctccccttttgcttgagcagggttcccaggagggagaaagagaagacaagagcctgatgcccaactttgtgtgtgtggggacgggggagtcagggccccccaagtcccacaatagccccaatgtttgcctatccacctcccccaagcccctttacctatgctgctgctaacgctgctgctgctgctgctgctgcttaaaggctcatgcttggagtggggactggtcggtgcccagaaagtctcttctgccactgacgcccccatcagggattgggccttctttcccccttcctttctgtgtctcctgcctcatcggcctgccatgacctgcagccaagcccagccccgtggggaaggggagaaagtgggggatggctaagaaagctgggagatagggaacagaagagggtagtgggtgggctaggggggctgccttatttaaagtggttgtttatgattcttatactaatttatacaaagatattaaggccctgttcattaagaaattgttcccttcccctgtgttcaatgtttgtaaagattgttctgtgtaaatatgtctttataataaacagttaaaagctgacagttcgcccttactcttggaggtcatgttcaggaggggcattcctttcccctgggggtcatgggtgtccccatgcccacatattgcacgtgcagggaggtaagtgcctgcatcccaaatcggttctaggtcaactggcctcaaactgatttgccatgagctcacaaaatgaatccctatgcttaatgaccaggtcacataaaatccagcccacttacaggttttctggcatctgtttgggtgtcctaatttttttggcagtgtcatttgaagaatttttttaaagcagtttatttaagaacatactgattaaatgcaggatcgctactaaaaattgttttgtatccttggtgggtgtcttctgctattttatctacttttgaacactttcaggactttttagccagtttgcctttcttgaaaaatg

SEQ ID NO: 17306 - DNA, 1914 bp, Homo sapiens
gggtccacactggtggcacctgcagacacacactggggcattcctccccagctcatcagagaccccagagcttctagaactttccagtcagaccagcctgcccaaccccaggtagtgaataactggaggaatctgagattgggcctctgagctcggccactacaaggcctggaactataagtgatcccttctattcttttgcctcagtctcctcttttgtaagctgaggataagaatgcctgcccagcttactcccattcccgggcctgaaatctacccaccccaccgcccatgaacatcaccatgacatgaaacagccagccaggggaactgcctctgaaaagccccagagaattcctgaagcctgatgatggtgggggacctgtggccatctggactatggtgacagctggagtaccacaacaggggactgggcgtcaccaagacttcacctcttggcagcttggcttagagaggctgtcaccccttctatccttcgcagctccagtacctgaatcgctactaccagaccatccgggagaaggtgggtccagagctgcagaggcgccagctactagaggagttcgagtggcttcaacagcacacagagcccctggccgccagggccccagacaccgcctcctgggcctctgtgttagtggtctccacccttgccatccttggctggagtgtctagaggctccagactctcctgttaaccctccatctagatggggggctcccttgcttagctcccctcaccctgcactgaacataccccaagagcccctgctggcccattgcctagaaacctttgcattcatcctccttctccaagacctatggagaaggtcccaggccccaggaacacagggcttcttggccccagatggcacctccctgcaccccggggttgtataccacaccctgggcccctaatcccaggccccgagataggaaagccagctagtctcttctcttctgtgatctcagtaggcctaacctataacctagcacagactgctacagctgctcccctcccgccaaacaaaaccccaagagagcaatgcccctaccacccaagggtgccatggtcccgggagagcccaaacctatcaccacctgttgggcatagccagagctgttcccacccagccagggcatgaaacatcaaccccccacatgtgaacccatcattcctaaaccctgggtaggctccatgccaagtaacagcagagggagttaagccataggaatttggctgtggagtaagagggaatgcggtgaggcactctggaatatgaccctaccagaggttggagaacaaacttgggcagccggaacccgtcactattctagacttccctggcattcgaggagccctttgaactttccaaagtgcagccacagctacaatgctgttaaatcctcccacattcttggatgccccttcaccttgtgtggacagtgtctggtttctccattttacagacaggaaaactgagcttcagacagggggtgggctttgcctaaggacacacaaatttggttgggagttgatggggccagatgagccagcattccagctctttcacccttcagcaacatgcagagtccctgagcccacctcccagccctctcctcattctctgaacccactgtggtgagaagaatttgctccggccaaattggccgttagccacctgggtccacatcctgctaagacgtttaaaacagcctaacaaagacacttgcctctgggttttgcattgtgtctgctgtgttgccggagactgctgtcacctgtggcttttgtggtgggggaggaagaagagagggtgaggtgggggtggggacatgaggctcctagaagctcagtgggggagcacgtgggcttgagagtatgtgtgtgag

SEQ ID NO: 17307 - DNA, 1233 bp, Homo sapiens
acctccagagcccccagagccaccacaggaggcagctgaagctgagaagtagcctatctatggaagagacttttgtttgtgtttaattagggctatgagagatttcaggtgagaagttaaacctgagacagagagcaagtaagctgtcccttttaactgtttttctttggtctttagtcacccagttgcacactggcattttcttgctgcaagcttttttaaatttctgaactcaaggcagtggcagaagatgtcagtcacctctgataactggaaaaatgggtctcttgggccctggcactggttctccatggcctcagccacagggtccccttggaccccctctcttccctccagatcccagccctcctgcttggggtcactggtctcattctggggctaaaagtttttgagactggctcaaatcctcccaagctgctgcacgtgctgagtccagaggcagtcacagagacctctggccaggggatcctaactgggttcttggggtcttcaggactgaagaggagggagagtggggtcagaagattctcctggccaccaagtgccagcattgcccacaaatccttttaggaatgggacaggtaccttccacttgttgtatttattagtgtagcttctcctttgtctcccatccactctgacacctaagccccactcttttcccattagatatatgtaagtagttgtagtagagataataattgacatttctcgtagactacccagaaacttttttaatacctgtgccattctcaataagaatttatgagatgccagcggcatagcccttcacactctctgtctcatctctcctcctttctcattagccccttttaatttgtttttccttttgactcctgctcccattaggagcaggaatggcagtaataaaagtctgcactttggtcatttcttttcctcagaggaagcctgagtgctcacttaaacactatcccctcagactccctgtgtgaggcctgcagaggccctgaatgcacaaatgggaaaccaaggcacagagaggctctcctctcctctcctctcccccgatgtaccctcaaaaaaaaaaaaatgctaaccagttcttccattaagcctcggctgagtgagggaaagcccagcactgctgccctctcgggtaactcaccctaaggcctcggcccacctctggctatggtaaccacactgggggcttcctccaagccccgctct

SEQ ID NO: 17308 - DNA, 1134 bp, Homo sapiens
gctgccatattgctcactgataagatctaagaatgacctttccccacccttgctaacatggggtatttttattgtttgtaatgttttttaatatgataggtaaaaatggtatctttgtgctttaatttttatttctctgattattagtgaaattggatgttttcatttaatgtatttttagctatttttttaaatgaatgtttttctttgtaatcagaaaaaaaagcctcgaagaaacactttttcttatgtatacaacagaactgcatgcacttagtggagttttatgggcatattctgtgatgttgagtgtctagtctataaaagacagggggcttggggaacctttgaatgcccccattggttttggagaggtggtgagacttttgggctcaagtgatggctagctgtgatattaactgtctttattgatttacagaagctaccaatggtgcggtgccccagggccagcgaccaccgcctcgtatcaagaatttccagataaacaaccagattgtgaaactgaaatactgttacacatgcaagatcttccggcctccccgggcctcccattgcagcatctgtgacaactgtgtgggtgagtaaaactacagggacattgcctagggaaaaggctgagttgaactagaaagtcagggtggtcaccaattttgggaggagggaagatagatttagatgagaaatgaactagatttagatagggaaatttagataggcaacaagctcctgaaaaactgcaaatcagctgtacttgtgtagatcaaatcaaaatttaaatatcctctagcctaaactttacaaaaacctctttagtaaatgagaaaaataaactttacctatttttgaaatttagattttcctgtactggattttcatgtgggacccaccttacatagtgggaggagacacctagtccactggagggcagcattgaggaaggaaggtctgtctaagacgcaacccaagaagaggaaagttgctagcatttattgagtttctactacatattgggcactgtgctaagtgatttacctttctctcatttaagacttgtaacagccccatgagattggtattatccccattttacggatgaggaaataggtgaagcac

SEQ ID NO: 17309 - DNA, 1187 bp, Homo sapiens
ctctgcctccctggttcaagtgattctcctgcctcagcctcctgagtagctggactacaggcacatgccaccatgcccagctaattttttgtatttttagtagagatggggtttcaccgtgttagccaggatggtctcgatctcctgacctcatgatctgcccgcctcggcctcccaaagtgctgggattacaggtgtgagccaccgcacctggccacatgctacttttaattaccaaactccgttgcctgctatgattagtgtactgtctaggagattcaatgtacagaatcttcttttccccgtttgtcctttttataatgtcttatgtggtacctagcacttggtgggtgctcaacaaatgcttaccgaccagacaacgtacaaacctcattttctgacagttttcattcttttttcccccagattctggcagccaggaggtgctgtctgaattgagagtactatctcagaaattgaaggaaaaccatcagtccaggaagcaaaaagcaagttcagaggggactattccccaggtccagagagaggaacctgccccagaagaagaggagcccctgttgctacagagaccagagagagtacagacgctggaagagctagaagagctgggaaaagaagaatgttttcaaaataaggagcttcccagacctgtgttagaagggcagcagtcagagaggaccccaaataatcgccctgatgcccctaaggagaagaaaaagaaggagcaaatgatcgacctacagaacctcctaaccacacaatctccctccgtgaagtctttggcagttcccacaatagaggagctggtgagcagagccagggtggtgggccattgttcagaaagtgtcgttcttgcgcaaggagtaatgaagctttgttttgctgggggcacatttcagtagtttagaggtccagaatagtatagggccaggctagtcccagtgacgttttaatagatgcagatatatgggtgctgccaagacccctatttccgaaagcctgatccacaaaaactcctctggggtgactctaaaactgctctcagaggtaagagggagtaactcagagttctgaccagatcccaggcaggacaacttgaaggtgagtcattgaactgttgcgaaagttttattcagtgggatctcagatggtctaagactccccag

SEQ ID NO: 17310 - DNA, 1233 bp, Homo sapiens
ttccccatccggtagcaccaccacccagcctgcacccgatggggtccctgggcctttggcagatacctcccttgttactgcttctgccaaggtgcttccaactccacagcctctgctgccagcccccagtgggagctcagccccaccgcaccccgccaagatgcccagtggcaccgagcagcaaacagaagggacttccgttaccttctctcctcttaagtcaccgccacagctggaacgagagatggcctctccacctgagtgcagcgagatgccccttgatctgtcctccaagtccaaccgccagaagcttccattgccgaaccagcgcaagacaccccccatgcctgtgttgacccccgtgcacaccagcagcaaggccctcctctccacagtcctgtctaggtctcagcgcacaacccaggctgccggtggcaatgtcacctcctgcctgggctccacttcctcgccctttgtcatctttcccgagatcgtgaggaatggggacccgagcacctgggtgaagaactcaactgcactgatcagcaccattcctggcacctacgtgggagtggccaacccagtgcctgcatccctgctgctgaacaaagaccccaacctgggcctcaaccgtgacccccgccatctccccaagcaggagcccatctccatcattgatcaaggagagcctaagggcactggtgccacgtgtggcaaaaagggcagccaggctggtgctgagggacagccaagcacagtgaaacgatatactccagcccgcattgcccctgggctgccagggtgccaaaccaaggaactctctttgtggaaacccacggggccggcaaatatttatccccggtgttcagtcaatgggaaacctaccagcacccaggtcctgcctgttggctggtccccgtaccaccaggcgtctctgctttccattggcatttccagtgccgggcagctgacccccagtcagggggcgcccatcaggcccaccagcgttgtttcggagttttctggtgtgccatctctcagctccagcgaagccgtgcacggacttcctgaggggcaaccacggcctgggggctccttcgttccagagcaggaccctgttacaaagaacaaaacttgccggattgctgccaagccttatgaagaacaagtcaatcctgtcctcttgaccctcagccctcagactgggaccctggcactgtctgttcagcctag

SEQ ID NO: 17311 - DNA, 2041 bp, Homo sapiens
ggcaggtggcctccagtcagctgctgacccctgccgagaggcctggaggcttggacgacagatcccccccaggctcctctgagactgtggagctggtgcggtacgagccagacctacttcggctcctagggtccgaggtggaattccagtcttgcaacagttgaccgggaaaacagcccctcctcttctttctccttccgagttcgcccttcccccacctccttgtctttccccgaccgagcaccagactgcagaatgaggcaataatacggaccaacaagaagccgccttatcaatgccagcattagcgactggactgtttttgtttttttggttacaattagttctcatctccctgtcgtcgtcattgttatcgtggttgctgatgggggtggaaagttgaactccatgtctgaggacaagaggtcccgggggtggtgggaggtggcgccggggtcccttggactggcctccttgttcatgaccaagaccaaacctgggccctggatggccttggcctgtcccgaggagaaatgagaaaatcccagatctctgagcgccccccaactccattcccctgtgttcttctgtcttctgtagtatttattttattagtatttaatttgtattgtttcattggtttctgataagtctgtatcactgtgacgatttgagacaacttgttgtattgagggactttctgtacctccttttctttttctttgttgatgagctctgacaaagctattccctggtgtttttttcccccactggggagggggtgaggtggaatggggtgggggaacatggacttgtgactaacgaagctggttgctgctggcccagggctgggggcttgggggtaaatcctgaggctttggtgctcccccacccacccattcccgccctttgcagcagccccgctatcttgagattagtgttgacagggaggggaggattgtgaggtgaggggttaataagttactctaataaaggagcgtggagaagggatctgaggggtgagggtggcccccctcctcacgccttcttcactgcccccctcagagtgcacaatacgagtttgttcctgcctccactctcccaccccgttctggcctccctgtctcaagatactgagcctctcacctcccagccctcagccacccccatccctgccccttctgagactcacagcacccctttccttcctctcctcccacctcctccctcagcccctcattctccttgggaatctgcagagggctctgggactcactgccggatgtgaaatccaggcgtcagctgtttcctaggcaagggcaggaaagtggtctccagcccttgctccactcatgcctgggggcctggggctgagtggtatccctacctggcctccccctggcctctgggcctccagcgctgggtttgtcgagtgagagagagagaggagcttgggttgcttccctgtccccgccccctctgtggcattgtccctcccactcttatttttctaccaattgctatttttccgaacaatccttgtagagtatgtaccatccaaaggcaggagggcctcgccgtggccggctctggttggagatggtacagttttattgtacaggtgctaaaacaacaacaacaaaaaagaaaatggaaaaaaaaaagattaaaaaaaaaaggaaaaaaaaaaagccagtttgaggatgggacaatctgttctctagaggctcctgagccatgcgggagcattggtggttattttctttgtattgtgtttgttctttgttcctgggggggaagttctcggcccccttctgtaggactgctccccacccccaccatactgcccagttggttttgaacagttgttttccctttttaagaaaaaaaaatacatatatatatacatatatatatataaagttgaggggttttggactttaatttgttggttttgttggggttcctggtattgtgtagtttatttcatgttctgtttgcctttccttttttcgcatttgggtgtatattctggctgccc

SEQ ID NO: 17312 - DNA, 1110 bp, Homo sapiens
agcttaagcatccctggcatcagactatggccttcaagagcactagggcatatgcttttggcagcataacgggctgacttggtgatggagggaaaaagccttgagccaggcagaagtttgtggccagggtttgtgcagcagctttgtgagaagagcccttctacctggctctatctcactggctgcattccctacacagggaatttactaccctatatgtgaatatccctgtatgtacttgtgtgtacttgttggtctgtatcttagtttctttggggaggacagggctgtagctgtgaggtcttgtctccaagggtgtgtgtatgtctccgtggatcagccacagggatagggattttgtttttaagggaaagcattctctaattccctttgttcatgccgagattcagttgctctgagactatggggtacaagtttgatcctccgaatctggagatgttgtagagctggaacgagtgcagagtaggaacgctttgatgcgcatgcacattggggaagatgcgctcctcagggacacaaaggccgagtggggtaaaaccacgaagggagggaagggaagtcagctctgggagcagccctcactggctggaccaaggtactcttcctggagtttgccgtgttagcaaccacagtcaccttgcagtcaggctggaatcttgggccaccccaaagtgctttgctgaaggatttagacggggatgaagtgccctccagcctcagagctagccacaaagcccccagagctgaattcattgagtatttgtgcctagggcttgggctgtttgtgtgataccggccccccgccagacaatagcctttgctgacaccccagcctacttccccgatcctgggctccctcttgattactttttgacattttccagctgtcaggcatcactgcggctagtccggcagcgacctagatggggtccacccccattcctgctcaagcatgggcacctaccacatggtttctgctgctcagcctgcctgcaactcacctcgaaggcggaccagcctgcctctgtgatgactgcagcagacctccttgggtgtaccaatgcccctcatctcccactttcacaccta

SEQ ID NO: 17313 - DNA, 1192 bp, Homo sapiens
ggacacatgcacacaccctgcacacacatatacctacagtgcgcttgcacacccacaaccaacgcaaatagcgcacctgggtaaatgacaatgcaaaaacatacagaggtcaccccagaaggtatgcacattttgctcattctcgtgtaaggcagagtacgtgacacctacccgcatccaccgtatacagataaacgttgcccagaaaacacacctcacagatgctgactgacccataccaccaatctatccatccatccatccatccatccatccatccatccatccagccatccatccagccatccacccacccacccatccacccattcatcccttcattcattccacaaacacaaattgagtgtctgttacatgccatacatgatgcaaggtgctaaggtttcatcaatgtccaacacagttgttgctgccctcaaggaagcccctgtcttatgggggaggtaaggaaggtacataaaagtagcccaggcagacagcaccagcagtgaactcgcaaacatgaaatcctgatctggaaagaagagatgagcaagcccgaagggaagggctacagcgagtgaccttgggggaagggacacacacaggagtttcatgtttagacaaagtgggattaggtgaaagtgatcacctttaatttgattagtatgagaatgtttcctgggggcaggcagaaggcctgtgggagggcgggagctgctgtggaatgcaagccttggggcgcttaggctgggggggcaggggggacagaccttccaagcataaatggccttgggaggcttcacagaccagtggagaatgggtcgcaggcagggtctggtgggggtggggtggtggtgggaggagtgaacctggggcaagggctgcagtttcccaggcgcctcctcccagtactcagcctctcactcgtccaaagggaaattcagacctgagaggttgagttgagcgacttctcccgactttttgttggggtgggtggaaaggtgtgggggtgagggtgagggtgggggtggggcaaaggcacggccagccctgtgggctaacggaaaggaagtaggagaggcctgggtgtctcctgtgggggagagcggtcatcagggaggtcaccgtggtccccctccctttcctcccctttgcccctctctgaagttcctcatttctttccgggcca

SEQ ID NO: 17314 - DNA, 1254 bp, Homo sapiens
gaggcctcagaaattactattcctcccagcaccccggcagttccacaggctcccgtccagggggaggactacggcaaaggtgtcatcttctacctcagggacaaagtggtcgtggggattgtgctatggaacatctttaaccgaatgccaatagcaaggaaggtaggtgcctgtcataactcttagaggaagatgggaagtacggcttagaaacattcctgtaacttcatcgggtgccctgagatgcattgtcccccggccaggtcaaattgtgcctgagcagaacaaaggtatagccttggctcaggaacattctttttcacttgggacttggctgggtgacctgggagttggcaggctgcttgtttggggttagtagagaactgttcccacaactccctcccagtgtgatatggggactgccccaggtagccccattgtgtgggcatggcctgaacgcaatggagtaagttagggacctattgttactctctctccctcagatcattaaggacggtgagcagcatgaagatctcaatgaagtagccaaactattcaacattcatgaagactgaagccccacagtggaattggcaaacccactgcagcccctgagaggaggtcgaatgggtaaaggagcatttttttattcagcagactttctctgtgtatgagtgtgaatgatcaagtcctttgtgaatattttcaactatgtaggtaaattcttaatgttcacatagtgaaataaattctgattcttctaaattaaattctgttctcttgtcaagggggcaggtgggtgaaggtggaaagccacgcatattagaaagcaagcaaattgcagcaccgaccaagcacaggatttttctcagccatgtattcatgccctactccagacgcaaaactcctttcatttccgaacttccctcacccctccagacctctttgcacacacctgctgtggcctcggcccacaacacttgactcccctcctctcctctcaggaagttcactatctctgaagactttcccagccttccaagcctcatccttgtgtatgtgtctccctgctagcccatgacttcctggaagcagaagccctgatgttaaggccttgctcatggttttatctccagagcttagcacagggtctgcttcatagtaagtgcttcatagatcattgtcgaatgagtgaacaaataaatgtatggaatagactttgtttacctggaacaactcctgtcccagaactgg

SEQ ID NO: 17315 - DNA, 1199 bp, Homo sapiens
actgcacctggcctggaatagatgttttaaaatgagatctcaggccaggcgtggtgactcatgcctgtaatcccagcactttggaaggctgaggcaggcacattgcttgagcccaggagttcaaaaccagcctgcgcaacatggcaacaccccatctctaccaaaaaaaaaaaaaaaatttagccaggcatggtggtgcattcctgtagtcccagctacttgggaggctgaggcgggaggatcatctgagcctggaggtccaggctgtggtgagccatgatcgcaccactgcactccagcccaggcaatagagtgagaccctgtctaaaagaaaaaaaaaaaatttaaatgggttatcagctgtttttgttagtttaagtacaactctggcctgtagatggaaaacatgaattagttaccattacaagtgttctttgagcccccaaagtttatattttgtctttaacttgctttttttttttttatcatgtgttcatgttatgtatttgtttccacaggcaggagatgctgcatgcttctacgatataaagttgggaaggaggcgggtagagcaccatgatcacgctgttgtgagtggaagattggctggagaaaatatgactggagctgctaagccgtactggcatcagtcaatgttctggtaatagtggtgtgccttggagacccaactgattacaactcagtatctctaggaccataacacagagttatggtttggttttattatgagccagttagcttcatacagaagggaaaaaagtccatcttatgtccacacattctaccctcaggtagccatctggcagaagtgtcctgtttagtttttcaccaaactgatccttttgtaaaacattaaaagagaaaaaaattattttaagtgttctgtctggcgtatgttagactaggtgaatgaatggagatggcaccagcacttccggcaaaataggtcagaggccgaggtgggcggatcacgaggccaggagtttgagaccagcctgaccaacatggtgaaaccccgtctctactaaaaatacaaaaattagctggacgtggtggtgcatgcctgtaatcccagctactcggtaggctgaggcaggagaattgcttggacccaggaggtggaggttgcagtgagccgagatcacaccactgcactccggcctgggtgacagagcgag

SEQ ID NO: 17316 - DNA, 1145 bp, Homo sapiens
gccattcttctgcctcagcctccagagtagctgggactacaggcacccgccaccacgcccggctaatttttttttttttttttttgtatttttagtagagacaaggtttcaccatgttaaccaggatggtctcgatctcctgacctcgtgatccgcccacctcggcctcccaaagcgctgggattacaggcgtgagccaccgcgcccggcgataacctgaattttttcatccacactggcctttcaaactttgagtagttgttttgcttaagtctcacaacttttaccagcattctaaagtctgaccaaaagttctcatcaattaaatatgcatttgcaaagttaagttgatttattagacattggaaagtggttggtgttgttagaactactgaaaaatacagactcaaatggttttttccactgcatgtctttgtttgaaggcagtctactgtagaatatattcggacttcctgacatatccatccatctctttgcatacacttgttctttgtcctttggccgtgcaccaaagtatgacatcatctgcctttaaaaatgggtgagggtagtgttaaattttcaaaaagaagttctgatactctcattttaggaattaactctgttttgtggcttgattcctaactgcttttaatctgatttctttttcatgtagtagcatctaccgtgtgtttttgcacaggtgggaaagagcaaggttcgtttatacaccatttctccctccaccttacctttaaacttttttttttttttttttttgaggcggagtctcgctcagtttcccagagtgcagtggcacgatcttggctcactgcaacctctgcctgctgggttcaagcaattctcctgcgtcagcctcccaagtagctgggactacaggcatgcaccaccacgccgggctaattttttgtatttttagtagagacggggtttcaccatgctggccaggctggtctcaaactcctgaccttgtgatccacctgcttcagcctcccaaacctttaaactttaaacctgccttgcaactatctcgttgacatctgtcaccattgtcaggttcatttccattatatgttgcattctgccttaaaaccatgatagctactatttgtttatttacttta

SEQ ID NO: 17317 - DNA, 1149 bp, Homo sapiens
tgcaaaagaatcaggaaggcttcggtatcaagtaactggtgtcctaaaaccaaaaaacaaagtgcgatgccggggctacgctgttgtgagatgctgttatcagttctcgtcaccaacacagcggcagcaccaggcacaaccgccaatcaaagcggccccacgagtccctccttgaacaggttccttaactcgttcagtccaacactgtgccacaaactcgcgaaaaccggctacctagagccagcgtctttgcgagcttgcggccagctagtgcatgcgcaaatcctctcgccgtgcggaccaatcgcaatgcggcagcgagtgctacgcctgcgcagtaggcctccggtcgccgttccccttccccggctctagcaggccggcttctctgtccaatgcccacccggagctgggaggaggagtctgcgtaatgtgcgtgtgaagagactgggggagctggccggggctcacggtgtttgacccgtcggtcgtgcgtgagaggaaagggaaggaggaggtcccgaatagcggtcgccgaaatgttccggtgtggaggcctggcggcgggtgctttgaagcagaagctggtgcccttggtgcggaccgtgtgcgtccgaagcccgaggcagaggaaccggctcccaggtgactgacccattccaggcaacctccaagtccgagggcctggcgccttaggctccctgtgccttgcagccctctacccccgcgtccccgcgagaaacttaacacatagtcacgtgaattccaaattggcagactccgaaccctgagtcttgcaagcggaggaattggctcagccatgccgacctgaccttcaagagatttgaacccagtagtcggcttgaggccttttcccgggagcgtttgctgttcagggatcccagaacaactggctgtcggcgcctccccggcatccccaccccccacccccctttttagagcaatgaggtcaagtagactttgtcatttaccgattgagactttaaacaggacgtttaagccctacgcctaagtttcttgtgtaaatgagggtgttatctgctcagccttccaaaccacagatgagatccatggatttgaatgcccagtgaaacagaaacggtgcagggcaagtaaggagtcggttgg

SEQ ID NO: 17318 - DNA, 1187 bp, Homo sapiens
atgactgaagcaatcaacggtgaatattggtggaactttacgaacggacattgctaatgggcaccgtggtgctgaatgaatacaacatgagctttggcaacacccagatgtaggtttgaatgtgtgactttagaaatgtgacctaaattcactgagcctcagattttaaacctatgaaaaattccaaacattttaaagttaaaaaagaataagatagcaagcataaatgcactcactatgaagtttcaaggtatattgcaagatgtattacaaatacagccgtagcctcatgtgtatccttctccaagcacattgctctctctgcccctaccctgccactctccccagtcccaccacatatactcaaacaattaatgatgaaaactcaaaaagacccagacacatagaaactaaattacttctgaaatggcaagggttggtagagactctccttgcaaggttaattaatatatctgacaaagaaacagcaaaagggcttgtttagggaagtcatggatggtatttctacttttaaaatataaattagaattttctaggaaaatattagatttctagtaggctacatagttttctgaacaagaccaggttagttcatcactgtaatgagggctcagtacagattggctgtatgtgggtgtgatggttaattttacatatcagcttggctgagtcatggtgctcagatatttggttaaatatcattctgaatatttctgtgaaggtgttttttgttttttgtttgtttttttgagaaggaatcttgctctgtagtgcccaggctggagtgcagtggtgcaatcttggctcactgtaacctctgcctcctgggttcaagtgattctcccacctcagtctcccgagtagctgggattacaggtgcccaccaccacggccggctaattttttgaatttttagtagagacagggtttcaccatactggccaggctggtctcgaactccggacctcaaccgcctcggcctccccaggtgctgggattataggcatgagccaccacgcccagccctgtgaaggtgtttttgggtgacactaagatttaaatcagtagactttgagtaaagcagattatcctcctttatgtgggtgcgcctcatccaattagttgaaggccttaaaggaacaaagactgatcatccctgaacaaca

SEQ ID NO: 17319 - DNA, 1166 bp, Homo sapiens
tggctggagcatcaactcggatattgggataccatttgcagttgagcaggttcacatcacttctcaatccatttcctcttcggaaaaatgacaatgataatatctgtccttatctcttttgcttggaggttgtaagaataaatgaaacatggatggaaacagtttgagcataaatacataaatccgaggaattatgactcttcaggaattatttatgtataccagtatttgtgtatttagaaagcccctcccttacccataaacacatgcacacttcaccatcatcatcaaacttaaagagacatgcacacataaatcctcatgttttcaaacatactttttttcctcattggcttttaaaaaatggttactttgaactgtgtagaattggatggacattaatatacttttatctggctatgtatctatttatttattcattaatatagtcaacagatatttattaagttctactatatgccagatactgtaatatgctgggggaaaaatataataatcaagacaggaatgactcttggctcatgagcttatggccaaataaggaagacaacagactctttaaaaagtttaagtactgtaatgggggattgtcagagcatagtagagtacctagcagaaccttagatgtagagggtagaaaaggtagaaatgcttcccacagaagtaatgttcatgctgaggcttttagagaatgagtaattgcaacctagcaaagagaagtggggaagagcattccagtcagagggggcagaatcactgcaaagttgtgcagtaatttggtgtgtatatctatctacacttagatatcaacccatttacaggtagctgtgcctctgcctaaacttggagaaactgcatggcttttcagaccttgtgaattgttggctttgtccctgaatacactgaatggatgaaaccctggcctagcatgaactgcttttgctcgttgattacttttctaactcataaaagtcaagttctcaatcttgaatgttttttagaaccttcttatggttctgagtgttgtttattttggttatcccgactgcagataattgtgtatttgcactgaccatgaatttagatgcttttaacaagtttctgcattttggctgggttagttactctatttagtagagttgtgt

SEQ ID NO: 17320 - DNA, 1143 bp, Homo sapiens
gaaaaattggagggtgtgaaaaatggagaaatttcttataacattttatttgactaccaagtaatcacatttgaagattttcctgtttgcccctgcagtttcaaaatgttaaaatcccataagaacccagaaacacacagcataattattttaaagaacagcttgcagaaattctgcaggaagcaacaatgtatatatgagatcagagttttatgaagacacggtacctggtcccagaagctttctttttcaaatcatctttgacaatcgagattaaaaaaaaaaaagacaaatagatttctttaaattggatcctgctttgttatattcccagctatcctcctttctcaacatggttgaaaaatgtttatcaggggaaaaaaaagaggaacaaagtaagcaggaagtaaaggttaaagagcagttaagaaaaacaagaatttgtaaatgcccaagaccagaaaccggagcccagtgccctggggatttcagtcaaattgctgtcaacaggatctgaaagagatggagttccattgtaaggagagtgccattcattagggctaatcccaactaaaggggatgtgcctgagtacctgagaggaggcagagtcagttgaaagagaatataaaggttatgtctaggagtagtatagaaacttcaaaagcaacaagaagacatgggctgaaaggttgggctctatagtggaagttagagaatggaggaacaagaagggattgttttatcacttaaactagtactaagtaatgtggttattacaaaattgcctgtaacttagcaacccccatttaaaatgtaagctccatgagatgagggcttattgtctgtttgtttactgatactaatatatatatctccagcaccaagagcaatttctggccatagtaggtgctcagtgaacatttgttgaattagtgaatgatagaagtttactatgaggtttcctcctataaaataaagttaatttgtttccctgaactgcctctaattgctgctttggagtgatgaggagtaaaaggtaaagaaggaccttaaacccaagatgtaaatcaaagtaacagtggaaacctggctcagggcaagaatggtttgagggctgcctttagaaagtgttccattcatct

SEQ ID NO: 17321 - DNA, 1154 bp, Homo sapiens
aacccttggcattccatcctctgcttctgtgagtttgactactttagagatgactttaaacaaatgcatacacctttgtagttaacaccataatgaaaacataaactattttcatctcaccagaaagtttctctatatgactgtttccagtcaatctccagtctgcataggcaaccactcttttgacttctatcactataaattagttgtctgttactaagtttcaaatacatgggatcatacactctatgctttctggtctctgacttttttcccttagcatttttattttttagattaacccatgttgttgagcgttatcagtagtatgttcatttttatttttgagtaatgtgccattatatgaattaactacagttggcttatccatttaccagttaatacacatttgtgctttttccaatttttctctgtattatgaataagtctgctatgaacatataagcccttattgctatatattccactctacgcactgctttgccccatctcacaaatttagatatagcctgttgtcatgttaattcagctgagtacttttacatatcctgtggggtttcttctttgacccaaatattatttatattttttagatacttctttgttattgacttattatttaattccattgtgccaaagaagatgttctatatgatttaaatagtttcaaatttactgtgacttgttttatggacttgaatagagtctatcatgaagaatgttccagggactgtaaccttagttccttttggaaataagagttccttagtttgttccaaaagatatataagaatatatatagacgttgaaattatatattcaacgttggaaccactaagttccaaaagaacttagttccttttggaccagtagagcctaaggtcatagtgacagaaagcacaaaatttgcttgtgaatcactaggagtaatagtgaatcaagccactcccatttttacctctaatacttattacagaatccatgaatcctggctgttggagaaataacaccatatgttggacattattttagagcatcctgaaagacattacctctggaagacattgtcacctacctggtactgtagctcaatcttcaaaaagccattccaccattgtagtaaacccgcttct

SEQ ID NO: 17322 - DNA, 1111 bp, Homo sapiens
gtctgtcaagcttgagagctatctggactcttatgttagagccccactaaatagcgacctccctctcaacatacaaggcctactgactaggtctgaacatggagtaaacctcccagggaacctgggtagggagtcaggagaagaaacacgtggcctggtgcccagatttgctgtcctccaagacctcagatgtcaacatgttttttttcctttctctttagacatggatccctgaggtcggtccccaatacgacaagacaatttgatatcataatagaacactgcagaaacaatgctgagtgaagaagagtagaaatgggaagacttggttgagcggaaactgagttcttgaaaagaggagatgcttgatgagggtgagtggattacacctcagtttaatatccagcagaagccaaaagtggaataccattacgcaaatgtagcaaaatgttaggtagccatagtttctggtgtctttgtctcttcttggccttttttttgaaacgtgatgggcgggagaagagctcctggagcaaagttagttggcttttctcgtacaatactgccatcgtgcggaaatagtttcatagcgtccaaagccgtgagcgtttcctgcatgtaagccctagcagttgcggaaggaaaagccacccaagacacaagttggcattcctacccttttctctgaggcctagcataagcaatagacaaatgcaaagtcttagtgaagtatctgctgagtgagggaccaggactaagccaactgtttccaggaactcctggtacaggaaatagaggacagggcctcagtttcctcatagtggggacaagactagaagatgacagagccaagtgcagacccctggggcatttatgttatgaatatgcccttgggagttttaggcaatctggctgtccctgtgttatgcagctgtgacatttatagcagcatcgttagattgcaatggacaggacagttccagggacaatctatctgaagccagtgtcattcacatggtcctcgatacacaaaaattctaaacaccattgcctacaactagagggacctctatagaggagtgaggatacactgacatgcctatgtgggcca

SEQ ID NO: 17323 - DNA, 1646 bp, Homo sapiens
gcttttgtaaattatcaagcttcaaaaagcttttttttttaaaaaaaaacatgcatattctaaaaatgactattggtggggaggtgtaaataagtcataccttcttaaaacagaaaatttaagtaaagtcttttaaatgaaacctgtaaaagtattgactcttctaccaagttggtatgatattccaggcagctcaatgattatcacatttgagaccctgtgtttgaagcatttacaggcaatgtacagcaacagaggtacctcttggtgtatagtatttacattctcttttaggtagaagaggcaattttacccttatttcacatggttagaaatttaaagcaagatcatttacccaaggataggtgtttggtaatgttgaaggagttagtctggcttcatgttttacatcttcaactaaaatcccatactatctgcttggatttggagagccaaaaaataaagctgattgtcatgtgattaaatatctgatcaacaggtatgaatataacttaaatcagcatatttttgccatggtaataaattgtcctataaactatttatatatttttgttcttcataattatcactaataagcatcagtttgttgtttttaaaaggatatttaagtgagcattttctagttcatatgaaaataaccatagtacaggatgatttctgtccacacaaaggttaaattagattgcacagttaattttcacttatatttatggtactattatgtgggtgatgcctttttcttttaagcccagtacatatattatgcctgcctaagttctgaactggggctgtatttcagtagttgtagaattattgatatttagttttgatagctaatgtttaattgtttggatctgcacagtttggtttttgcacaaaagtcatttaaaaaaatctgagtaattgtcaaatattaaaagaaagatattcttcctgtaaggaatacagtttttagtcaaagtggccattacatcctctttttaatttacataatacagatacttgagaaagttgttgtggtgttgtatgccaagaaaattctttttattggtgcctatattgtaacaattatttttaatgcattgtattttgaagtaacggttcagttaaatttttcacctgctgtgtaactgaaacacaattacagtttataatcatctgtagaagtctggagataattttgcaactcatgttatgggttaaatgaatatttttgtaaaagtaaaagcaacaaatttataaattgattatttgaaactttacaacacaattgcatcccaaatacaaattgtattgcttattcattatagctattcgtcctgtaatctgtttctaggtgaagcatactccagtgttttaggggttttgaaaataaatatttaaatttcacagtcctcaatgtttgttttccttgagttgggggtgtggtatgggacttcaaggactcctttgtcctttattgttcaaacactaaaatcgaaatttctgttggaaaccagaagatacttttcacatttcattaagcattaattatagctacaatgaacatctgtcctgatttctaggcctcctgtcttgaccaaattattaataaagtcccctttcacttgaaagtgtcctgggtt

SEQ ID NO: 17324 - DNA, 1171 bp, Homo sapiens
tctttactgaaagtggaaacagagtccaacatattactgatgctacacttgccattgtgaacagagagacagttccatttgacgtcttgcagatcaagggtgaaaaggaacagcctgtgtttgcaatgactggcctttggtggggatccctcagagatgctggcatcaaagttagcaggtactgatatcttgggtctctaaaaatcaaagcagcccactttttcagcactcttaaggagtggcctcagactcatgaaacttctatcttgtatacaggacctacagagagacctgccaatgaaccagaggagacccctgtacgaaggccttctttgtacaggagaatattacggaggcttgcatcttactgggcacaaccacaggatgccctttcccaagaggtgagccgagaggtctggaaagatgtgcagttgtccaccattgaactgtccatcacaacacggaacaatcagcttgaccgaacatgcaaagattttatgaacatctgcattgaagccgacaccgtcagcaaaggaggctttataactataggaagcctaaaggtgagaaaagccaagctggacactgagggcatggagtgtctccaagccagccagtacactttgcttgtccccaagggagcagggagctcttttagcattgacagtgaggagtatgaagcgatgcctgtggaagtgaaactgctccccaggaagctgcagttcttctgtgatcctaggaagaaagaacagatgctggcaagctccacccagtgagcaggcagacgacaagtactccgagaccacattttaggccaccggtgggaccaaaagggaacaggtgcctcaaccatcccaacagtgttctcagaggctctcaagggcattttcatggcaactacccctctgccagcctccagcagtgcttcccaaagtgttctctgtcacctgctttgcaatcagcttctgttagggcatgttttgttttggtgtgacggtcgaccctcctaaacacgggctttcctcaggctggttcaagatgggaaaggactttcttctgttttctcccaaagtgcaaccacagtggaaagcccacagtgggcttagcctgcctaagcccttccattcccattctattctttgattgtactaggaattccaggaaaagtgcc

SEQ ID NO: 17325 - DNA, 2968 bp, Homo sapiens
ataaaactcagaggaaatttgcacagatgctgctttggagaactttacaacctgggttgcagaactgagccttggtaaacctgtctctattacagcatgttgccatacatctatttaagtgcataaggtctttggccttcaagatccatcgaccttaaacaggaatgcttagcacgtttaccatacgtttaaaatccattctttatcaatcagtccttttatagctttctaagttcttattgatggctaatatacaagggttaatttttaatattttaattgatttctttaatcagtttctcgacttgtatttattaaatactcaaactcagtattacctactcaatgccttttaaaagaaagttataatggagaaaaaattgagccttaaacaaatggttacttctgtatattacctcgtaccagtgcttcatcctatttgtaaaatctttctcctttaaaattattggttaatactttgagactttgtttacgtgtggcagtgttgtaaaaagaaactaaagatcacattttacctgtatggatggaatatcccttttcttcaagtgcagtttgtgatgtgttttgtttttttttttttttttttgtaattaacatgttctgaaggttacaattgatatttgaaattgactgtagagcatttagttgaagagttaagcattcagttccattaggttttcacatgtgttaatctcatttacagcattgaattgcggcagtaacattttcctttctgtgaagttctaaatttagttatgacctatttagcaatgcctttgaaaagggatattgtatccatggtaaattaattgtatacctaaacagagatagctcatctttgcctatcaggcttgtaattgacatctagtagacttctgcacatgtaaaattgaattcaaataaaatcatacacactttctagttcttaatatttgtctttctgaataatagtttaaagcaatatttgttaaagttttcttgcactatcacaattgctttttagttatttctcaagaagcatgttcgtattagagacaaaatctgtgtaacaggagggagaatagcgccaagtctctgggctattttttatttttgcaaatgtgctttctaatagccattgccttccatgttgtttacctaatcagcatatttttgtctgaatacttgaacattttaacagtaacgcaggtgtagaatcagaaaggaaacttatgcagagtaatattttggttcagttttaacatcgtgacaatgagggctttttctagcaatgatttttaaattgtgtaagtttgacagtattttattgttgggtttttatttgattttagttgtgtgcttttcatttgcagaagttagtaactgcagctcacctactgcaccaaagttctcgattttaggagcccagctttagtcatttgaacatgcttctaaataaaataaaacaaaaccaaaactatacttttgatctataataagagctcaataactttgtcaaggaaagctctaatatatgcagtgatggtttatgaaagggtgtggcaattttaaatttatattgtgtgtgatgttcaaataaagtggtatctacattcatgtgatttatgggtcagcatgaccattaattactgagtagaaattgactaaactttgatttcctttttttaaatcgtgttgcatttgattcctgagcaaattccctcaaagtgaactcttgttcttaaattttgaattttatggtgagattgtaaagatagaggcaattgaaacattgttccttatttatgaactgcttgaagtgaatacttaatttaagtttgcactttaataccaaacttaaaaccaaacactcatttaaaagtaggttaagtgatcatggatcattgttattagctttgtggctttgtgaaattctaaaggaatcaaataattcatcatgatttaaattttctagagattttgatttttttataatgtttctttcctgtagattgtgttcttgtttctctctctctctctctctctctctctctctctctctctctctctctctctctctcaaaattacagtgttcattgtcattgacctcagcagcaaatttgacttgaattcacttaggatcgcaggaatcaggggaaagtgattttaaaggtggtttctccagcacattttaagaaaagggaccaaaagttattttagcttcctcaatagattgcatgttgcttattaggataataaattaatattaaatgcaatatatgtcttgtctttattatggcatctatttaggagttgttcaaatcactgcagtagggctctgcaaataaaataatgtaacctattatcatggatctaatgtactgtaactttatcagtgaaaggtaaaatctcaaataacaagtacaaacattgaacaattacctataaagatttgtaaaagtaaaatttttccaatagatttcattcttgtcattttgtaagacgaccctgcagtccacctgtttgtaacttttttaataaaatagacatctgtattactgaggttggtttctttaattatttggtgtattgcttcatgttctggatttgctaacttataaatctttctcaaaactgaaaatcattactttttatcaaaatgatcatgtgtattgcagtacatgtttaaacaaagttaaacattcattcgcctgtttccttagttaccattctggcatattttgggggaaaactgagaatgatatagaaattatatattatatattatagaaattatagacaatggctgaaaatgaatgatatgtataacctgatctacatgcagaaagtggccaaatgacaaatttgttcactgggaattgtccatgtataaaatatttcagacaatatatttttttggaggcaatcttgctctgtcactcaggctggagtgcagtggcacaatca

SEQ ID NO: 17326 - DNA, 1096 bp, Homo sapiens
gggatattttggcactgttaacagacagaactggaacaagacccaccacactctcctgactcttccttcaataacctttcaatatttctcactctttctttctttctttttttttccatttcagctgaaattctgaacagcagagttatggagtatcagaatctttccatggaaacctccatatggcctttctatatatattctcgtatgtcttattctaccaacacaacaataagcgtgttgcagtcaatgtattaagcaaagcaaacctgccagccagcaaattcaaataaaaaataaagcattaaaaatcaatggagatgttaaaacaacacaaatagaaaactagtaactaccatccatcctatttgaattatcaagcagaacatgaccataaaatttggtaacttgttacattactctttgtgattttctaataaccatgctaagtgtatttccacagtgagcttttggcttactatatacattcttggtggataaattgttcatctgtttttgaagtgttaccttactattttgtttacaagatagtctattgggttgattcaggatgtaacaaatatattcagtaccatttcttgtgttgtattgtgttgtgctgtgttaggtttttacatactgtagtgttttgctgtatatgtgtggtgtttgatttcaactaaagtgttattagtggggaacagaagtatatgtgcttaagaacatgacaggttcatgcaaatatgctctctttctttagaatatttctgtaggtttcttgggactgacatttaaaacgcctcacttttgaatgtgcacaaaacctgctcattaacatgcatgtgtataatttgtacctgcagatctgatgttgcataatacaatcaaattactagattttttaaagagagaaataattacctgcacaaagcagagaacttcataaaacattaacccctaattcactcttcttaaatagcttggcaaataagactttacctttaaatgaatttctcagcatttatactaaaaattatgtaaagtgctcattagattttttgtgtgtgtggcttgagaatcccatctcctaaattga

SEQ ID NO: 17327 - DNA, 1195 bp, Homo sapiens
cctttcagtacaaccacttttccatgtaattggctcaacactgctatttgcataattgtcatatttttctgcttcccaagagggctgtaaagcgtaaaggtgaactgcaaagctttgacaaagtgcacatttatgtgtgatgtgcaattctcaaattacgaagaaaattatatctttttcattgagtttatcttacacttggaaatgaagtattcagaactcattgccccctgagatgagtttagcctgcttttctttaacttggccaaagtgcaatttcctgagccttgggtcttcaaataatgatgttgccacaggaccttgactgtatgaatgacctaaagcagaggcatttttctttaagccgcggaataacaataagctcttttagttggaatcagagatttcatcacagctgggccatccgttaagctctgagaggtcaaacagatcatttaacctctcaaagcctcagtttgtttaactgtaaaatgggcatgcctttaactcacacatgtattgagtgcttatatgtgaggaagtattttacccagggcttggtgcatagtaagtgttctaataaacacatgatattgcctcgttcctcttcttttatagcaggtggatggcatttaaatgaatgagagggcttgaactttggcacgggaaaagaatggagttgagtcctgcctatgtcacctttttagggagtgggaggatggggttgcagagagctgtgtgaccttgggcaggttacatagcaggagagcctcagtttctgtatctgccaaatgaggatggataatagaatgtgattgtgcatataaacagcatgtaaatgctcagtgttacctgtagttattaacatttcatccttaacagcggtcattatcaggtttaagatatggccctatgaggagttaatgggtgcagcacaccagcgtggcacatatatacatatgtaactaacctgcacattgtgcacatgtaccctaaaacttaaagtataataatttaaaaaaaaaaaaaaagatctggccgtgaaaacttatgttccctccaggtttgctgtgtgttgtcccatcacttttcacattggggagagtggaatgttcaacttcccttcctgtgaatgctcctggaagcctcctgcttacttccccaagtggggactagatttttacaggtttcctaa

SEQ ID NO: 17328 - DNA, 1503 bp, Homo sapiens
gaatcctcttgggcatatatagatgaggctaaacgccaagtcaaatctccagattgatttgcttttaagaaattggcccacatttcctgtgtgtctgctagcaagctcttggcccttggtggtctgagcccaccttgccatgttagttttcttagaggggcactttcattgcctcagaggaactttgtttacctggacttcatctgcgaaaccttgaacaatcctctgcattcaacattacatgactaattccagattttttttttttttttacatctctgtaccttatagtgtggtggtcttgtttcttcaatgagtaagcaatatatgctttaaagtggacttgtagaatttgaaagtattacttgttacttatttgacacaacatcagaaactccatatgaagatgttctgcttctggggaaagatgcatggatcctagggtggtcatatttcattaaaatccaggggatttaataattttgccatcaagcatgtgccaccactattatcataaccttttcctgcctttgaggcagtgaatctgttgtactttgtgcctttgctgtgaacaaatgacttgtactaagaggttttctcacataacataggattgaattttcagtcacacctttaccaataggaatatgcccccttgtatatggggtatggcttcagtatagttgtattaatccaagagcttgttgatgctcttaagcctagggtcctttaaaataggtgagttggattttagtgatgtggggaagttattagtaggtaataccctgtaagaggaaaaccagattccaaagtttggagattgtattcagaacacagtttatctagaaggaggtcttatgagacctgaagattgctaaggtatataggagggaatatcatagattgaattgatcactcttagggaagaaggtgttacagacacaatgagtgattgttcaacttctgtagtacttcagcagctgaaggataaggctggagttgcatttagaggagagtgacagtttggtttctaaatttcagttttttggcctctagagtagtttatgttgagcccagttacatagatatcagaacaggattttggtaagaatgaaggaaagttgttttgttttgaaaggagtgtgaagatgctaataacttgatattttagtacagagtttacatcctggtcatgctgctcttcagcatgtagcacttccaaatgcagggcaaaatgaaatgtgaagaagatggtaggggtatccatgacagggaggatcatggctgcaatccattgttgccctgtgagaagaaattctgaatgcactatgaatgcttgtatagtatctacatggtatgttttcaaataaaagattaaaagttgttaagtgactcagtgactattatgtatataaatttgttctcttaatttatgggtcaagttttcaagtaatccatggaaataaaagtttgactttcagtgtgttcatttcctattgcttc

SEQ ID NO: 17329 - DNA, 2564 bp, Homo sapiens
actttgctttttaaatgaatggacaacaatgtacagtttttactatgtggccactggtttaagaagtgctgactttgttttctcattcagttttgggaggaaaagggactgtgcattgagttggttcctgctcccccaaaccatgttaaacgtggctaacagtgtaggtacagaactatagttagttgtgcatttgtgattttatcactctattatttgtttgtatgtttttttctcatttcgtttgtgggtttttttttccaactgtgatctcgccttgtttcttacaagcaaaccagggtcccttcttggcacgtaacatgtacgtatttctgaaatattaaatagctgtacagaagcaggttttatttatcatgttatcttattaaaagaaaaagcccaaaaagcagtaaaatttccatttctccctgttattttagttgccttatctggagagacgtggaggtgattttcttttttttaaattattattaagacagaatgtgagggcacaagcaggcttctgagccacttgtcagattgtattcaaagcatcaatccaagaaggaggttatgtgtacttcatttattggtgatagttggaagagactgcagactactgctttgaatgagttgaattacataagctaagatcactataggtccatttcttgaacccacttatacataaaatgtaacccatttagaaaaagattctggatatcatcccccttgaaagatagaaagcattcaggatgtcccagttatcacatgttcacacttgggtttaggggtgtttttttttaaaaccaggcaggttagctagcccaccctgtgctagttttcatgttcacactgaccctatttgaattaatatcctttgttagagtggtcgagatttcaaacccaattatgtacagggagctgtctgagagctagccagaactggggtacagcctgggctcagggaatagctgtcaacactcgggcaaagtttttgtctgtgcatgtgtatctccatttgttttgggatcccagtttttgttttaagagagtataaggtgtctcatttgagtctttttcttacctagccccctcttatcagtaaaacaaaggacttgccatggttcacagcaatgtgctacgatccaagatatcagccaaggagcccacttaggggagaactaggtgtccagatttttgtatgtgttgtttttcttgggggatggggtggggtgggagtaggtagagctgagaatactacatcttagtggtgacctttagccacgtgggtgaagtggcaaaggccatggccatatctgttgtcccaggccaaagactaacaactgccttgggaatcccttccttgtgtccttaccaaatgatagctcataaaactctgataatgtaacaaatcactttcaaaggagttcccagaagtcttcagaaagactaaaattctgtctcttcctgctttagacagccattaagatcccaactaattttaccgaacctaaaacccacaaagaggttgtttgtgttattgttcaatcttcagttgtaagagtaattctctatttttatattgaaacataattacttgatagctcagggtctacatttcattcaactttttacaccaaattctgcagagtggtcaaaatggaatattgggggctgttgtaaacagaggcttaattttattagaagtagccagttatttattaaagcatgatgttaataaaataggcatattctggctggtgtgtataagtggttttttttttaaaacaaatcagaagacataaaattgaaaaggcactccatttatatataagggaaaatagattgtaaatagctaaggggccttgtgagaacttggaaaatgtgctgatacttagtaactacctcagttgtgaggaatttcctttttagcttagactgctattacttttacttggtagaaatgaatctggtctccaaaatatggctcagagagttatccccatagaccttgttagattgtttttaatttaaaaccttgaactctgcccagctgttttcttccagtcaaattctctaaaccaataacattttccaaattaagtattcttgaaggttcttctgaactcttactgatttgttttctttctttgcattttttcctgttactcttttattatttaaattgtctcttgcttttgaacttcaactatgaaataaacaaatcatagatttttccattcaggtctgactggataactcttggcttctaagcagctggcaagctcacccccactccccaaaaaagaagaaaggcaagttgaatattttaaaaccttaagagtttggagtatgaagtagaataaaagccttgttaggagaagacctgacttttccaaagttaacagcatgtgaagggcttgtgttttacaaagtcatttataaattatttttctttaaaacacatcacctactctgtaccttaaagattttacaactcttagatttatattttatttcaaaaatcgtaactagcacctgttattttgattaaaagacac

SEQ ID NO: 17330 - DNA, 1196 bp, Homo sapiens
cctctctcagacacctatgtaagtgactttgtgacacagctttcctttcattggcaaatgatctgagatgccacattccccaaaagaaattcaccctatatacaaacacgttttccaatttaattgtgttttttttccagttttcaaatttactggaaaagcagttatttaaacactgaaaactctcgtttttcctttttttttttttttttttggtgttggtttcagaattcttcaaagaactacttgaaaatgcagagaaatccctgaatgatatgtttgtgaagacatatggccatttatacatgcaaaattctgagctatttaaagatctcttcgtagagttgaaacgttactacgtggtgggaaatgtgaacctggaagaaatgctaaatgacttctgggctcgcctcctggagcggatgttccgcctggtgaactcccagtaccactttacagatgagtatctggaatgtgtgagcaagtatacggagcagctgaagcccttcggagatgtccctcgcaaattgaagctccaggttactcgtgcttttgtagcagcccgtactttcgctcaaggcttagcggttgcgggagatgtcgtgagcaaggtctccgtggtaagtactccttgtcttctctgttttgtttttgttttgttttctttcatgttaaaagaatgtttgggaaaggtagaaaaataaatcaccaaaattctgttggttcaatggcagccttttcttcctctcttacctcttctctcccacacactgtccttacacgtgtacattttagagttactaaacaatactgtgatcagaatcttcacctatcattattattgtggggtttttttgtagctattcttagaagggggaatatatgtttactcaggaatcttaatttttaaagtaggttaatactgccatacccattttagctcttattctacttcctttctgcacaaacaaacatacacacacaggctccacatttggttgttttgtgtgactgtcagcctactagtcatagtctaggaaagcatttaatctctgtgagcatatgtttccttgttagaaagtgtactcagagctctttggaagacaggtttctacgacaattagtgtggactacactgctgttgactcatgactctgcagaattaccaatacagaaagtgaaattgtagtatgtga

SEQ ID NO: 17331 - DNA, 1511 bp, Homo sapiens
gccttcaaaataaaccattttgggtgcttaaagtagaaatattcaagttaaaaaaaaaaacttaattagttgctcaagtcttcaaagattttttaccagaacatggagctataatttcattttcaaatgtacccagacttgtcctccttttcctccctgtgcttctcattagcactaactagttgtggcaccgaatccccagtagcccaagaatgtcttggggtttaattcacaagtgtgtcttggactacgtgtgtcacagggcttttggcaagaatgtcaaattacattttcaagtaacgctttttagaaatgcagacaggataagtggtgcattcggggctatatggcccaaagtgtgaactttgcactgaggggcagacgactttgccagcagaaacattagccaagtatctaccctgttgttgtcctttacataaggcaagcctttcaccattagacaaaatcttcccggaaagatctctctgagatgaaagtgcactatttttttctttttaaaattagatattgcaggccgggcatggtggctcgcgcctgtaatcccagcactttgggaggccgaggcgggtggatcacctgaggtcaggagttcgagaccagcctagccaacatggtgaaaccctgtctttactaaaagtacaaaaattagccaggcatggtggtgcacgcctgtaatcccagttacttgggaggctgaggcacgagaatcccttgaacccaggaggcggaggttgcattgagccgagatcacgacactgcactccagcctgggcagtagagtgagactctgtctcaaaaaaaaaaaaaaaaaaaaaatagtgccaaaacaaagacgtgccccagtgttccagtatcagcaagtctcgataaggttctgcttgagggtcactggtggagatgagatgggtggagtgcatgggccactctgggccttttatgtgtggcagtgtaaatggtgccatccactcggaccaggttactaggaaaacttttattgctgctacccgtttttgaagggtgtatccttagtataaattccctgtgggtgagtttaaacctgtcaacatctagcaccttcttcaacagagaaaattattatttcctgctgtctcttagtattttcttgctttgaggtgtatgtgtgtgtgtacgcatgtgtttgtgcatgtacccatgtacactgggggcagggaaaaatgatgggtacttttctgtgaacttagaaacctattttgataggatccagtaagtgaccctttattaggtgtgaaccctgttaacattaggtgagtatagtttattttccaaactgacaagttattttgccttgaaaattcatgcataccacaatggaatctttgcaggtgcttgaaaaaacagcctatcctatgatgaattttagcttatagcaatctttaaaaattttatttaaagtctttattatgaagtaattcatttaaatcaccctatgtgggttctcattctgagca

SEQ ID NO: 17332 - DNA, 1156 bp, Homo sapiens
agtggtccagacacatgctcgagctgtgcatagtgttatactgaggctatgggtagacttgcatttcaaatccttctcttttgattgacagaactggcctatgatctggatgtggatgatgcgcctggaaacagtcagcaggcaactccgaaggacaacgagataagcacctttcacaacctcgggaacgttcattccccgctgaagcttctcaccagcatggccatctcggtggtgtgcttcttcttcctggtgcactgactgcctggtgcccagcacatgtgctgccctacagcaccctgtggtcttcctcgataaagggaaccactttcttatttttttctatttttttttttttgttatcctgtatacctcctccagccatgaagtagaggactaaccatgtgttatgttttcgaaaatcaaatggtatcttttggaggaagatacattttagtggtagcatatagattgtccttttgcaaagaaagaaaaaaaaccatcaagttgtgccaaattattctcctatgtttggctgctagaacatggttaccatgtctttctctctcactccctccctttctatcgttctctctttgcatggatttctttgaaaaaaaataaattgctcaaataaaaatgtattggccctttttttgcaaaccgtcgtctatggtgactgcgcaatgctttttttttccttctcactaaactttctatccaacatattcttatcaggccccaacaggttccttgaaacccacctccctgccttccttctgggtggaaatcaatcctgactccaagaaccaataagaaagagccactccctcgcaatccacaatcttcatttcgaaaccttgggttggagtatcttgtctatgaaaccgaagtatctcaaaagagttacctggtctggtctctctttacaacttttactttgccaaaaatgctttgcccaaataggaatcctctatgtaaatcaggtacagttacaccattcatcttctcccttctcccaaatcaagacaggtgagcccaaacagtgcaaagaaatcactccccagcttctttgctgctgtctcaggcttgctgttgcctctctccacaggggctgccacatggcatgggcagccgttgctttgggtcaggttgc

SEQ ID NO: 17333 - DNA, 1153 bp, Homo sapiens
tacagtgttaatttacataaatgcacagtaaaataaagcaaaggtgaaaagagctgagatttgtaaatgtgcttaataaagacagaaacaattagcttcttctttatttatgcacatatctaaataaaaatgtctttctcctccctggctgtctgaggatagacagccatcatgaacgacacggtaactatccaaactacaaagttcatgaccaaccgactacttcaggggaaacaaatggtcattgatgtccttgaccccaggaaggcaacagtgcctaagacagaaatttagagtgcctaagacaggaaaaactagccaaaatgtacaagaccacaccagatgtcatctttgtatttggattcagaactcattttggtggtggcaagacaactggctttggcatgatttatgattccctggattatgcaaagaaaaatgaacccaaacatagacttgcaagacatggcctgtatgagaagaaaaagacctcaagaaagcaacgaaaggaatgcaagaacccaataaagaaagtcagggggaccgcaaaggccaatgttggtgctggcaaaaagtcgaagaagtaaagggctgcaatatgttatctgcggccattgtggatttttcatgagaggatttataaactaaaaactttcatgtgaaaaaaatgtctttcataattgtttgcatagcagtactacttcagagccaatgttaagctacgagggtgctagaaacagatatatccactttactccaagaagtacctgtgttctccaacaacagcctttcagaaattacaagtagatttcagtagagaggaagcaaaatctaggaaagaaacccagggcatgtaaatctgtttctctttctttttcttttctttttttattatactttaagtgtgcaggtttgttacatatgtatacatgtgccatattggtttgctgcacccattaacttgtcatttacattaggtatttctcctaatgctatccttcccccattcccccatcccacgccaggccccggtgtgtgatgttccctgccctgtgtccaagtgttctcattgttcaattcccacctatgagtgagaacatgcggtgtttggtgatataaacctatttctatatttccgttagtagccattagc

SEQ ID NO: 17334 - DNA, 1246 bp, Homo sapiens
taatcaccacagcaatagagaagtctcaaattcattttcacactggattttcatgctttaatttgtacacatttttgtgtctcttttttttttttttttacagaggcctttgaaattgttgttcgccatgccaagaactacaccaatgccatgttcaagaacaactacccaagcctgactccacaagcttttgagtttgtgggtgaatttttcacagatgtgtctctctacatcttgggttctgacatcaatgtagatgacatggtcaatgaattgtttgacagcctgtttccagtcatctatacccagctaatgaacccaggcctgcctgattcagccttggacatcaatgagtgcctccgaggagcaagacgtgacctgaaagtatttgggaatttccccaagcttattatgacccaggtttccaagtcactgcaagtcactaggatcttccttcaggctctgaatcttggaattgaagtgatcaacacaactgatcacctgaagttcagtaaggactgtggccgaatgctcaccagaatgtggtactgctcttactgccagggactgatgatggttaaaccctgtggcggttactgcaatgtggtcatgcaaggctgtatggcaggtgtggtggagattgacaagtactggagagaatacattctgtcccttgaagaacttgtgaatggcatgtacagaatctatgacatggagaacgtactgcttggtctcttttcaacaatccatgattctatccagtatgtccagaagaatgcaggaaagctgaccaccactgtgagtaccagtctacagttgtcagaggatttgggccttattggggtgaggtggccagtagcaggtactgatggagagaaatgagaacaaaattggaaggtggggaaggggtgatgatggactgaatgacctcacagagttaggcagcatattaagaccacaggctatgcaatcgtaaagcctggctccacctacttccttactgtgcgatgttgggaagtcattttatctttatgagttcatttttctgattcatgaaatagaaataaaaagaatatcgtcttcatagggaatgacatttgttaaagcacttagcacgtgtctggtatgtggtaagtcttcgataaatgttggctattattagcattattgtcagttatcataatcctcattattgatacacaatagatgacaagcctgtgaagtgggagctattatcttcatttta

SEQ ID NO: 17335 - DNA, 1159 bp, Homo sapiens
tagaatacttagtcacgtatgactttttaccactgatgcaaaatcaatttggcaatttataatcttacatttcattatgaaagtatattattctacaagaaagctgctggaaaaatgagatatttctgaagcccattcactcctctcctgcttaagtagtcataaaagaataaaaccaatcatgttatctgatgttttgagaattctaggtagttttttatttatatgatttttttaaaaagatatacgaagtatacagtttctaaccctggatacaattttgaatgttggataaaattgtggacattaaaaagtaaaaattttgattaaagagctcactttttcacctacgtttttcaattttgtagtgtgtggacagaaagaaaactttgcttaagtatgccagagggtgggcttttttagtgtcctatatttgaggttttgagctccagctctcctcaaagggatagagcagctggttattcatatttaataccatcacatttttcaattttggtgtttggaaattctgagttatagaatgatgaaccagcagtatttgagaggtggtggggaaacagaaaaaggaagagttggagacttttattgttattactgtaattttttaaaaaaatatcttccctttttctctctaggacaaatgtaacactgctttttgaaaaaccaatgacagtcataaaacacacatgacagatccttagttttaggtgctcattagtacagtaggggacagatctgttcttatactctcatatagcaaacaagaacataattaacattgactgtatagccctttacttctgctatgagctcagtgaggattttctttaactgcattaacactggaccatttaaacttgaggttttcatctttttcagtttaagtcatggttacagagttggcaggggtatctactatattaatttagattcagttgggatcaagtatgtctaatttacatatgatacaaggactgtgggccactcaggcatttgcctgcctccattgtttcaggtaattccactgtcattggtgtatctcctatttgtatattctttctcagactccagtctgaacacatggaacacattgaacaaaaagagaaacacagagcaggaattgactaattgaaatgag

SEQ ID NO: 17336 - DNA, 1153 bp, Homo sapiens
tgcagtagttatgccagagcgccctgtgtagagcggctgcgagcgggcagctgggctcggctgccgggagccaccgcgcgggctccgcaccctcctctcgcactgccttcgcccggtccccgcgccgcggtgccccagtggcccccgccgcgctccacgccgcgcccccgcaccccgccggctaccggccgcacaaccgccaccgccccctggccgcgcggctcgcctcgccccgccccgtccctcctcgccccgccccaccccagtcagccccgccctgccccgcgccgccaagcggttcccgccctcgcccagcgcccaggtagctgcgaggaaacttttgcagcggctgggtagcagcacgtctcttgctcctcagggccactgccaggcttgccgagtcctgggactgctctcgctccggctgccactctcccgcgctctcctagctccctgcgaagcaggatggccgggaccgtgcgcaccgcgtgcttggtggtggcgatgctgctcagcttggacttcccgggacaggcgcagcccccgccgccgccgccggacgccacctgtcaccaagtccgctccttcttccagagactgcagcccggactcaagtgggtgccagaaactcccgtgccaggtgaggaggggtcccttgagcgtgcctagcgcccagcggggagcaaggcgcgcgtggtggctgtaccctgagcgcgctagccccgccgggctgtagtcgtgcgccctgcagctgggcacttgggagtggtcggtgtgcctggggcctggctgggtctactgagggagggagagagggtgtgtgtggacggagcccacatcccccagtctcacgctgctgtcagggaaggtgtgagcgggaggaaccgtggggatcgccttctcgtgagcgcccgttttttggaagggcgagaaggtgggagctattttcccgggtctctgcgaactggcgccccacagccgagctggtgcctcatgaatttgccatccttgctcgcacatacgtgtcagaatttcagccttagctggaccacagctccagccatcccttccccaacgtacccccaccccccgccgcctttacccagcctgggtttcctaagctcacgggcccaagtgcaagcaaagttgagga

SEQ ID NO: 17337 - DNA, 3414 bp, Homo sapiens
tgaataagacatccataactactattcttttttcactgttttctaaaatcaaaaagggtttgtaactttttactgcccaactcttagatccttcattgaactgcctaaaaatgtcttgtttgttttatgagccctcactagaaggctgagtttgacatgttgatattacgtagctatagtttgcagtttctgggaagcaattgaaacactattaaccctgtgtatagtgtcaacagttaaagcagacgaaacgaagtaagctatatttctggactgaacaaagctctgctgtttagagcatttaagtttgtttagtggatccatactcaaaggaaagcataagcaaattttcctttacaatgcaaacatgccactggtggcagcacatggtaatttgtggatttttttttcatactcaagtaatggaggctagaaatgaagagaaccttctttttctcttgactttgacagcacatgctaaaaatctcttccaagaagtatgctaaagcttttcatttggttcctgttaaagttgttctcactgaccagcatggactcaggcaactggtaatgataagctatgagctccagtgcttttgccaaaattctcttgacagcacacctcctctctttccatgttatacaaaggacttctggcaaaatgattgagtccttcaagtttaaactaacatttggcaacagcaaattaaacgtttttaagatgtaaagaaagggttaccgcttgctaaggacttcagacaccatgtccgaaacctgttcctctcaagtgccctgttgtgtggaacacttcacatattggcgcacagtacgtaaggaggtctcatgtgctgtaggagtaaaaaagtctttgcataaaacagtatttatttttacttttgtgaccactattttagaaactttatttaatattttaatgttttcagtcattgctttggttatctataaaataggcttttgtgccctacttttcttcttgtagggcttggtggtgttttatcgattgtcagaattgtttttgaaagcctaagaacccagctttttagaaaggattttcacactggcatttctaggtagtgatattttcttccacttacctgctgaagcacatttatgcatttctttatggcaaaaccaaataactttagttgtggtctgcctgatactaccatagcacctcagtaccaaggggagggattttgactagttgaattattaagccaccacaataaagcagatttttaaataagaaataataatgttaacttgactgtacattgagatattctgcagctgatagagcagcattttaaaaatgtaacaggtggaaaattacactgtgcttaatgactgatttttttttaaactgcgagtcccttaagatcacgtttgtcaagtgtgtattcacacatttacttaaatcaagggactcaatgcttgcttttattttaaccatcttttactatttttagaaggaaactagctttagtagtgggttgccctgtatgttttctctttttgctcttaatatgccattgggtttttgtgtgtatgtgattttcaaaattcatgacttgaagtgcaaggacagatctagatgtttgtttaccaagctatgtgacttctcccaaaggatctgtactttctttccttacaacagcttgaaaatcattattttaaaatccttaaatcactgtgtctagatcattttttacattgtgtgccatagacttacccatgggacaacagagctccttcatttttggacaactactgtaatcattttttttttaggaaaaatggaaggtgccgggggtaatcatggccagtcaataattatataaaggagttcaaatactatagctgtcagttgatgaatttgttatgtagtaaaatgtatgactttgtatgggtttcttcagccctttttctgccactagcaaccagaatagcactttaccttttggttggctagataagtggctgactacctgtttttctcactgtggtgtgattggctaaacaatctcgcattaaaaattcaaatgtaaattgaattcacatgaaaaatcatgtttggttgtaaacctccaatgttttgattctctaatcatgttttcgtcacatgctgagtaaaagtgccttacaatgtaaaaattgtacagtacttatgttcccaagtagcatcatcatcttctgggtagtaattacattgtggtattaatatttagaaaaatggacctcagcagtgtatttactgtacatctcttaagtccttaactgtagttttaataagcatgacattatttgataagtatataacatttacatcatttcaaaaaatactgccgttactgtcttttatgcatattttagcctgaaattttgaagcgtcttttttctttcttttttctttttttgttttgttttttgttattgatattaaacagtgtaatctttgcaagcgtatattgaagattattctggagcatttattgccttaccagaaatgttagtaggaaatgttctttagagtagaaagatagacttgagtttctatacttttaagaagagctctttgttcctgggggaggggggcagggggtgaattttactttcatctcaagttattaaaaacccacaactgaagtaaattttatttcaagaatcagcagttttagaatttcagatagtacttgctcagaagtacatgctactcaagatattaagagataacaagatctgtagatctgctattgaatcagaatctgtgtacttgaacaaatgtgtgaatctcaaatatctcaaagcaaaagaaaaagtgttctagagtgttgttgcttttttaaaaaaagcgctgaagttagaccaaggtatacagttttgttctaacagacatttaggttaattgtaaagataaggaatgcattatgggtcaaaaatcaaacattcctctcatgttatgtatattttgttcctgttatattggctttattttcaaaattgtagtttgtagtattagtttccttttattggtattcttgcatatactattcattcaataaatgacttatgactttcatatttgtttgtcttttttgtgaaagtgtatactgaagcttatttgataacagcaatagtattgtgttccttttagtcttgctttatttcagagtaaaatgccttaataacttttcattaaacaagtatgggaggaaaaaaagtgtgaatttgaattcagttcaaagtttcacaatataaaagttttatcatggagagaaactgcaatcttgtaagtacaatcgaactgcattacatcttggtttttttattacatggttcagatgcccatcgtttaaatcagatcctctgaaacctagttagaaggttattttg

SEQ ID NO: 17338 - DNA, 1428 bp, Homo sapiens
gggaggctgaggcaggagaatggcgtgaacccgggaggcagagcttgcagtgagcagagatcgtgccactgcactccagtctgggtgacagagcaagactccgtctcaaaaaaaaaaacaaaaacaagaaacaaattaaactaatgtgatagactactgctttgttttcaaaagatacactccccaaaagttactgatctaaaatacagtagtactatctctgtttagtaagaaccctgacaactaatagtgttcttatatgtaaaatgctattcttgcctttcatttcagaatatactttttaaatgtgaatttctggatttttttttatagcatgtttgtgtcattagtgaaactggaaaagcaaaatacaaagcctaagatgagagttcaagttgagtttggaaacatctggagtcctattgacatcgccagtaaaattatcaatgttctagttctgtggccatctgcttagtagagctttttgcatgtatcttctaagaattttatctgttttgtactttagaaatgtcagttgctgcattcctaaactgtttatttgcactatgagcctatagactatcagttccctttgggcggattgttgtttaacttgtaaatgaaaaaattctcttaaaccacagcactattgagtgaaacattgaactcatatctgtaagaaataaagagaagatatattagttttttaattggtattttaatttttatatatgcaggaaagaatagaagtgattgaatattgttaattataccaccgtgtgttagaaaagtaagaagcagtcaattttcacatcaaagacagcatctaagaagttttgttctgtcctggaattattttagtagtgtttcagtaatgttgactgtattttccaacttgttcaaattattaccagtgaatctttgtcagcagttcccttttaaatgcaaatcaataaattcccaaaaatttaactgctttatgaattcaatttaaaaatccttaaaataagtcctgtctctttaaaaaaacctatgcatagttatcatttctctacaaattaacctagtttagttttctgttggttccattttccttgtttgttaagttttagtagctagtttaattgtaatctcaatgattatgtggtagaatgggttggcggagctacaaaaattcctagctacttcagagacattaaatttcagacacatggtacactttatattacattttactatgctaaaataacacggctttcttttggaattctgttcagtttttcagattgtaatctcagctacatctcaacagattgttctcagatatgtcctattaccttctttgtgtagatagtgctttattgactaagaacaatgacaacaacaccttttgttttctgggaataggagaaaagttttaagccaaaa

SEQ ID NO: 17339 - DNA, 1131 bp, Homo sapiens
ggtgacatgcgattttttaaaaagggacttggtggctggcgtctttcccgactgtaacgtgggttacggcaggcagaaaaacatctggtgataattctgaaaaaagtgctgtggcgtttgggggggttgtaaagcacgttttgcgggcgggatgggggcaaatctgacatttaaagtgtttaacaaatgagtgcggccgggaaattctcaggaaacggactgggaaaaaaaaaacaacaactaacatggaggggcggggagagaaaactgagtaaggggcagtgaccgactgtcagcctcgctagggtcgggagcgactggttttgacagaatgtaaatgaacttttcctcttatttgcaagaagttagttatgtcttggaaagaaatgtgtgattaatttcacattgtctctcccgaattaaaactttaaaggttgtttagttttccccgtagggacttgacattgtggaagtttggctagaatgcgccgagagaaggtacatcgtgtgtttggggtgtgggggacgaaggcatatgcaaaattaaaagacaaaacgttgtagagtatgaacagaggaagaggcgtattctttggctcttaaatcatttagccaaacacattgcagttcagaagggggtggggctatggcaactcgaaagtatcgattctttgtctattgtatcagtgaatgaccctctcctgaagtgacaagacgcccctttgtaatctcttttcgtaagtaaatttcagtctaaggggaaatatgtaaactaggggatcgaggtggctttttaggggtgtaactcgttgtactatcactgggagagatgaaaggggttagggtgaaaggtataaatgaatttgattccaagagcaatctggaagggaccttcgcctttgacaccgatgctgtttcgaatgaacttttgtttttctaagtagtcaactaaggaaatgttaaattaggcatgactttaacttctgacatgatggctcgtatatttgtgtggaacaaaatgttgggagaaagttgtggagttttacatgataattgtacatttgctaaacatgttttttttttctttttaagggcagtcaacgacatttttctccattaatcccaaagtca

SEQ ID NO: 17340 - DNA, 3469 bp, Homo sapiens
ttgatggttggggaacagtgagcccccaggctggatagggaaggaatccctgggctgggtatagaggttcttgatgtccagatctggagttttactggaaggataggaacaggagccagttgtcaggataaagaggcaatagacaacgggtattgagaccacaagtgtagattattcattgtagaagcttaactggagaataactgaagggatcaaagaaagggactcttctagaaatagacctttgggttttgaaagcaagaagaaaggaaatagtgtaaggaattataaatggcatagaattggagggggaaatcatttaaaaaatgtgtttgaattgaaggccctttgggaatggggaagtgataactctaggggagttgaaagactttgttttagagtagaggaactatgaggcagtgtacttgatcgaacacctctgatagtccgagtatggttacctcaataagtaaccattcctcttgctccaagcctgatgggaaggtaaacataagaatagaaatttcttgagctgaagtgaagtgaaggaactccctcccgaaaaccatggcatgtcacgaggaacgtttattgtaggttaggcggtctggtgcctctaggggggacaatcaaatgatacaggacctcgaagagtcttactttggatttctgtggctttataatgtagtatattatgtagttcattgctgtggctttatgcttttttattatttacaagtgatttactgatttgtgagctcttgaaactgtgtcattgcatgttatgtttaccctgatagttgcatttgcttataattctttttgctttgtcttcagttcagatattttggatggcagtagtagcagcagtggcttatcctcagacccgctggctaaaggcagcgctaccgcagagtctccagtagcatgctccaattcatgctcttcgttcatcttgatggatgatctctcacccaagtgacttaaccatttctgattcaacgttttaactgctgtttcctacataaaatgtttagtggggaacgcagagaactttgatccataatgaggattaaagttttacagatttcacacattctgatgctattattactctttggcatctctcttctccaaagttcaattttgtgagcctagtgaccttactagtatctggttttgctgatctcattttggatttagtgattaaatctcaaatgctgatttttgattgcttagaggaatcttttttcttagtgcctcaaaaaacacctattttgagtctatacatttaagaaaggcactgatgtgtattgcctttaatggtccttttccgcagcagtgatatgacagatttgatcagaaattctcttgcttgagagatttttttttgtcctctgttgactacatagtttcaaatctctctttatttcatgatgatatataaattgcttttaattatattaaatttttatttttctgcatcagcttcaagtacattattttgtttccctttcctgtttgagccgcttatgccatttctcacagaggggaagaaatacgtagttgctttcattactcttattgcttctttgctgttggggtgtgtgaagtgagcattgattttagtgctgagaatgtaaacggacttacaggatgcttggattagtcatcacaggttcttatgactttgctaccacagttgatatatttctcctcaaacctgttgccctaaggaatatataaaatattgttgatatttctaggtggtgttatcaaggagaagaaattcctgccttgaccagatgtgtggagcatctacaaatgaatgaatagttatttacacacaaaccactgtgtacaaaagcgtccatggagctgtcagtgtctcgagtggtattatgaggcctcaggtgccttggggtacattgtcatgctataagggatgtatatcataaggtatggtggaagaggggccttatgtgaatgattgccacatactgtttctgttgctgctttttttccgattcctttttgtcattggatttgtttgttttgtcatgtggtgaatggtgttttagttattgtgttgctgccagaatcagaatccagttcttgttcttactgccttatagttattgtgttgccaccagaatcagaatccagttcttgttcatactgccttgtagtgagggcagtttaatatctacaaagaagcttttagaagctgaaaaagtcaatgtgattgtgcattctgcttttaagaagctgtttcagctatgaactgtgtatgtgctataagtgtgaggtaccataagttatttaatttttaaaagaggaaactcctgagtgagctgtttaagaaatctgagtgtgatctattgttacgttatttataactaggtaaaatgtctgtcgtgatagatttcttttaacgttcagatactgtggttgggttgtctatatttaatatgcagatttgcctgctggaatcataatccatttttaagtgaatgtaagaaatgaaaactactgcatttgtgtcttttgaaggcaaggatccttggattttaaaggaagagtatgtgctttgaaggcactcagagactagtaatagcatatggtttgaagggaaacccattctctttcaattacaagagagcatcacttagcgtgcagtacttctgttacagcatccgatgtgtcctttattttaaattgtaaccataacagccattaatggctttatttcttgtattgctctcatctgggaaaagtctctacttcttcaaacgtaacataaatctattatgaagcttgtcccctagtatgccattataaagaaaaaattcttcgatggtatgcagtgtatctattctgtttgtaaaagatcatgtcaaaatgttctgcctctataatgataatagatggttttgtctttcaggatatttatccacctactgtcttctttgccttaaagggacacttggccatcatttttaggctcgaacttaacactgttaagaaataactgaaatatgatggtatttacattaatttttgaaattcaatggtgggatagaattaggtcaggaaatggaagttgttccaatggtgtgagaactaggagacaagatgattcactttattatttaaaccaagcttcatttttagtttttgttgtttaaatggactggaaagttaagtttttgcagggattgttttgaaataaagagatatgctaactcacagatgaactttgttaagacccctttatttttatataaagtctaatatttgaaaagcgattgttataaagtaaaattctctcttcctattctaatatatatcatatatttcaggcttctatttgaaaacaggtataagagatgatatgatacaaccctatagataatgttttttgcttgattgacttatataatcactgtttcatgattactgcttttgg

SEQ ID NO: 17341 - DNA, 1288 bp, Homo sapiens
tttatgtatgtaaaactacaaacatactactttgaaatctgattccgctatttcatgtttgtcttaccatgttattatgtattttcctacatccaaagctacctagtatctcttttgtatgaaggtttcatcatgtatcccccagtgccctttggttgtttttctttgttgtcatttattttggtgggggttggtttgctttttgttgttgtttttccttgtttttataaatgatacagtgacagatgccgttgtggataaatgctgtggcatagtcatcaattccttgatatatattcctagaaagtgcaccaaagggtatgcatggcttagggcttttgatactctccagagttgggataccaagtcacactactcactggagtcaggatgagagttttttgagacaatggtggcaattctgattcaatagattaaaaaatttattactacctttcattgcctcaagcagggtgcatttcccttccttcaagatcaatataatatttaacgcatcacttctctaaaatgtttccttaaaaaaaaaaaagcctatagcacctggtattcctggcagtctcccctccaagtactaaccaggcccaaccctgcttagcttccaagatcagatgagattgggcacattcatggtgatatggctatagatgcatgtttccttcttgatcatctctactttaaggctagagctaactctgtttcctaggagagagaacttgatcctttccttctactccactttacctatccctgagtctcacaacgggtttgtcaatctcactatttgataggttaaaatagtttattttgatatgttattttgtattcctttgaatacataatcaggattaaatattttcataggcctattgcttagttgtacttctgtttttaactatagggagtaattttttaaaaaaaggaaatgagatatgccttttatcattcagtgatgggcagcaacttcaggtgaggatgtcagtttgaactaacctgaaagaacaccaccctaatccattgcttccccaccttcttttccaaacacaccataacaatggacaacatatttaaaaaatatttttaaaatagtagccattctcaaaagtataacaggaaacctctaagacccagaagcagaaggaatgcagagcagtaaatgggacctgaagcttcacagcccttggaggctagcaagggaaacaggtctgagaagccaggaaagagagctaaactgtaggcaggtactgacggagctagaactaggtgttct

SEQ ID NO: 17342 - DNA, 1699 bp, Homo sapiens
tgggtttttattgttgtttagttttggtttgttacgccagcccagtctgtctgcggaacactgactctgctctctaatgagaacaaagttagaaatctgccgataacctaaaataatttagaaatgaattaaaaatgtgaaatcgggttaaagtgatgatgataaaatagcatgcaagaaacaagctccttccatcagacttggctactgttttcttctggtacgatttggtttggaagagcctcttgtttccttctctttggggtatgtcttcgtttcttaatatgtttgtaacattattgagatataattcacataccttacaattcacttattttaagggtacaatttagtggtttttagtgtattcacaaagttgtgtaaccgtgaccacagtcaattttagaacatttcgttaccccaaaaagaaaccctgtacccttgagcagtcacctctcattttctcccagtgcccaccccatccccgagcccctggcaaccactaatctatttctctctctgtagatttgcttattctggtcatttcatataaatggaattctacaatattcggtcttttgggactggcttcccaaatatgattttctatatggagtgagaaaattcttctcatcttgagaactcttattgctgtgaaagggagtggttggtaaaatcaatagatttcaggcaagagggccagatacctaacaggtttttctccgtgaatcttatgctgagtagtttttcctcataaccaagcatttatgatatattactacttataatactgtggctagtctctagaatggatgttgaaatctttgcctcctcagtcgggaagagtcctgctaaaaatcaggctaaaaatcaggccaaaaatcaggccaaatgacttggcaaataattgacaaagtggttttcacgtgtgtctatctttgctagcagcttgtatacctcaggccaggtgagctccccaaatttcttttttcatttactccagtgagtttctgctgtctttttcaagtatgtaccataggacttaaaggtgatttggatgcgttgtaacactgctaaatatgctaagtacagaattttatctacagtactgtgagacagtcaattattgcctagggtagttcaaaaatatgatgtgagctagttaagcctttgcttgactgatttcagtgatattcagaagtgtgtaccaatcaaggctctttaaaatacggaacgactcacttaataaccagggaaccagccaaatactgtgcagccgcagaatatgcatatcaatgagttggaggtgattattctctgtaactccctaatgattgttttctaagcattgtggcttctcagtggcttgacagcatcttcctggttgtatgtggcctgtttacatgatgtattgaataatgttgtttgttgtgagcatcaatgcctgtaacaccaaactaaacacgtgtttttgggatatgtttccaatctttaaatgaccttgccctgtccaataaataaatgattgtctcaccctgtttttggtagtgttttttgggctttttttttttggacttttaatctcatttcttctgcttttctgtccccagaaaaatgtaagagctaattttatgactgtatttttctactgtgatgctgttttactgaattcaatggataatttaattgtacatgtaaa

SEQ ID NO: 17343 - DNA, 1595 bp, Homo sapiens
ttaagccaaggtatggactttagactttatcctgagggcagtgggctaccacttaagggttttaatgggggatcctcgaaaatactcctattggaaatgtctcttgaacttctcaaaaattcttaaatcttactttatttgcatttagaaccaggaacagttgaaagatgatgattctgatcttattctcaatgatggtgacatcagtttgacatatggagattctactgtgaacactgaaccggccacatccagcgccccaaggagatttatgggaaacagttctgaagatgccttggatcgggagcttgcatttggggaccatgaactggtcattcgaggaacacgcctggttcttccaatggatgattctgaacccccgctaaatttgttagataatacgagacatggtccagcctaagcttactaatactcacttagtgatttgtaaaatttgcacatgtgattgtgaagaaatttgtactacctaaaagtcccagtgcatgtctctgaatgtgtaagctatataaatgctatttatatggcatagaaagaatataaatatcctgtacacggcagattgtgaacaaactatattcctttaagttttcctggttgcactctgtagactggatctgttttaggaagttactttcacagtgatgttgtgtgttctgttagttttatgtctcagttaaagtgtaaaaagtgacggattttctctttcttaaacttacctgacacttaaccagagtaccagttctcgtgatgtgaattaatttttttgtgtgctaggggagggagagtgaggagggagtgttatttccttgggaacctagggaggagaggttcctttgttgggaaacttttgttgatagctgctgcctttgtcctgatcgttttctttcccttttctctggtggcctgttgtggtgcaacgagctgatggcatttgatcttgccccattcaggttggggagtgaagtgtgaggacccttttcccccgcttgctgtgaaagcacagattcattgactacagtacactgttgttcagaaaagaaggctgcaaatgacttctgagactttatgtcttttcttccagaccaagaccgtagaaggagtcacatctagccggcttagccaaagtacaggtgtatatagttcagggcacttgatttagatttggaggggctggggtgggcagagagcaagaggcgagtaaagagaatggtggtttcagagatctctcttcccaaatgtgtaaatattctataccagataagtttaaataagaaatttaattgctgcttaatttttgattatgtactttatctgtatagcaggctttgtcgtcagaagtttttatatcgatttaaattgctgctctttagcagccaaacaggagcaaaatgtaaaatttttgaacttactgtgtctaatcatcatttgttagtctgtagttaatgtcaacagttaatttatgaacccacgatcgttccacactgcaccaaagtcagtcataagagaaatcgaatattctggagcactgattgcagcagggtggctcctttgtgtgcagcaggtgtagtagtctt

SEQ ID NO: 17344 - DNA, 1197 bp, Homo sapiens
gtgtatgttttacatgatgtgtgcctcttcacgcagtaaatagtttcttgttaatgtatgtttgaggagtttgaacgtcagtgtcacttacccacaaagttattcaagttgtaaaaggttatacaataatttaacaactaccttttttattctgtcgggttactgacctcactttatgtaaatacttcgcatgacaaattcagtaactcgtctatttcagcatgcataagacttttcactagggaaactgataaagcttgagtcaactaaatctgccttcatactttatcaaggggaaccaagcctgctgtgcttacatcagcatctggaagactttcctctcctctaatctgtgtacacatctccaagcaaggaagaaaaaacaaactctgctcagacgcctatgaaacacctgaatgaactttgatgaagtacagtctgagttaccatcatgcacaagtagaactgctcttggacttgttttcctgttgtttgtggaacctacgcgtttgaatggcttgaacgttgcatcttttaaagttattttttaaggtttcttggcatttatcctagttgtccgtgtttggcaatgtgctgttaaagtaatagacttttaatctttatgtattttttgttttctctggagtacttggacagatgttatagtggtttcttttaggaaaatctgtcattaaaaaagttatagccttgcaaataaccactcacagtatttgagtcacagtttattttagtgagacgtaaagagtgctgacttcatttatttttctacctatatacctagtggaaaaggggaagactaatgttttcaaataaacaaacagaaacctaacagaacttaacttatgggttggcaaatttttggtgcttatgtgtaagggtggatgtatttgcttatggtcacaattggactctttaggaaatatgactcaaagctgtcaaattctattacattgatttgtagcctgttagcttagtaatggataatgttataaaaatgctggtatggggaaagagaattctatatccagttaggtgggaaggcagttccaagtatatccagttaggtaggaaggcagttccaagtttggctaaaagcatgatcacacaaatacaaatagtcctccttccaagttaaagacacgtctctctgtgcatgagaagttttataggctagag

SEQ ID NO: 17345 - DNA, 2051 bp, Homo sapiens
gacttgtccctcgtgggtggtggttctttatagaaaaaatcgaagcttagcagctcctcgaggcccggtaagtgcacaccccacgaacagcccaagtttgcctcctggtggccactttgatgtcatggccctgacctaaatcaaagaaactggttatgctgggaggtcggtgcgcgtcacagggcaatagcgtggtggcatgggaacgtggggtctttacatcagggaagcccttggccgggcttcagcatcttctcaggtccttgagagccacagcagggttgcggcggcatgggggacaatggcggcgtgggggactgtgcacgatggagtggaggagggggtctgggagccaggcagacctggctcttgcgtgcttgtcggtctgtgagtggggcaggtcgtcattttatctctctgaatcgtggtttcctcacctgtattcattcagctgtttctcttgttttcttttcttttctttttttttccccccagggtttggtaaaggctccagtgtggtggcctatgaaggacaatcctggcacgactactgcttccactgcaaaaaatgctccgtgaatctggccaacaagcgctttgttttccaccaggagcaagtgtattgtcccgactgtgccaaaaagctgtaaactgacaggggctcctgtcctgtaaaatggcatttgaatctcgttctttgtgtccttactttctgccctataccatcaataggggaagagtggtccttcccttctttaaagttctccttccgtcttttctcccattttacagtattactcaaataagggcacacagtgatcatattagcatttagcaaaaagcaaccctgcagcaaagtgaatttctgtccggctgcaatttaaaaatgaaaacttaggtagattgactcttctgcatgtttctcatagagcagaaaagtgctaatcatttagccacttagtgatgtaagcaagaagcataggagataaaacccccactgagatgcctctcatgcctcagctgggacccaccgtgtagacacacgacatgcaagagttgcagcggctgctccaactcactgctcaccctcttctgtgagcaggaaaagaaccctactgacatgcatggtttaacttcctcatcagaactctgcccttccttctgttcttttgtgctttcaaataactaacacgaacttccagaaaattaacatttgaacttagctgtaattctaaactgacctttccccgtactaacgtttggtttccccgtgtggcatgttttctgagcgttcctactttaaagcatggaacatgcaggtgatttgggaagtgtagaaagacctgagaaaacgagcctgtttcagaggaacatcgtcacaacgaatacttctggaagcttaacaaaactaaccctgctgtcctttttattgtttttaattaatatttttgttttaattgatagcaaaatagtttatgggtttggaaacttgcatgaaaatattttagccccctcagatgttcctgcagtgctgaaattcatcctacggaagtaaccgcaaaactctagagggggagttgagcaggcgccagggctgtcatcaacatggatatgacatttcacaacagtgactagttgaatcccttgtaacgtagtagttgtctgctctttgtccatgtgttaatgaggactgcaaagtcccttctgttgtgattcctaggacttttcctcaagaggaaatctggatttccacctaccgcttacctgaaatgcaggatcacctacttactgtattctacattattatatgacatagtataatgagacaatatcaaaagtaaacatgtaatgacaatacatactaacattcttgtaggagtggttagagaagctgatgcctcatttctacattctgtcattagctattatcatctaacgtttcagtgtatccttacagaaataaagcagcatatgaataacctgcctcctgtcttttcattctgcctggtggaatcgctataaggtgatactcctaatccagaaacctaaat

SEQ ID NO: 17346 - DNA, 1169 bp, Homo sapiens
gtagcaaagagatgctattattggtgaatagcagcaagctaaaattattttctcctagtctcttttaaatgaggtagaatattaggaaattaaaataagaaggctgggcgcggtggctcatacctgtaatcccagcacttagggaggccgaggcgggtggatcacctgaggtcgggagttcgagaccaacctggccaacatggcgagacccccatttctactaaaaatacaaaaattagctgggtgtggctcatgtctgtaatcccagctactcagaaggctgaagcaggagaatcgcttgaacctgggaggtggaggctgcagtgagctgagatcgtgtcactgcactcctgcctgagtgacagagtgagactccatctcaaaacaaaaacaaaaatgaaaacaaaaaagaaaaaagaaaattaaaaaatgtcaaagtagatcatataattccatgaagttaaaagtaaagaaatggagaaagtacatgcagaatcgtttttccattggtttcaggatttataaccagcaaaaactcaactaacatttggtcatatgattttatattcctgttttaggaaaacaaaactgtcaagtgggcttctaggtgggattagattttggagtctgtgcctcatgctaatattcagtggtttaggtaagcacttcatgaagtaaaaagtaagtagttttgaggtagaaatgtaaatatatatatatttaaattaacatattttgttatcacagatgatcttgggttacatctttttccttctctgtgactgtagtttcctctctcctcttctcccttccactccccacatacacaatgaaaaaaagataaatgtgttttaaatatgttagtgtttatgctgaagggaaagagcaatccgaaatgtcatggagatactacgtctgcatggaatgaatattggggtggagagtcagtgagatatgactgtggaagttgacactgtgcaagagatgaaaaataaaatggaatggaaacttctgtttgtgggttcaaaaagttcaggcacagtagagagttaggaaaaatagtaaccagctggggtagaggaaggtaaggatgtcataaaaatctgggaagcggtgagaaaagggtgaaaggatttcgtgtgacaaacccacaacttgaagtggctgtg

SEQ ID NO: 17347 - DNA, 1099 bp, Homo sapiens
acacaccagattttgaacacttagaacaacgacaaagataacgtaaaatatttgctcaataattttatattaacacaagtataaatcataatatttggacatgttagaataaataaaatatgatgttaaaattaattccatctgtttctttttacttttttaaggggggctactaaaaaatttagaactacacatgtggcttgcattatacttccattgcacagcactggcctagcccctgcccacatgactgctttttgttattttctttatactattgttgttttctcaaagctgcctttgagaaaaatgctcctgtaaatattccatgccctcttcagattcaagattctgttttgtgataatatctgtatagatgtttttcagtttcatttcattctgattctcacttcatttatttccgagcagattagttgtccagttcagacaaaccagatcccctgtcagattcctccatagaacttctttacaaaaccacttcttggcatcataattggtggcattttccccttcggctgtatttttattcaactctttttcattctgaacagtatttggtgagtattacatcttcataatcttaaaagtgttagtttttagtaaattaacattcctatagtttaaggaggttaaattctgatatgataatacttcatttacctccctttatccagtaaataacaatctgacctagaagaatttcctagagaaccgagacttaattcatgactttaaaaatatttatttttaatttttgtgggtacacagtaggtgtatatatttatggggtacatgagatgttttgatacaggcatgcagtgcataataatcacatctatggagaacgaggtatccatcccctcaagcatttatcctttgtgtttcaaacaatacaattatactcttttagttattttaaaatgtacaattaaattattattgactgtagtcaccctgttgaattcacaatttttaaaaggcacgttttgatggaaatatttataaagatttacttttttggctgggcgcagtggttcacacctataattccagcactttgggaggctgaagcaggtgg

SEQ ID NO: 17348 - DNA, 1141 bp, Homo sapiens
tgaggacaaacacaaaccctgttaattatagaatggaccaaatacatttttaaaagaaaactgagaccaatcagatggaaatggagttttaaggcaagaggccatatatagggctacatcttgttaattgcaattgtccaggaaggttttgggcaagatccaaaagtagccatgcccttttctcaggatagaaaatatgttttggcatttgaagcattttttacaaaatctttacactactttttcttccccttcctcttgctctctgcacaccccattcttaaactcctccaattcattttaacacttgtcctgtttcttgagaggaagttatagaaggcttgttggtggtggtgatgttaaactgatggaaattctttttcgccttagtggtgattgtttaaactctcacagtcttaaaccgtgccaaagtcctgttatgtcttgaacttttcctcaaagcattacacttgtgaatgtatttttgtctaatagggtcgaaactgttgttcagtattttttcaggctgaggatgtgatgttactctacacattgtgacgtttagtatacagttgccttttgtaataactttttttttgtaaatacatatccattgatgccatatttatcgtttgtaatttaattattgctacaagtgccgggaactgaacaatatttatggataaatgttttctaacaaattctgtacagcttttgattataactgctttagcattaaaaattgttttgaaagaagaacacaatttacaattttggaaccactgactcctttctcttgttttgtaacagccttcttctacaaagaggagatgtgagcaaattaaatcttgtttgttggtatttataactcactcagatcccttttttaattgttaaattatttttctattacagtataaattccttacagtgtcagtttccatctgggaagactctcctttctttatctctatctcagatggttgtttaactgcgagtttaaatgtgtttgtcctggattttcggcatgcaaatcaaatattactgatcaattcagttagtggccatgacatctcaatcttgtacttcaaagactgagaagctggatttaatcatccctgccctacatatataaacataa

SEQ ID NO: 17349 - DNA, 1134 bp, Homo sapiens
atctcacctatactttggggatgataatccaaaagtatttcacagcactaatgctgatcaaaatttgctctcccaccaagaaaatgtaaaagaccacaattgttcttcaaaaacaaacaaaacaaaacaaaacaaaattaactgcttaaatgttttgtcggggcaaacaaaattatgtgaattgtgttgttttcttggcttgatgttttctatctacgcttgattcacatgtactcttttctttggcatagtgcaactttatgatttctgaaattcaatggttctattgactttttgcgtcacttaatccaaatcaaccaaattcagggttgaatctgaattggcttctcaggctcaaggtaacagtgttcttgtggtttgaccaattgtttttctttctttttttttttttttagatttgtggtattctggtcaagttattgtgctgtactttgtgcgtagaaattgagttgtattgtcaaccccagtcagtaaagagaacttcaaaaaattatcctcaagtgtagatttctcttaattccatttgtgtatcatgttaaactattgttgtggcttcttgtgtaaagacaggaactgtggaactgtgatgttgtcttttgtgttgttaaaataagaaatgtcttatctgtatatgtatgagtcttcctgtcattgtatttggcacatgaatattgtgtacaaggaattgttaagactggttttccctcaacaacatatattatacttgctactggaaaagtgtttaagacttagctaggtttccatttagatcttcatatctgttgcatggaagaaagttgggttcttggcatagagttgcatgatatgtaagattttgtgcattcataattgttaaaaatctgtgttccaaaagtggacatagcatgtacaggcagttttctgtcctgtgcacaaaaagtttaaaaaagttgtttaatatttgttgttgtatacccaaatacgcaccgaataaactctttatattcattcaaagaataatcttccaacatgtatttattgagcgtccattatgtgccagtaactgaagtagcaactggaagtaaacattgtataatgcagataaggtcactgtcctcagatagtctacagtct

SEQ ID NO: 17350 - DNA, 1433 bp, Homo sapiens
gaaaaacctattagtttctctctctttgtccaataattctctgagatgtgctactaaggaaaacatataaaagagcaacacaatgtattccatacacccttcttccctgccaaaacaagaagctggaatgacctgctcttttggcttcacttggtcaagttgtaaactgagcaataatgggtgctgcttcccttgtagagacctgtgtcggagatggctctcctatattgatgaagctactatgtcaaatggcaagtagctctttcctgcctgcttctcagctcatttggaaaaatactgcgcaaaagacattgagctcaaatgatgcagatgttgttttcaggttaatggacacgcaaagaaaccacagcacatacttcttttctttcatttaataaagcttttaattatggtacgctgtctttttaaaatcatgtatttaatgtgtcagatattgtgcttgaaagattctcatctcagaatacttttggacttgaaaattatttcttctctactttgtaaccaaatgcaatcggtgtgccttggattatttagtttattaatgaattaagtcaaaattacggctgcaaaatggctaaggtcaagtaaagcacaacattatgatttaatatgcttttgttgaaaccacagcttttgtgcccattgttttaacttgtgtgaaacaatacaaagcccagaaattcttttcggggcatgagtaaattttgttcagggctactgtctgtatgtgcccagataaaattttcatgagagtagtttacaaaagccgtatttaaaagttaatattttcacactttttttctggatttctgcttataattaatgtaacttaaattagttgtgctctgctattttctgtatatttcatgttgtaattctttttttcaaataaaaattaattcttcaggttagataaacttgttctgcctttttcgttccccatcacatactgcttcatgtctgtctgttcctgcaaagctgctgcagctaccacatttaccagtgaagaaaagagttaattcttcatgttgcagagcaggcagttatgcaagtggttttgcaatcaagtttgtaatataattttttaaaacaactttacagtctccaagcaaatatagatccctagcagactgcaggaagagaggctcagaagacctcctgattagaaatggagatgtcattcagcttctccatgggaatgctgagggtcaatggtaggtgtgtttgcaaagcctgtgatgatctccagctggggcacatagatagctaatcaaatgttctgctttatctgtatctttgttatacagtctccaaaagcagaaatatcacagcgatggctttcattttcattgcttcagcactgcctataaagctcactgaaaggaacattaacctttggtgagtgaaaaatg

SEQ ID NO: 17351 - DNA, 1131 bp, Homo sapiens
tgatgatgccatcgaatcattaggaaaaggatcttctagcttgccccagatcttagaaaaaaaaaaaggaaaaggatcagttatgtcgtgtgtctttgattaaagaattcaaggatgcatataatattttctagaaaggtttccatcaaaaatcactatggttaaaaagatgtttggttcttcaatgaataccctttagttatctagaaaattaactttttatgaatcaaccttattttccaagaatgccaaataaataaagagttaatacataaaataagttctaattagtatcttaaatctgttttcttaggcaacttaaatcactttttactagtacgtatcaaagttattttgaaaaaaatcatagttttatttttcaatttatcttcagagttaggacctagaataaacttaatttgagctggatcgccttgaagaaaaattatacctacagaggtgctaatttaacttttattttctgtatttcagattgaagtggtgcctgattgtcaggagaagagaagttctggtccatcctccagtttggacaatggcaatagcttggatgttttaaagaagtatcctttatttattaatataaactcacatacacatctaactgtgggagtctggttcagtgttcaaggccaatgtgattagaaatttgagttcacagaatggggttttactgggtgtcagaagtccaggatttaggcctggccaacctatagcctatttatgtgatttgaagaaaattaactaaactttttcagaatgttggtatcttcttttttttaccccagactgaaataaaatggaggttttcgtttatcattcttaaaaaaagttttattattatttttcattgacacataatcattgtacatatttatggaatacagtgtgaaattttgatacatgtgtacaatgtataatgatcaaatcatggtagttagcttatctattaattcttcagctttattgatatataattgacaaaattatgtatatttaaagtgtacaatgtgatgctttgatatgtgtatatattgtgaaatgattaccatatcaagttagttaacacatctatcacctcacgtagttaccattttttttttgtggtgagaa

SEQ ID NO: 17352 - DNA, 2219 bp, Homo sapiens
acaaaaagttatcatctcaggatacttgatacgcaacacactaaaccactctcatgtctagagttcacaataaatgttcattaaaataccaaatgattctcttaagcatttaccattattgtaagtagcctttatggccaaagctgtaagttaagaattatatgaaagttgaaagcaagaatacttagaattctggctttagttagagtaatataactcaaatgggtgctcttttaacccatgaactttgtgaatggatttaaatacaatagtatgaagtagaagttatgcaatgagaatgaatagattttgctaatactactttttttgcctggcagaagaaatagactatttggatcacatttctcattcctcctaaatgatcatcttaattttttttcccaagtacataaggaatacttgaaaatacagaataactaaatagtatcaatgcatcagacagaatagttaatcccttctgtttacccatgtgctactaatgtcttggtagaatattcttgccaaaaaaataccttgaacgcttatgtggaaagtgttaacttacgggtatttttgtgggaatagaaaaaaattgtttattttttattcttctgaattaaaccccacttatgggtgtaagcctactagacttgaaaataaagtataaaacatttccaatcacttagtagcccctcaaagtagttagaaaataaacagatttttccagtgttgattttactgggatctgcagtaaggtggtttaaaccatagttatataaaaataaaggtcattctgaatatcagccttttataattttatgtgaagaggaagaaatatagcttattttaaacttttgacggtttttatttgaaagagattgcatttatgcatatatgcagtgctttttcttaaacttggccaatttggaaagggggaaggagccaccccaaaacggtggttcagcttgtagagccatgactctgtgaagatgaatgttgtctcttaacttggacagggaaatggtctaactctaaaccatgtaactgaccttagtaaagtccttgactaactgaactagaaggaaggtttagccttctaattagttcacttgaaacataaatgtgaaatgtcttcattcaatgttaaacacatacttttttggatataaatgaccatatttatttgactgctagtttttttgttttttttttgtctttctggcatgcctgtactattattaatgtttatattgtaccttgatttggaaaagtattggagttaatctgtattatatttatatagtccatatggcacatttgattcttccacatatattttgtgttaatgtttaggtatgatttttttctaaattctagaaaagaacataatttcagttatcagaagccattccatcattatagaccctttttcattatttcatttgctctcatatatcagtattatttttgagcattttgttacatgtcattcacaacttacctaagtgtgctgtgttctggtagcccgtatttgaggtaagctgctgaaaacaaaagtctctatattctttgcctattccaaagagctaaaaaagtctaacccaggaaagcttttgatattttgtgtttgttttcttgttcttatggttgttgttgctgtattatgattgctgttttacataaaatctatgggaactgtgaatacagacaagagagccacagtagagaggcttgtttaatgcagtaccattggagagttaacagaataatctagtagaaaaataactggttgcatgtaaaattccttccagccagaaagaaagaaagacaaggagtaagggggatttagagttatgtctcagctacacattacattgtgatactgcagctcaaattcagaatggcaatgatacatgatatcatggcctagatccttgagagggacctggctttcctttttaaaagatattttactgaagagctaaaaactggccagtgtggggttagcagatcgaataacttgaaatagaccatgcagtattcctagcactcaatgtaatcaccctatttgtgacagagaaagggaaaaaaatataataagatcatctacctataatttgaataattttgagctatcaaaatgtctttgtaattttcacaaccgctgtccattgtttgaggatgttacctactaaactgaaaacattcattccatatct

SEQ ID NO: 17353 - DNA, 1180 bp, Homo sapiens
tttcagagtggtagacagggaagggaagaatgtcaactgtctgagccaaagtcccagagaaagcattttggaaattttggagaatatagttaatcattataataatgatgattactattatgattcttacagtgtcatatacaaccatgggttcacagggcaatagccctgttagctggattagacaaaaataaagtttaatcctaatgtcgtggctgttgagatgggcctttatccattggcctctttgacatactgctaattgagctggtgtcaaagctctctagatgactgcaaaggaatgtggaaatttcattctgttttagctcattatctcctgtttaccccaccccactgccggttgctagctatatcaatttttttattgctttagttactctttccatgctttctcctgctttctgtactttcatttcctttataaagtagttttaacacctaatctattaactcctaatatttctgcttcatagaaatacttttatctccgatggttggatacaagtgtttgagcacaccaaaacgtgcttacagttgcagtcttgaatagataggtttgtgcattaaacacgggggtggggaacttggtatcatgctgatcttgtcgcagggtttttgcccataaaatagaagatagaaacaattaaaatctttttctcagaatctaaatattctctagctttatcaattggtaatttgcattctatcaatatgtctatcaactttcttcattccaccaactttcttcatttaaggtaaaaacaagaaaaaatgtagttgtcaaaacatgaataaattatttacctttgaaagtttaattgtttattagaatcttctggaaacaaatgttactttagctggtttctttttctaagcccattttaggtcactaagtagacaatatgggtaatctttattagcagagttgttcaagtcatccacattgttgaccactcatcttctgttttgcttgggcaatgccaaaactgagtctgtaaattaccttataatttcaggcacagaatcagaaggaaaaaaataaccttaggtttgccagttaaactttatccattttcacttttctgggtgttttaaggggaaaaaaaataataccttacccaggtaaaatttagcctatctttctaaagaggactctgta

SEQ ID NO: 17354 - DNA, 1111 bp, Homo sapiens
cttattttcctcatctgccatgtgcagctattagtaccttgcctccctcactggattgtgggggctaaaataaggcattatgtagggtggggttttgagaatgcaaaaacatgaaacaaaatgaggtgatttttcttctctgtcaatttggcttgtctcctgcattgacttttaaaaaactcactaagggcaagaacaaaaccttttccttaccttttgggaacttgacaatatgattcttttagccttgctgagcatttgccaaaaggacatctttgtgctttgggcagcttctttattaggccttagcagctgcttatttctttcatattattatgatttcattttgtagacgttctgtagagtgctttaccgccgccgcccccccaccccgccccatctttgaaaacagtggcgtttggttgtcttcagagctcttaaatagtagcaaaggccccaagcaggcttgagtggactcctttcacttgtgtgtatgaacacactagtggcagtaattaatgaggaggatgggctttgtaaactggggacaagtgagtgagtcatggcacacaggctgacccccctcacctgggcagcctctgaggacacctgcctcagatcattaaagccccctgcccaatagacatagtctgactgcctctgctggtaggggtgaacaaagctgagcatttactggctggagtgcagggatgaatggctcttcggccaggcctggcccagacagctgctcatgcaaagggattccaaatgaacatgtttctatttagaacgtacatgttttgattgaatttgaagaaaagcatgaggtagcgctctctttggaaaacaaactaattatgtactcctgtgttggctggtggttggaagccgggcatgtccacaacagcacttcatggaaagaattttcttccctgttgaacatgagactcttctttagcaccacagctgatgctttttgaaaatcacatggtggatagctgaaaacgagcctttagggaaagcttcagcacagtaaatattctttttatattggtaattaccaccacacaatttttttgttttcttaatttggattggtatattttgggtt

SEQ ID NO: 17355 - DNA, 1177 bp, Homo sapiens
ctccactttatgaagcccattcaatgaagagcctagcagccaataagatgaagatacaagtacctggcacagcttgccagagagcgagcccttgttcacttatacactggatgaaaaggtggacaagttggtgcagtttcttctcctcaaatatcaagcaaaagagcctctcacaagagcagagatgcagatgaatgtcatcaacacatacacgggctactttcctatgatcttcaggaaagcccgtgagttcatagagattctttttggcatttccctgacagaagtggaccccgaccatttctatgtctttgtaaacacattagacctcacctgtgaggggagtctgagtgatgagcagggcatgccccagaaccgcctcctgattcttattctgagtgtgatcttcataaagggcaactgtgcatctgaggaggtcatctgggaagtgctgaatgcaataggggtgtgtgctcagagggagcatttcgtctatcgggagcccagggagcttgtcactaaagtttgagtgcagggacattacctggagtagcgacatgtgcccagtagtgctcctccacgttatgaattcctgtggggtcctagagcccattcagaaactagcaagaggaaagtagtgagattttggtcatgtgaaacaataccgtctctagttcctttccaatctcttccaaggatgctttgaaagatgtggaagacagagcccaggccataattgacaccaaaaatgatgctactgccatggccagtgcaaggttccgtgtcatctccagaaacttctcctgtcctgagtgaagtatagggccgtttcttacgtctgtgtttgaagagggcagtcagggtcctaggtagtggagggcccgggtggggcttgagggaacaatacagtgttctttgcatttctgttccatatgggagagatagatttacctcgtttccttttgtgtactttttgaatgattttccttttaatagtaggttgaattagcttcagaatattattttataaatattagtcacacatatattgctgtttatctagtttaagagtaacagtttgatattttgtaaaaaaaaatggaaaaagcttgtctcttattttgtgatctataacaggataacatggtattgtactaggaattttctttaaattatg

SEQ ID NO: 17356 - DNA, 2468 bp, Homo sapiens
actataacttgttttagatcagagttgactgcaataatgaaaggagtgtccacactaaaacattacagaatacctccagtgaaggtagtcggctgcgcacgggtaaagatcgtaaccagaagaaagagaagccagacagcgtggatggtcagcaaccactcgtgaatggagtaccctaaactgcataattctgaagttatatttcctataccatttccgtaattcttattccatattagaaaactttgttaggccaaagacaaatagtaggcaagatggcacagggcatgaaatgaacacaaattatgctaagaattttttattttttggtattggccataagcaacaattttcagatttgcacaaaaagataccttaaaatttgaaacattgcttttaaaactacttagcacttcagggcagattttagttttattttctaaagtactgagcagtgatattctttgttaatttggaccattttcctgcattgggtgatcattcaccagtacattctcagtttttcttaatatatagcatttatggtaatcatattagacttctgttttcaatctcgtatagaagtcttcatgaaatgctatgtcatttcatgtcctgtgtcagtttatgttttggtccacttttccagtattttagtggaccctgaaatgtgtgtgatgtgacatttgtcattttcattagcaaaaaaagttgtatgatctgtgccttttttatatcttggcaggtaggaatattatatttggatgcagagttcagggaagataagttggaaacactaaatgttaaagatgtagcaaaccctgtcaaacattagtactttatagaagaatgcatgctttccatatttttttccttacataaacatcaggttaggcagtataaagaataggacttgtttttgtttttgttttgttgcactgaagtttgataaatagtgttattgagagagatgtgtaatttttctgtatagacaggagaagaaagaactatcttcatctgagagaggctaaaatgttttcagctaggaacaaatcttcctggtcgaaagttagtaggatatgcctgctctttggcctgatgaccaattttaacttagagctttttttttttaattttgtctgccccaagttttgtgaaatttttcatattttaatttcaagcttattttggagagataggaaggtcatttccatgtatgcataataatcctgcaaagtacaggtactttgtctaagaaacattggaagcaggttaaatgttttgtaaactttgaaatatatggtctaatgtttaagcagaattggaaaagactaagatcggttaacaaataacaacttttttttctttttttcttttgttttttgaagtgttggggtttggttttgttttttgagtcttttttttttaagtgaaatttattgaggaaaaatatgtgaaggaccttcactctaagatgttatatttttcttaaaaagtaactcctagtaggggtaccactgaatctgtacagagccgtaaaaactgaagttctgcctctgatgtattttgtgagtttgtttctttgaattttcattttacagttacttttccttgcatacaaacaagcatataaaatggcaacaaactgcacatgatttcacaaatattaaaaagtcttttaaaaagtattgccaaacattaatgttgatttctagttatttattctgggaatgtatagtatttgaaaacagaaattggtaccttgcacacatcatctgtaagctgtttggttttaaaatactgtagataattaaccaaggtagaatgaccttgtaatgtaactgctcttgggcaatattctctgtacatattagcgacaacagattggattttatgttgacatttgtttggttatagtgcaatatattttgtatgcaagcagtttcaataaagtttgatcttcctctgctaaattgatgttgatgcaatccttacaaatgattgcttttaaaattttaagctaggaaaagaaatctatagaaagtgttctgttacaaaatgtaactgttaccattggaaatttcacgtcataggaagttagcctttatctaccaactttcaagaacttgtttaataaagcgaaaaactcaaccaaatggtacaaaaccacagtgtaccattaaaatatgcactaagtctcttttttacaaaggctgtattcagcaaggcgctaacttgcttaaatgtgaattactaacttctaaaactgtactttgattcacatgttttcaaatggagttggagttcattcatattacaatatttgtgtgctaaacgtgtatgtttttcagttcaaagtcatgatgtttttaaaatcttattaaagtttcaaaaatctgaagattgtttatctagatgtaaatttttattaaaaagttgcacttatgaaaaagcaaaaaattagtctg

SEQ ID NO: 17357 - DNA, 1151 bp, Homo sapiens
tccctctcttcacccattcattcatgaccatttttcactaccaagctccccccctcccgaaggaggctgaggtttttgtgactctctagactctattgtgggatggaatgaacattgctaaagaatcttgtgttcgctttactttaaaaaggtatttttttcctaattataaaactgatgtgtcagttacggaaaaattagaaatgcagcacaaatacatgaatattttaccacgaaattgccatataatatcttgtcttttttgggggtgtgaattttttgcattgttctgatcatattctttatcatgtaatttatgttcttttttactaagtattatgtgtggttattatagattttcacaaagatatattgctggtaatatattttattgtgtagtcttataatttacttaaccttctttcaattgttagaaatttaggctatttccagattttcagtattgtaaataatgctgtgatgaccaattttgtgaataaaatgtttttatgtatttcagattattcccttaggatagtctctcagtgccaagttgtcaaaaacatctctattttgcttatcttcctgctctcttgctgccttagggggtagtaaactgaaacataaagtaaacatgcatacaaataaaaaacataaaacaaaaataagcaacctgatggtaataggtgaaagtggtaacctgttttaactttgaattcttgccgggcgcggtggctcacgcctgtaatcccagcactttgggaggctgaggcgggtggatcacgaggtcaggagttcaaaaccagcctggccaagatggtgaaatcccgtctctactaaaaatacaaaaattagccgggcgtggtggcgggcgcctgtaatcccagctacttgggaggctgaggcagagaattgcttgaacccaggaggcggaggttgcagtgagccaagatcgcgccactgcactccagcctgggtgacagagcgagactccgtctcaaataaaaaacaacaaaaaacaaaaaaaacttaaaattctttgcttgttagtgaccttgatcatggttctctttgtacgatagttgggcatctgtatttccacttgtgtgaatttgcctttaaattttggttatgggtttcaccttttaaaa

SEQ ID NO: 17358 - DNA, 1614 bp, Homo sapiens
cttatgagccctatatattcaaaatattatgttaacatgtaatccatgtttctttttcaaatctaaagttaaaaaaaaatagcagaagccagtgtcttaaagtctatcttttgtttctaagaccatgggatttcataatctcaagataaaatatgtatgaagtaattaatgtagaatttttacaccaaataataaataatgcttaataaactagagatatgagatgtgtaggaaatttggttaaacttttttcagatactttctggcccaaataataatttgttagcaaataatatgacccttgaactcaatggccatctattaaaagactgttgttcacactggaaaacatttaaagatgtgactatatccatgggtggattgaatcactcaaaatatattagtatccttctttagggatggttggttacagacatgtatttattcaggaggcagaaaatattccattttaattgcttattaaagaaaacattaaattctaaattattttgaggactgtgaagacttttcattagtgtaatattaggtcattgtcaatctcccagaatgtagttctatattctctaaatatgaaagtatccagaaaggccagtggtagtaaaaagcttagtgtatataatctcaaaagggatggaatatttacagctcatatttataacatgttgaatcttctcagttatcagtagtcatcagaagtgtcaatagctttctaaataaatattaaatatctactgtcctgtagtgaaggagtaatttttagtaattttctctttacaaagtctccagtgtttccaggtaaatatttgtgaaacaaaatacagcaaactacattgttacttcagtgtattgttgccaaaaatgacaagatattatattaaaatcagtaaattttagacagattttaaaaattaattagcctacaatagaggttatatggtaacacggtgatcttctaagcagttaagtgactgactgttctggcaacaacgacttctccgtgactgaagggccctgttcatttcctgatcctgaagctcgtctctcttttgagcctccgcttgctttggtcgatggtttccctcagctttttctttgctgttcttcatcctcgttgttgctgtcatcatgttcactgtggcttttacaatacagcctgtaaattccttatgacatagttcagtgcatttggctttatcgcctgctccacagttctttacctttacttggcttagagaaactgtatctttgttgcttcatataacctttccccaaccccactaagctggacataacttattagtggtcctcccgtcactttatttgtagaaatctctctttcacatgagcaggggttctttcatgtggtttagctgacagcagaactagtgattctagacattttgcatggccctcattcagtggctcacaaacatgagggagcatcagaactacttgaggggcttgttaaaacccagtgcgttagaagtcggatgcggtggctcacacctgtaatcccagcactttgggaggcccaggcaggcggatcacttgaggttaggagttcaagaccagcctggccaacatggtgaaacc

SEQ ID NO: 17359 - DNA, 1041 bp, Homo sapiens
gtataagtgtacttaattccactgaactgtatactaaaaagtggttacgatggtaaatgtcatggtgtgtgtatttgatcgtaataaaatgcaaagataactctaatgcagacatccagaagggagtaatgtgtggggtgatcctgtgggagtcagaatatcctgttcctcaacagactcttttacctagtggttgtagccttaattgatgatccttgtctgagtcagttattaaatcggtggttccaaaattcaggttgttttaaaaagcgccaacagcctcgtggggccctaattttgcatcctgctatttgattggatgagtaattaatgcagggtgaggtgccgaggtggtgtttctaaacgtctgttgctaaagataaatgttgtaaattaaaaaaagaaaacatatggagcccagacaggttcctttactgctcctgcctggccatggcaggcttttataatgtaacccattctgctctgtcgcttcctgtttcaggcaggcaatccatggaccttgtggaacttgtgtctctttttcccacgctggctggacttgcaggactgcaggttccacctcgctgccccgttccttcatttcacgttgagctgtgcagagaaggcaagaaccttctgaagcattttcgattccgtgacttggaagaggatccgtacctccctggtaatccccgtgaactgattgcctatagccagtatccccggccttcagacatccctcagtggaattctgacaagccgagtttaaaagatataaagatcatgggctattccatacgcaccatagactataggtatactgtgtgggttggcttcaatcctgatgaatttctagctaacttttctgacatccatgcaggggaactgtattttgtggattctgacccattgcaggatcacaatatgtataatgattcccaaggtggagatcttttccagttgttgatgccttgagttttgccaaccatggatggcaaatgtgatgtgctcccttccagctggtgagaggaggagttagag

SEQ ID NO: 17360 - DNA, 1211 bp, Homo sapiens
gggctcctaatccaatatgatcggtgtcctttaagaagaggggagagagacacgggaagaacacatgaagatggagacacagtgatacagctgcaagctgaggaatgccagggactgacagccaccaccaccagctagggagaggcaagattcttctacttagagccttcagggagagaatggccctcccagcaccttgatcttggacttctagcctccagagctaggagacaatacatttcagcttaaaacaacagagcagtaggtgacacattcatccactgtgatctgtgccctaaagtgaaatctgatttgcttagaaatgtatcttatttgtagacctacagattttgctgtgactctgtgggtgaagtgatgctgatggtagggaaaggagtgttacattttggctgagaaaatcattaagggcatcaactaaggggtagggattgggagagatgcacaggcaagcattatctctgtatgccttggcaatttaaattgcagtcactctcatttttattttttttcaatttgcagcggaaaatccgccagagctactttgcctctgtgtcatatttggatacacaggtcggccgcctcttgagtgctttggacgatcttcagctggccaacagcaccatcattgcatttacctcggatcatggtaagcattttgaaattccctggtgagtcaaaacatctgaactttcctgtgaaacatgctttgcaaaattgccattgacataaacatgggtgtgttctcttttgtgaaccagtggttcacaaacaaagtgggatcctggggcatttttatgatcagcttgttagtcctgagacctctgtcttagatgcttgacggataggtgtgggtgggtgggggagggtcttgtagcaacttttttttttttcttgatgaatgcagcaggaaccctccatttgtgtggcagagctcttgtaacccccatttttaacctggagggttggaggacttttagtttgggtggagaggatccagaacaatcctggcagagcccagcaagctcttcacgcctggctccagccctcccacccctatccccgctgtcttctctgccgagagcctgggcttttcaagtctttatctccccctaaggctgtttcctacttttccaaaaatgaaactatctttttaaaagcattttttaaattcttcaacattccaagagcag

SEQ ID NO: 17361 - DNA, 1237 bp, Homo sapiens
gataatgaggctttaatgagcttccctagttagcagcatttcacatgtattgtcacacaactcgttgctgggagaagtaagtatcctatgtgacttccctggaagaggacttgaagcttgtgcctagtttcctctagactttgcctcatgtgccttttttctttgctgagtgtgtttcactgtaataagtcatagctgtgagtgagactaaatgctgaatcctatgagttcccctagtgaattgctgaacctgagggtggttttgggaacccaacacctcaccacacttttctagccaggcaggaggtggggacaggaacagaagggcgtctgtttgtatgaaggaagagagttgttgctgctcagtttgtaggaaacagaagtcgtatgatttcattgccattggcatctcatgagagtaacttaaggctggacttccaggtcagggccgagcacgtggggaatgctagtgagccaccactcaaatgcatcccaggcttagagaaaaggcagtatagacagtgatagagccacaagcttgtgcttttgctaaaagagtgacaactttgtggctttgtgtttttccccaaggaatttcagaagttgtatcccttggagaacatcaccctggcccccgatcccgaggtccctgatggcctaccccctgtggcctacaacccctggatggacatcaggcaacgggaagacgtccaagccttaaacatcagtgtgccgtatggtccaattcctgtggactttcaggtatcaaggacatagtttggggatgtattggacactgatgacatagtgtcgtaggtgaaaccactcttctcagtagacacaactccacctataatgtcttattaagagctttctttgtgtgagttatcaggcaaagtgctggggtggaggtgtcctataggtatttaggacacaggcagtgttgcctggatcaggactctcccaaccagtgtcttactttctaaagaagggaatgtccagagagttggtgacttgttgtgtgtggacacagaggtggggaaccagcctgggtgaccgttcctaacccaggggatactgttcaggtgacagctcattaattgtagagtgatgggcaactcccgagcagcccagaatgcttggtttgctggtacttgcaggttccctctgtgggaaagcccatcctggctagctgtcactctcagggggtggcttggtgaacaggcccttggtgcag

SEQ ID NO: 17362 - DNA, 1903 bp, Homo sapiens
accagaaccagtactggagctgggtctccaggtacgtccatctcatgccttgtttgcatccagcgcctatcagccactcaccacgacgggacgcggaagtggcaggtgacgggggtgtgtgccagcagatgcggatgccaggaagagtgtgagaacaggggtgggattaccgtctgtctgggaggggctccaggtacccctcttccccgtcagacccactgggagatggctgcttgccaggcccccagaaggaacatctgtctatacggtgctgaaatcccaatcaaaagtattgtttagaaatgtatttctccacagggctgacctcctgcagctcgctgagcactcccaggtcctcagcactcccaggtcgtggctggggcagtcagtaggaactgtaactatgtctctgatgcaccacgtgtttagacacagcacagtccttttttctgttcctactgtggaagtagtttctctttgggcatgctgacagcagtttttcatagcctcacggatgagccctttctacgggagtgactccatgcttgtatacagagtatttatacaaatgttttagcatcttcatatgcggtgttaacccctagttctgtacagcatattctgttcaagtatttttttacaagcttgtgctgtaggcacatgccttctgctgcagaagtggacgcccgtggcacactccccccccccccgtggggtgccacgccttcatgggacattgccacttctgccctggaactcgtgcaggtacgtagtagctgctactgccagaacggcaacaccaagcaagagatggtccatgcttttctgacgttctcagaatagtggctagcttcaaacctgacaagcgctgcttgaagccggaacactagagaatgttgctgagagcagaaacggccacgcgggtcacgactatgcgtgggaaagtctcaagcttccctcctgccagcaacaagaaggctttggagtaggcatgatgttttcacgtgtgcgtgccgtttctccaagcactgcaggttccaccgtgtgtcagaggctgcaagtttaacatcctcctgcctgaaaacaaataggtcctttgctgaaaagagggtaaaaaaagagctttgatcttctcagccaggagaagagggtggtgttttcacgcgggcaactgctcgccggcctacatggggttaattcaagtctgctgcgagcacgactccgcccttggcactggcctccagcaagccctgttctctttggggtacaggggaacgggatggtttagactttcctgctcagtgtgtaaaaaatgtagctaaagccactatttttgctctccttaagctgttcaataaaccggttcctcattttacacgtgcatgatgtgtatcttctttgctggatgggccaggaaactggagtggtcctctcagccagcctcagaggaaagaaatctctagctggcacaggcagccagtgagtgaggctggcggctgcaggggcacagcctttaggatgagtccttcagtgcacaggtcccagggtatacggggtagtgggaggaaggaggggacgcctcgcagatgccactgttggctgggctacaccttgccacacttgttactgcttaggaggctttctggagtgttccttgggtgctacgacaatctgcagcagacactgtcctttcaccgctcctggtcctcgtttgctccccagtgatgtcaacagctgaggactgctcacgctgcaacaaaaggctctgcagtcgctgtctagctggccctagtcgtctctagagttctgcctgaactgaaactcaagtggggttcagctcatgacttgtggcaattgaccaggaaattcaccagttgctgtggctggaaggattttcagtcct

SEQ ID NO: 17363 - DNA, 1171 bp, Homo sapiens
tcggctgacacattttcaaagatagtgacacgtgtgaggaaatgtgtacattaggtatttcttggtgaacaaatacttagtacttgggtgtttagtactctgtgttgtactttcctgtatgtgtcaatgaggcagtagttaaggaaagtatgtattatggtaaactttgagtaaagggcttatttacaaatcagcagtcacagcagatgggtggaacacgtgagttctcatgacgtgcgtggcataaagtgtaactcaagtctctggttctctccagcagccgaatccagtggagcagcgttacatggagctcttagccttacgcgacgaatacataaagcggcttgaggaactgcagctcgccaactctgccaagctttctgatcccccaacttcaccttccagtccttcgcaaatgatgccccatgtgcaaactcacttctgaggggggaccctggcaccgcattagagctcgaaataaaggcgatagctgactttcatttggggcatttgtaaaaagtagattaaaatatttgcctccatgtagaacttgaactaacataatcttaaactcttgaatatgtgccttctagaatacatattacaagaaaactacagggtccacacggcaatcagaagaaaggagctgagatgaggttttggaaaaccctgacacctttaaaaagcagtttttgaaagacaaaatttagatttaatttacgtcttgagaaatactatatatacaatatatattttgtgggcttaattgaaacaacattattttaaaatcaaaggggatatatgtttgtggaatggattttcctgaagctgcttaacagttgctttggattctctaagatgaatccaaatgtgaaagatgcatgttactgccaaaaccaaattgagctcagcttcctaggcattacccaaaagcaaggtgtttaagtaattgccagcttttataccatcatgagtggtgacttaaggagaaatagctgtatagatgagtttttcattatttggaaatttaggggtagaaaatgttttcccctaattttccagagaagcctatttttatatttttaaaaaactgacagggcccagttaaatatgatttgcattttttaaatttgccagttttattttctaaattctttcatgagcttgccta

SEQ ID NO: 17364 - DNA, 1105 bp, Homo sapiens
ctgggtcctgccccagcaggccatgcccctcccatgtgccgtgcctgttgctgcagctgcccccccaccccgccactggctgcaggaattcagcctttagaggcagaggcagctgcagcggcccctgaggtcaaaccccagtgtgactgcatagcagtgttagctggttggtttcaaactactggattccaggcaaaggcctacagattgaccttattatttttgaaaatatgttaagggttttttcgtagagagagaaagaatggatttttttttaactgggaacctcctgattcttacggaaaattatccttctataagaagataccagagagatttattcaaggtaatttgataacctaaaatcaattctccattttttatcatatgtgggatttgttgctaagtcgtgttcaacaatagcttttatgttcctaacatatctgaaagcttatttatgaatggatatactggattattgatatactgattttttttttaatggggacatttgccattttcttcccagaaatatgtaatcccctggctgactaggactgttaaacatagtgtggactggatgatgccttcgacaaaccagagaagccaagttggggggagctggtgcctggagtgggccctgtgcacctcacctggcggaggctggggggggctctgtcagcaggaccctagaggagactctcattcgattttaaagaagcacaacgggtcattttcctttgtatgttcctagcgcagaactgtttctaaaacaacttgaagtatagttttgttatctaagcaatttttgttttaagtaagtaagtgtactagaatgcgaagccgttatggttcaggtttttaaaaactggtacagtattgtatttgtctcatctgttgcactgtatttcaatcatctgtaattaaaatgatcatatgtttgctccctggtcttttttaagtaagtaagtaagtatcttagtagatttttcctttgaggaaaatcggtaataaaataacatggattgaatgtttactgtgcgtcaagcacagttaatatatgatgatgtaaagtaactaactttatgtgatttaattcattcag

SEQ ID NO: 17365 - DNA, 1389 bp, Homo sapiens
ggaggaagaagaggaggaggaggaggaggaggatgaataaagaaactgtttatctgtctccttgtgaatacttagagtaggggagcgccgtaattgacacatctcttatttgagaagtgtctgttgccctcattaggtttaattacaaaatttgatcacgatcatattgtagtctctcaaagtgctctagaaattgtcagtggtttacatgaagtggccatgggtgtctggagcaccctgaaactgtatcaaagttgtacatatttccaaacatttttaaaatgaaaaggcactctcgtgttctcctcactctgtgcactttgctgttggtgtgacaaggcatttaaagatgtttctggcattttctttttatttgtaaggtggtggtaactatggttattggctagaaatcctgagttttcaactgtatatatctatagtttgtaaaaagaacaaaacaaccgagacaaacccttgatgctccttgctcggcgttgaggctgtggggaagatgccttttgggagaggctgtagctcagggcgtgcactgtgaggctggacctgttgactctgcagggggcatccatttagcttcaggttgtcttgtttctgtatatagtgacatagcattctgctgccatcttagctgtggacaaaggggggtcagctggcatgagaatattttttttttttaagtgcggtagtttttaaactgtttgtttttaaacaaactatagaactcttcattgtcagcaaagcaaagagtcactgcatcaatgaaagttcaagaacctcctgtacttaaacacgattcgcaacgttctgttattttttttgtatgtttagaatgctgaaatgtttttgaagttaaataaacagtattacatttttaaaactcttctctattataacagtcaatttctgactcacagcagtgaacaaacccccactccattgtatttggagactggcctccctataaatgtggtagcttcttttattactcagtggccagctcacttagggctgagatgaaggagagggctacttgaagctactgtgtgattttgtttgtgtctgagtggcattcagatgaagtctggaggagttaggagaacgacataggcaaggttcagcagccttccaaggtataggaaggtgggtgattaggactgaggctatctaggtttaacttttgtcccacctccaccccctattttgtggggccaaatgcattgctaaacagcaatttcagagtgtatggtgtgtcaaaaattaaggccttattgtttttctctttcacccctaccccccgtgctcctggcacatatcacattatttgtggtgcccaacatttggggtcttgagcctgctgctggtctcctggat

SEQ ID NO: 17366 - DNA, 1186 bp, Homo sapiens
cacccactaggatggttataataatgataaaaaagggagctctttcctttcgctgctgcgactacagccatgagtatgctcaggcttcagaagaggctcgcctctagtgtccttcgctgtggcaagaagaaggtgtggttggaccccaataagaccaatgaaatcgccaatgccaattcccatcagcagatctggaagctgatcaaagatgggctgatcatccgcaagcctgtgacggtccattcccgggctcgatgccagaaaaacaccttggcccactggaagggcaggcacataggcatagataagtgaaagggtacagccaatgcccgaatgccagagaaggtcacgtggatgaagagaatgaggattctgcacctgctgctcagaagatactgtgaatctaagaagattgatcgccacatgtatcacagcctgtacctgaaggtgcaggggaatgtgttcacaaacaagccgattctcatggaacacagccacaagctgaaggcagacaaggctcacaagaagctcctggctgaccaggctgaggcccgcaggcctaagaccaaggaagcacggaagcgcagtgaagagcgcctccaggccaagaaggaggagatcatcaagactttgttcaaggaggaagacaccaagaaataaaagctcgccttttgtctgtacatactggcctccgtgaatacatagatcagccattaaaataaaacaagcctttatctgcttgccaaaaaaaaaaaaaaaagataaaaaaggaaaataactagtattggtgaggacgtagagaaattacagtcctggtacattgcaggtgggaatgtaaaatggtgcagtcgctatgggaaacagcttggagatttctcaataagttaaacatagaattaccatatggctcatcagttccactcctaggtatacagccaaaataattgaaaacaggtattcaaacaaatacttgtacatgaatattcatgtacataatttttttttttctctgtcacccaggctggagtgtaatggcacgatcttggctcaccgcaacctccgccttccgggttcaagcgaatctcctgcctcagcctcccgagtagctgagattacaagcacgcaccaccacatccggctaattttgtattttaagtagagacagggtttcaccatgttggtcagg

SEQ ID NO: 17367 - DNA, 3863 bp, Homo sapiens
ctggaggctgctctagccctgaggacttgccctgggacgtgcttccagttagaaggcttgtgtccctaccccagtgaggccaccagcttggaccactccaccctgtggctggggttttccatccttccccctacctcacaggcccgttggaggctgactgagcaaatgcctgcgaagtgcttgaattgccggggagccagcgaggtttgccttaggaagagtcttctagaaaggtgtaggttataagggagcagtcttagctgaggccctcatatgcctctgatgttgagtctccacttggagagtcaatctcccgtcagttgaccctttccatcctctcgtcctccctttccagagctccctgatgccagagatgctggtgaatgcaggtgacattctacctttcgtttccttgtctttccctcccctgggccttcagcattgcactcctgcccttcatcacaaaggggtttttggcttaagaggcccctgctttttccatgttgggggacctggggaagcctgaagctcggggctagccctggctctcccagtatttcttcaagtaggtgccagagtgtgacctgggagcaggtgagaagaaacttatcccaatatgtctactcagttagcacagagccaggcatgagctccactgatcagagccaaagggagtttgccaagaaatgcccgctgcctttggcatctgagttgcagctgggtggtaatgggagagagcaggaagaggcccaaggcctggcccatggagggcaacatgtgtccttcaggggctgaggacaggccgtgggaagagtcacaggaggttgcttaaggcctgtgatgttcggttcagatgcttcatggtgttctgccaggtggggttgcaccacggtctctgggatggtttctgcagcacattgtagaaaaaagactgtacagcacacagcaggcatcactccttgcgatgcacacttggattttatgaatgccctgtacatatcttttcaaactctgtgtttgtatggaggtggatttgatacaatgctgactctttcgtggctacatttttgctgtttttggacttctatgtgtgtgtgtgtgtgtgtgtgtgtgtgtatctatgtgtgcacgttgccttttctcattgcttatctgaaacaatagccggtgtgcagctatatttgtaccaggagggatccggtctgaaaagaggaatgtcacctcccctcgcagggctgagtagcctgatgacagggccctgagcaaggaaacgtggcattaactatattggacacccaacccccaaagttgtcactgtttgcctccttgaaaaaggctttggaagaagacaaagcagctccattctgcaggtctccaccctatgcaacccccgctcacacgcccttttggcatggtgcccctggcccaggcttctgttctgtgggtgtcagcagctgaaagaaatctgagtactcctgggcatggttttttttttttttttttttttttttttttttttttttttttttttttttttttttgtgtgtgtgtgtgtgtgtgtgtgtgtgtgtgtgtgtgtgtatggaaagatgtgtgactattgactttgggtatcgcgggactagttaattagatgtttttcatttttcaaaaagaaaaggttttaaaaattttcttgaaatgtgactgtcacttgttttcaaccaaaaactttttaagattttttaaaagaaaaatcgaaatcctgtccctcccccgcttcccatcgcctccggttttcaaaatgaaagcacaagtgcaagagtggggtgcacaggtgcctggcgtgtacacaccacccacacagctgcgtccagccctggctgagggagacgcagtgctgagcagtcagccccgggaggcctctttttcaacttccaatcccactgccatgaatgtgaattccttagggtgcttccaaaaacaggagtctgcctgatctgttggacattgcctttttggtagcccgaatatgaggaattcaggacaggaaagtgtctttttgtcaagtagtcagagccggatgcttcccctctcccagtgggtggagcatcgcaacccccagccagagttgatcttttgacaacccagtgacatcccatgagaaggaagaaaaaaaattcaacactgcctctagattgttattttgtccaagagagagatcatggagagagtctctctcgctcacggaggctctgtctttctaggagtatgtgtgtgtgctgtctcatgtgtggacactcacagttgaggctgagatggatatcttggcagcagagctgctggtctaggtggcttttcagcttgacaagtaatgaagctccatttcaggacttcatcgattccgaaacaagcacagccccccaccccccgccacggaactctactaatactaatcactataattagctaatttaaaagtacggtaatcagactgcttgcaactattttaaaagcccattaatttgaagcccactacttcagaacttcgagaaaatcacaacttaagacaattcacagtagctgtgattctggctacataaaaatatttgaaatattcttccctttagtcaatgttcagggtcttttgtgtaagagaaatccagtttaaaatgagtacccttttcaaagaaaaggctcaagatattaaggatcccttcaccgtgccttcagctttgcagttcagcacttctcgtatgtacagggtgatctcttgttctctctccatcacagggatgttggatattgcagcctttcactctactccgttatttatcctgtgaataacatagtttgtgaactagactgcaatttaaactaatacacatgatgtatctttctaaatattctgtaaagcagatgcttcgctgtcagactggccgctccatcattcgcctccaaatattcaaacgtgggagcttttcctttcagactgtgggcagcgagtctctctctagcaagaatttatctgacaaacatacccaaatagcacaccctctcaagctcaatgcctcaacagttgtttcactgtactgatatctgactgctgaacagtgcctgcccttcacccacccccagcccgagcattaacacagatcttcaggattgggacaaatcccccagctgcttttgcctctcaatccatctcccctcatcgataccaatttcccaggcctgaacacatctgttattttgctctgacattgtgaatttgtgacagtggaaaccctgatatgtgcaactgagcttatagaaataattactgtgaaatggattaattttgataccactttaaactgtgcttgtattcatgtgttgacccttgtcagctgggaaatctgtacattcagtatatgtcagcatttcattggagcctgggggcaacagacaaacttgcttctgatttctctctctctctctttctttttataattgttgaatttggctgttacattttgtctccttctttacaagaaaacaataataataaagagcaaatggcatccacttgaatcctgtcgtcatccatcttggatccctgctgactcccaaacttccaaggggtatgggtggttgtgagtcagactgtagataaggaagaagcccaaaacagtccaggagcaggaagcagacatgtcctgggtcctaaagtttgtccccagtgtgtaagatgatctcctgagccatccttctgggatgaggttggtgagatctgtcagaaatcacagttagaaacttggtttcagagctgggagaggagcggaaggtatacaatactcaggctttgccctggctgggcttcctaggttctaaagatggcaagg

SEQ ID NO: 17368 - DNA, 2200 bp, Homo sapiens
actcccttgaggcttataatgggccaagttgaagactgttgatgatccctggtgggtaaattgcagacatcaaatgctagggattggcataggctagtgtttagcttgtctatttgccatatctattttttttaaatttccatacacttgtaaaagtagttagttgcttttgattgagttatatagcagtttttcatttggtcttccactcacctttcactatatttgagtgttcccttacaggtatgttggcatgtgttggaaaatttacacaattaggtttaaattcagtaggatgtgattttaggatgctactgatcaaagtgatatctgtgtctgttggaatcttgatagctgattaatttgccctcaattctgctccctgaacttcacacataaatcttcccaagtgggttttagggtgtatagatcccagcaggattaaggaggtggaaaagcagctaacatttcttgaggctctaccacatagcaggcactgtcacagagtaatggcattaatccccataataatcctgtgaaggtgatattctcatcccatcttagacatgaggatattggaactcagagaggtggctattgcattgcgcagaacgctacagagcccatgctcttcccagagcagcacccacaaaagcaagcattgattttgtgctcagtgtgtgccaagcactgtgcagagggtacacagttcctgccaggttaacaccctcccttcaggcctcccaaaggcataggcttgcaaagagcagaaggtgtgaaatcacactcttcctctgggcatcctggatccctgaattatccccccccccatgaagtacttcaagggccaagctgcccctttccctcctctccgcccatgaaaatgcctccaaactgagatgctttcagctgagaacagatttgactcacagacattaccaaagaggagcttgtgaatccaggaaaagctccagggggctagctgatctgagcagagagctttcagtgacccattttcctgtctagactctgccttaagctagtggcaactgctggggccccaggtacttgggacatggaaactcgttggatggctgggcagatgtaagcctgtccatgcagtcagccgatcctctgctcaggttcagctggactctgccatctgtgggcccagcatcactctgtaagttccttgaaaggaagaacaaccttagagtatttctgatacaaaatgagggcctctgctcttgatttaattataaaatgtctacgtctttctccagtttctgagccctatgcacattggcttgtgggcttgttcttcctgccaaatgatcagagaggaacattccatttatttgtagtggatttcctctggagggcatgtacccacactaaataccaactgctcttcctcagctgtagtccccaacatcagacttggcacgtggtggacactaacacacaggcactcaatgaatgagtgaaggaaataaaagtcaccccgttggtgagaggtgctatccctgagtctcagtgcaggaccagtggatgaaaggcaaggtaaagaggcccaagataggctggcttcccccgttcaaggtatagtctgcctttaagggagttttagaaccaacatgcaagacattgaaagaaatcttgcaagagccattattgacttagatccaaaacagcctctctcatgtctaaaaaggcacagaattttgcagatctgaggaagagggatgcattacctttttgcttcttttcaattgcttagtgtttctaatcatacttaatccacactaatgtgcgcaattataataaatggtaagatatcacatgtgtcagtgttaaagttttcttttgaagtgtaataacttggtgtattcagctgtgtgatttctttattcctattgcctgaagccattctctgtacaaaagtaaacaagtacttaatagcaagctctagacactgggcatgcacaggaactgtggaattctagacacatcaaatcttaatgaagaatattgtattgtggcggcagagagcgggggcggtccatccttctcatgattaccactgcagacagacagccacctagtcattagtgcccacttccagtgaccaggagctcagttccttacaagcccctgctgtctgtggttttagaagatgcattcttcagttgagttaaag

SEQ ID NO: 17369 - DNA, 3726 bp, Homo sapiens
agcccacatagccccgagtgagcagtgaggctgtctcctgccctcttctgcctggagggctcgtcagtgtccccaggtgtcaggccctgcctcctgacgttggccttttcactacaggcacccgaagcacacacagcagagtcctctggactttgaggaagaacccacagcaggaggaagtcagcagggagtggtgagatggggagatctttgcctggggagaacctccacactctaccctccccaaaatgacttggggaaccctgggaagaaaggactccatccctgcttgggggtgggggcagaggaggggtgcttgggggcgtaggttggggtgggcattaacaatgctctcatcccatttgctttgcaggctgtgtgaaacctgggaccacttctgccttcctacgtggcagtggctcagagttatttgagtgctgtcaaactgagctgattgctgccctagtattagatcagtccatagaaagtgggagcaatggcactgacactgctagaggattggtgcaaggggatggacatggaccccagaaaggccctgctgattgtaggcatccccatggagtgtagtgaggtggaaattcaggacactgtgaaggcaggcttacagcccctgtgcgcatacagggtcctagggagaatgttcaggagggaagacaatgccaaggcagtcttcattgaactggctgacactgtcaattacactactctgcccagtcacataccaggaaagggtggctcctgggaagtggtggtaaaaccccgtaacccagatgatgagtttctcagtagactgaactacttcctgaaagatgagggccgaagtatgacagatgtggccagagccctgggatgttgcagcctccctgccgagagcctggatgcagaggtcatgccccaagttagatccccacctttagagcctccgaaagaaagtatgtggtacaggaaactgaaagtgttttcgggaactgcttcccctagcccaggcgaagagacctttgaagactggctagagcaggtcactgagataatgcccatatggcaagtgtctgaggtggagaagaggcggcgtttgctggagagcttacgtgggcctgctctgtcaatcatgcgggtgctccaggccaacaatgactccataactgtggagcagtgccttgacgccctaaagcagatctttggggataaagaggactttagagcctctcagtttaggtttctgcagacctctccgaagattggagagaaagtctccactttcctgctgcgcttagagcccctgctgcagaaagccgtgcacaagagccccttgtcagtgcgcagcacagacatgattcgtctgaaacatctcttagctcgggtcgccatgacccccgccctcaggggcaagctggagctcttggatcagcgagggtgtcctcccaattttctggagttaatgaagctcattcgagatgaagaagagtgggagaacactgaggcagtgatgaagaataaggagaagccatcagggagaggccggggggcctccggtagacaggcaagagcagaagccagtgtctctgcacctcaggccaccgtgcaggcaaggtcttttagcgacagcagcccccagaccatacagggaggcttacccccattagtgaaacgcaggcggctgttaggcagtgaaagcactaggggagaagaccatggccaggccacgtatcccaaggctgaaaaccagactccaggcagggaggggccacaggctgcaggagaggagttgggaaacgaggcaggggctggggccatgagccatcccaagccctgggaaacataggctcagaagaccgaagcactccttcccctggcaggcagcagggacatttgaacaaggggaaggggcagcttacactaacagggaacttgactggggcagagggacagggaagccaggtcgagatcaagcccccttactttccaccagctggaagggacttcaccaaccaagaccaaatagcatctggttcagtgggggccgggcccatagcccctaacaggtacaggagacacaagcggggaaccactacacttagcacatggggtgcctgggcttcagatggggaccccagcgaagcaggggctgaagaaggtgtggctgggggctctggcctggtcctctggacacccccaaatatctaccctgtggactttgagctgagcatgcccactggcacccaggccacgtgggacctggaggagcctgcctggggcctgcctctgccagaaggagccagggctgctgaggaagagctgtggggcagaagtgaagccccgcaggggaggccacagggtccagcctgtctttaggatcatctacactgcatgaggggagccccaggaaggcagcattcataagcccctgcaccagtgaggaagagaaagaggaggagaattaagaagaggatgatcgggaggaggaagaggagaataaggaggagcaggaggaagagggggaggagaaggaggaagagggggaggaggaagaggggaaggaggaggaagaagtgtaagaagagaagagaggatgtgttgggggtgggtagttgtttttggtttgcgtcatcatcaggcccgggctctgctcactgctgttccgtgtcaagaactccacctctgctttgccggtgtagatctcggccagtggctgcttgttctcttggggatgtgtgtgtttttatctgagcagctcctttccagagtaccccagcgcagttccaggagacggtgggaaggaggcatggcagacgctcaccttgtgactgtgacctcgactgcaggaggaccaaccagacacgggaaggagcagggctgcctgaggctccccaggaagctttgtgctttggcgttccacccctgctgttactcgtgactcagtttcctcaacttggtggggtgttccctgctatgttttccagcatcctgtgactgtcctgtgcagtctatagggcagggccctgccccagcgggtgggctcaggagggggttccctgaagcgagtacacattgccagagcccaccatcctggcaagaggtggatcctggggccctatggaaggagggatgtggtggggggggccacactgagggaggggccggggacttgtgacctgtagtggctgtttgcagtttctctctgtgttagattcccttttcttcagcagtttcagttcatgtttctcttcagtaaattttgttcagtgttccagtggtgtcttgcctctgctgtgtgaaactggggtgggaggtggtctgctggggatggggccacagtggccaggctgacatcgaggtgtgtgtggggcagggtctatgagggcctgtggggtgccttgggctgcatggagcctggcaacaggatgctggtggtcatgagcagtgactggctgggtaccaaaggcactccaggtgtcctcaggaataagtgacttggacattgaaggctgggcaaggggcagcaggtgggtcccaggcccctgatccctggcagcactgtaggggtgtggctcaaggcttccggaagggtcagagaggccacgtgtgcaaccaaggccagcaaccgaggtcagagaagagccccaggagggcctggacaggcagtcagaggccctgtgaagagctgtgtgcaggactcggggtggggtaggggctggtgtgtgccca

SEQ ID NO: 17370 - DNA, 1114 bp, Homo sapiens
gctgggacgtggtgtcttggcatcccttcctgccgtccttgactctttcccatcttcagttctataattttctcccaaacaaatgctcttttagagttaacactaaagatctggtctttgccgtcaaggttgacagaacagctgttcatggtgtttgcggtgaaacccgtgttctctttcaatgcagtctgtggctttaacgtgtgtcctgtaatttcgccaagatcatttcttgcctctggtaacttgggggtggatttccttgggctctctaggtgtactgctatgtcagatgcaaaatgtcacccagcttcctgtcacatatccttgtctgtgcattcatgcatctacctcattccggttttctttctaatctcatgtattcctgttgtgaggaaatgtgttcttttcccgatccttttgtagttcatacacatgacaattgggtttccacgcacgtgcatgagatgttcctccttcaaaccttgttactatgtcagcacattaactgcctggcatggaaaaagaaaaaaaaaaaagaaatatgttcttttcctaccatttgaaaaaaatcctccattgcttttattagagttttgaatacttgtgaaaattttcaaaagaaagtaattgattaccatttttgctgcttattacgatgagctgtgtccattagctgtgtcaccccactcttgcatttccagaatagtccctacccaattgcagcgggcatgtttttgagtggtgttgcattccatgtgcttgattttgtcctagaactggcacagcgcctgccctacctgcagccctgggttgtggccctgttgcgtaccatgtgatttgccaccccgcttctaggccatattaattcagccagaactgaacacctgacccaagggcagcaagcaatcatcagagcatagagctgacagaacatgatggaccacggacaccaccaggccttccagatctgaaatgcaaacaaggaaacagaagcttctaggcatcagaaggtgtggggagcagcacagtactcagaggagtgaggagcgtggcgcctgctgggaggaaggcctggccatggtatgttcttggatttctggcagcagccctc

SEQ ID NO: 17371 - DNA, 1383 bp, Homo sapiens
ccacctcccccaaggggctctggccaccacccccattccttccctgtgacccggatgaccacgtttgatacaaaatggggtggggagaggcgcccccccgctcccttgcacccagcacacccagccccagccccaaaccctgccgccacggggggctggcctggagggagccctgagtgggcagctgtggcctgggtgggggcacctgaagatgtctgcccccaacccaggccgtgagttgggagagacagggggaaagaggccctctcaaggttgccagctgcctgggtctctcaagaggggtcagcccacttgccatctccggggcaggctgccctctgttccgggaagctcaccctcacctgtgtgacccacgcgcccagcagacgcccacccactgctagccatcatttctgcgaaaagtcatgtactgtgcgcccatgcaggcggccacctctgggcccggggcacgtgctgtgagcttcctgcgagcccaggctctgcttgctgctgtcctgcatcgtgagcaccacctctgctttcctggcgtagatctaggccaggggctgcttgttctcgtggagctgcgtgtgttcttctctgagcagcctctccccggagacccccagcgcagtcccaggagatggcgggaaggaggcaccagggcacggcggacgctcaccccgtgaccacgatggtgaccctgactgcgggaagaagaaccggacccggggcacagcggggctgcgtgaggatccacaagaactatgctttggcgtttcacccctgttgttacttgtgactcagtttcttcagcctggtggggtgttccctggtgtttcccagtgttctgtgactgtcctgtgaaggccatagggatgggctcaggagggggctccctgaagccagtggacactgccagagtccactgtcctggcaaaaggcagaccctggggccctcgggaaggagggaggtggcagcgggggcagcagcgggagggggagcagatgacgtgccttgccaggaaccccaggaggagggggcctgggacctgtgtcctgtggtggctgtttacagtttctctctgtattgtggtttccttctcttcaatagtttcagtatatgtttctcttcaataaatttcattccgtgttccagccggtctcgcctctgctgtgggaaactaggggagggggattggctggggatggggtgggcatggaggagaggaaaaatattcctgcccagcacccctgggggacatctccaaaaagagtgtaagtgagagcactttgaccagcatgcgagggcacgacaagggcttttcttatattttataggtgaattgtcaagttttggggtttcattcgtccttagattgt

SEQ ID NO: 17372 - DNA, 1195 bp, Homo sapiens
gtgaggcaggagcagcaggtgagggaggagcagcaggtgaggcaggaggcgcaggtgaggcaggaggtgtaggtgaggcaggagcagcaggtgaggcaggaggcgcaggtgaggcaggaggtgtaggtgaggcaggagcagcaggtgaggcaggaggcgcaggtgaggcaggagcagcaggtgaggcaggaggcgcaggtgagggaagagcagcaggtgaggcaggagcagcaggtgaggcaggagctgtgggtgaggcaggagcagcaggtgaggcaggagctgtgggtgaggcaggagctgcaggtgaggcaggagctgtgggtgaagcaggagggacaaatgtaacaaaagcctgggtccagccttggcgctgcaccctacagcctgtgctggaaaacagggcctaccgggaattgagacccttttccaggagggagcagccaggctgcgaggaagagtcctttgagagctgggtggagcatgccaaggatatgctgcagctgtggtgccatgcgtcggaaagggagaagaagaggtggctgctggagagcttgggcggcccggccctggaagtcgtgagcggcctcctggaggaagataccaacttgtccgcgctggactgcctggcggcgctggggcaggtatttaggaaccaggacactcgaatgacttcgaggctgaagttcctgacctgcacgcaggggccccaggaggggctgtttgccttcgtggtgcgcctggaaggcctgctgcagagggctgtggagaagggggccgtctgcccagccttggccaattacctgcgactacagcaggtgctgtcttgggcccgccccagcgaggcactccaggataccctgagagggatgcagctggagaagaggccacctggcttcctggggctgctccggctcatccgggagatggaggcatgggcagccttcccagcgaggagccagcagggtgtggcctgggcagcggccccagtggagagtgaagacccagctgctgcccaggcctccccagcccaggggaatgccagcgaggctggtcccggagcagaagatgctgccgaggccgcttctgccaccaaagaggctgcaaggggagcccctgccgctggggaaggtgaaagtgcccctgcaggccccgaaggcctaggtcaggcaaggcccatagaggtcccctgggg

SEQ ID NO: 17373 - DNA, 1150 bp, Homo sapiens
ggtatgagaggggttcggggactcgtggggcttcagggtgaagcctggagccagccgtgatgggagctcccgggtttgcggctcactcatgtgggtttgagcaaccacagctgcaggaccggatcgctcagttcggctcccttcgtggctgaaaacgtttcatcacgtccactcctcccagcaacagaggagaacggatttcattgtagccagtgtgcgtgtgaggaaactgaggcttggagcggcaaggcagtggtggcactgctggggctcaggaccgggcctgggtgctgcctcctgccctgcactctgctcacaagcatggactgaacctcctcgaggcccagtgggctggggaggcacaggaaggcaggagagaggggcgggtggggtggggagtctgtgccttcacctcctccgcccaccctgcttcaggccctcgtcctggtgaacaacaagatctccaagatccatgagaaggccttcagcccactgcggaagctgcagaagctctacatctccaagaaccacctggtggagatcccgcccaacctacccagctccctggtggagctccgcatccacgacaaccgcatccgcaaggtgcccaagggagtgttcagcgggctccggaacatgaactgcatcggtgagctgagggcctcccagaacattccagagccttgtctcgaggcatggggaagggagaccaagggatacctttagaggctcagttcaagaaagagtatggtgagaacggtcaaaagaaaatccatggatttcttggcaaatcctccatgcaggcgatcaccacggctaaagagaagactgggccagaggggccgggtggcttccgggagccccatcttcatctctggcactcctccctttcctcttgctgcccctggagctagcagtcctggggctagcagtcctgaacagctaggagtttgcaattagcccggtaaattagcagaactgctttcaggagacgggagcagccggcaggtagcagggcccaccacactggcccggaagtgacaggacccagggctgtgcagggaccaccaggctcccgggctaatgaggtctctcccctagagatgggcgggaacccactggagaacagtggctttgaacctggagcctt

SEQ ID NO: 17374 - DNA, 1205 bp, Homo sapiens
cgcgggccccggccggggcggggggcgcgggccacaggcccctgctccggccgccgcttgcagaccgcgggcgccgatgtcgcccgcgccccgctaggctgagcctcgggtcgggcgaggagccgccgcagccgccgccgcccgagccgcgggcaggagcctcgggagccgccgccgccgccgccgccgcccggccgggccccgccgccgcccgcgcgcccccgggcccccgacacacatgagattcttcaggctcactttcaagtgcttcgtggactgcttctgactgcgccgcccgcgccccgcaccccgccgcccgcccgccgccccgtcccccggcccggccgccccccggcccccggccggcccgcgccctcggggccctccccggtgccgccggtgccccccgcctgaccgccgccccccgtgaggcgccgcgaccccggcccggccgtgcggcccgccgaggccatggcgaagaagagcgccgagaacggcatctatagcgtgtccggcgacgagaagaagggccccctcatcgcgcccgggcccgacggggccccggccaagggcgacggccccgtgggcctggggacacccggcggccgcctggccgtgccgccgcgcgagacctggacgcgccagatggacttcatcatgtcgtgcgtgggcttcgccgtgggcttgggcaacgtgtggcgcttcccctacctgtgctacaagaacggcggaggtgagttcccccgcccgccgcggcctcctcccccagcaggccgccggcccccgcccgacccccggagccgccgcggaggggtgaagtccgggcaacgggtggcccccgggcacgcgggggtcggggccgcccctcgtccgccgctgccgctcggtggccgggccgggcgcctccacccccctcgcagtcatgtgcctggcatggtggggggagggggccggcgatgcccgcgaggctgccccccagactcccgggctgggaggagcgattggccgccgaggtgggaaagcaggcctgcgccttggggtctccgcgaggtaaggagccctggctgcccccacgggtcgggcacacaagcggcacattgtgtgggccccccacgtgtgcacacacacgaacacacacacacacaatgggccactctgtccctccccctgccctcccctcccctcgcggccctcccgcccctccc

SEQ ID NO: 17375 - DNA, 2008 bp, Homo sapiens
acgagcaggtgaccctgggggcttcagcatgtcctcctctcctgcagcgctggcagcacctgacccagcccatctggggcctccaccacttggagtaccgagctcaggacgcagatgtcaggggcctgaccaccctgaccccagtgtccgagagcagcaaggtcgtcgtggtggagagtgtcatgtgacaactcagctcacatcaccagctcacctctggtagccatagcagcccctgcttcagccccaccgcacccctccagggggcctgcctttccctgacacttttggggtctgcctgggggaggaggggagaaagcaccatgagtgctcactaaaacaactttttccatttttaataaaacgccaaaaatatcacaacccaccaaaaatagatgcctctccccctccagccctagccgagctggtcctaggccccgcctagtgccccacccccacccacagtgctgcactcctcctgcccctgccacgcccaccccctgcccacctctccaggctctgctctgcagcacacccgtgggtgacccctcaccccagaagcagcagtggcagcttgggaaatgtgaggaagggaaggagggagagacgggagggaggagagagaggagaagggaggcaggggaggggcagcagaaccaaggcaaatatttcagctgggctatacccctctccccatccctgttatagaagcttagagagccagccagcaatggaaccttctggttcctgcgccaatcgccaccagtatcaattgtgtgagcttgggtgcgagtgcacgcgtgcgtgagtacggagagtatatatagatctctatctcttagcaaaggtgaatgccagatgtaaatggcgcctctgggcaaaggaggcttgtattttgcacattttataaaaacttgagagaatgagatttctgcttgtatatttctaaaaagaggaaggagcccaaaccatcctctccttaccactcccatccctgtgagccctaccttacccctctgcccctagccaaggagtgtgaatttatagatctaactttcataggcaaaacaaaagcttcgagctgttgcgtgtgtgagtctgttgtgtggatgtgcgtgtgtggtccccagccccagactggattggaaaagtgcatggtgggggcctcggggctgtccccacgctgtccctttgccacaagtctgtggggcaagaggctgcaatattccgtcctgggtgtctgggctgctaacctggcctgctcaggcttcccaccctgtgcggggcacacccccaggaagggaccctggacacggctcccacgtccaggcttaaggtggatgcacttcccgcacctccagtcttctgtgtagcagctttaacccacgtttgtctgtcacgtccagtcccgagacggctgagtgaccccaagaaaggcttccccgacacccagacagaggctgcagggctggggctgggtgagggtggcgggcctgcggggacattctactgtgctaaaaagccactgcagacatagcaataaaaacatgtcattttccaaagcaggctcctgcttccgcctctgctgctctaaggaaggggtcggggtacaggaggcagggggaacctcctccagctggagctgctgccgtgagcaaggctctgctctggaggcctctgcggccggcacccttctggggactgggaagggggcagggaaggcagcagcccaggggaaggccttgtccccctggagccgaggcagttggggagagcaggacgagagtgagctggagagcagccacacccgcggggaagggtgggcgtaaagccatgggtgctgaaattttcaaaatgttaccccaagaatttgtcactgaacaggtgccttgtgtcacttgggccaggctggtagcagcagaggggataactctgcatcagggatcaattttgaaggtggagccaataggggttgtgcatgaccaggatgcagggctcaaagaggagt

SEQ ID NO: 17376 - DNA, 1372 bp, Homo sapiens
gtggcccaagtttgggcaccacagcaggtggggaggaagggtccagcctcaaagggggcacccatgccctctgtatggggcaggcttggcagatgggcttcgagggcacctgtcaaaggtgtgcagagttgggaagggtctgatcaggtcttgaaggggactggatgccttgctgttccctgcagccaggactcagcccccagtgaggtcctggcagtcctccctggctggcgttaggtccagggctttccctagagcgtgggccagggctgacgctcccaccctggcaggcctttgggtgcagctggggagggggccccttgttcacttgaatagctgttgttaggagagaggggaaccgaggtggacctctggggcatggggctggaggtggcaggggaggagtggacccggccaacctactgctgtgggatttctgtccctttccaggctgcagtagatggtcccatggacaagaaggaagagtaagggcctccttcctcccctgcctgcagctggcttccacctggcacgtgcctgctgcttcctgagagcccggcctctccctccagtacttctgtttgtgcccttctgcttcccccattcccttccacagctcatagctcgtcatctcggcccttgtccacactctccaagcacattacaggggacctgattgctacacgttcagaatgcgtttgctgtcatcctgcttggcctggccaggcctggcacagccttggcttccacgcctgagcgtggagagcacgagttagttgtagtccggcttgcggtggggctgacttcctgttggtttgagcccctttttgttttgccctctgggtgttttctttggtcccgcaggagggtgggtggagcaggtggactggagtttctcttgagggcaataaaagttgtcatggtgtgtacgtggtgcggtgtgtgactgcagctgtggggagggctctgctttctctcctgcctggagcccccaagcggccacagcccttcaacctgtttcccccactgaaggccaggctcacacctgttctcgaaggccttgccctctctgtcctcctgctccccgggctgggccaggcctcgcttcagggccacccgccgagtgtgtgtcctgtctgcctccctgggtgtgggcagcttgggaggctcagtaaaccggcggggcttccgggtagaggactcgcttgccttctctgggttcctgttcgtcacatttgggacagacagaacgtggcagaacgccactagtcactccctgcccccccccccgaaggtttgcaggatgacctctgactaatgccagctgggagaggagacttgtccttggcagtgacctggagctggcccaggg

SEQ ID NO: 17377 - DNA, 1141 bp, Homo sapiens
cgtccagagtgtggcacggtagccccagcatgcctgggggctgagaatgaggggagtgtgggagtggcgttcaggaggggagtgggcggctcccaagcggcctgcctgtctttggtctcccacgcatagacttaagtctggggcgttttcccccaataccacaggcctcgcctgctgctgctgtgtgcaaggcgtggttgtcattgggtctcgcttgcaggctgggatcttgctccctgtctcccactctcagcctccctggaggttacccttgccgagagccactagagttcctctccattaaagggactgggggatggcctctgtgtttcttttgctttatcttgagcttttttgtcagccctttccctctactttgggggcctgcaaaagcagaggggctttattttgagaagtagcctcctgtataacctcgtttgagatagatttgggccagtttctggtgtctgtagcagtcgggttttttccccctaattcctgtcttttcgtttctgttttcttggtcatttacatcatttcaagaactagagaaagctgaaaaccaggttctggccatgcggaagcagtctgagggcctcaccaaggagtacgaccgcttgctggaggagcacgcaaagctgcaggtcagccctcccgtattgctgcgcccagggcaggagagcagagcaggatgaggcagcccctgcgggtgcggagggaaccttccaggggcccaggggctggctgccctctccaccactccccctggccacctctgccctactgagtgggacccttcaccgggcaggaggggggtggcctggcagcagatgtaggcacttgccaaggcggccctcaggagtggcactggctcactaggctctgagccttcctaccttcgtgctcaggcgcagccatggtttggggcctggtcaagaacaaagaagcaggtgaaactctgggacccactgctggccttctttcctagggtgctggggagtgacgtagggcaaagatccctgggcaagtgagggcacaaggtgtcaaaaaggcaccttccctagcaggcgctagttgtggccatcacctgctgccctaggcctgatctgagtcctcagactagcttgggtgcaccaggccg

SEQ ID NO: 17378 - DNA, 1194 bp, Homo sapiens
cagaaggcgtccctctgatggggtgggagatccaaaagggtttctggggggaggtgaggattgagctgggtcgagaggacattccggcctggagaactgccacacagagccaggcgtgttccaggaatggtgaggggttaggtgttactagagcagggggccacgtggttagtgaaggaggagagctcactgagggcatgcgtgctggcagcaggtggcttaagcagagggctgacatggtcggatttgccttgctctgggaggtggatgggaaagccgtatggcagcagatagggaggaggcgccagcagtggggatgatggtgggcatgtttgcagttgacatggaaagtgctgggttgtggcttgggctgggggccaagagggctgagtccaaggcggtttgcctgcccaccactacagcaggggctacacgaggtggtcaggtcaggcaggacaagggaaggcccgttttggacaagctgagtctagaatgtctctggggacatccaggagccaatgtttagcaggaggttaggtatgagtctgggccacagagaaaaccctttcggggataagagtggctgggaggaaggtatagggtgtcagctgaagagtgcagaccccagagggagcagaataacagtgggaggagggtgttgcgaggggacctcaggagggtaacttagcagcagagcaaggagttcagggtgacctccggcctgggcggttaggaggccactggtggccctgctgctggcttggaagggcaggccttggccagcctaggttgaggaatatatgggagggaaaagaccaggggcttgggcagggtgactccaggaaggaggcagttgaaggtgaggttcctggggggagaatgatcccgggtcatccagcaggaagagagaggacctagaaggtgtgaaaaagaactatcgggctgggggtgcagtgggaggagtatgcccggggtgctgtgggggtggggagcgcctgtgagggttggcaagaggaaggggaaccggggcctggcagaggggagccccagactgtctcaaggctgggaactgaaggcctgggctggggctgagcagggccaggctttcggacacacacagcgtggatcttgcgctggactttgtgtatgccctggcctatcttggaagccctggttctcaatagccgggaaggg

SEQ ID NO: 17379 - DNA, 2571 bp, Homo sapiens
cagcagcctggagcatgaggtgtgcatggggggcccgagatgagcccccccagcgtcaagattaaggggagagcttaaggaaccagggacaggtgtacccttagagggcaggggctgtgcccgagggagaagccagaaataggcagacagggttgcttcccacggtggcccggtcgcgccagcttgtttggccagtgctgctcttcagtagcacatgggtctcttctccccatgccctcctcagagtgtggcgggagtggtggagagcctgaagatcatcaccaaggccaagtccctgcgcattgccgagtatgccttcaagctggcgcaggagagcgggcgcaagaaagtgacggccgtgcacaaggccaacatcatgtatgtcccctgacctctctgcgagcagtccagaagcagctgcagtggcctgcttgggcctgctctgagggatttgtggtccaaaagcccagctacccaccgaggtgccaccctaggcgagtgccctgttgccctcgaggccttgccagaacccacacttaggggaggtggggtgggattctgtccattttgctggtgagggacaggttagaattcagaccccagcctcctggggccctctgcacgccccgtccctctggctgactgttgcgatggccaagctggtgtcctattcctaaccccccaccaggaaactgggcgatgggcttttcctccagtgctgcagggaggtggcagcccgctaccctcagatcaccttcgagaacatgattgtggataacaccaccatgcaggtattagcctgcccagtgctgtccccctgccctgagtgccctgggcttctctcacccatgcttccgaatctgctcctcagccagccccctccttgtcccgcagctggtgtcccggccccagcagtttgatgtcatggtgatgcccaatctctatggcaacatcgtcaacaatgtctgcgcgggactggtcgggggcccaggccttgtggctggggccaactatggccatgtgtacgcggtgtttgaaacagtgagtgccggtggcagtgccgcggcttgccgcctttctcctgttcacagacttagtgaggcacactcatcccatccggttagcccgttcaaaatgcatgatttagtagttttttggatatccagggttgtactgccgtcaccaccaggtcattccagaacattttcaccaccccacgaggaaagcctgtccccataagctatctgtccccacaccttcccccaacccctggcacccgctggtgggcttttgtccctgtggagtggcttcttctggacgtgtcacaggagcagagtcactgcccggcatccttctgccctccacccactctccttcgtcttgcctccccaggctacgaggaacaccggcaagagtatcgccaataagaacatcgccaaccccacggccaccctgctggccagctgcatgatgctggaccacctcaagtgagtggctcccagtgccccgcaagcccctggccagccctccgggccccagggactgaaggctggctgtcccatcctctaggctgcactcctatgccacctccatccgtaaggctgtcctggcatccatggacaatgagaatgtgaggttcccctcgcaccctaccctgctgccccgcccagtctccccctgcagcctcctgtagcccgcctcatgcactgaccacagcccccaggggaggatggtactggatctggccccatcttctggcccttagctggtgccacttccctcctgtggcaatcccagtcctgcacgtcacaggagacagcggggggtggcagggcctggtgtgtgccgagcctgcctgtgtcctacagatgcacactccggacatcgggggccagggcacaacatctgaagccatccaggacgtcatccgccacatccgcgtcatcaacggccgggccgtggaggcctaggctggccctaggaccttcttggtttgctccttggattccccttcccactccagcaccccagccagcctggtacgcagatcccagaataaagcaccttctccctagacttggcgtgggcctccctcactccaggcaccgatgttcagtccacactttattaagaaaggaatacacacactttctccgagagccctcacgggggtctcaggcagaacacgctctgagagccgggcctggctccagcgtctctctgccctgtggttgtggagaactggcgcccagcagggtggtgggagctgtcccgcttttcccttaaggcacggagagctggaggtggagccacagccgggcctaggggttgagccaggggtgctggaggcagtcagcggcactggcccgcttttcggggatgtactccatcatgggcagcagaaaggcgctgaactgtgtggcctgctctaggggccactcgtacttttccatgagtacctcgtacaggccccagtgcttgagattgtggatgtgccgcagctctcctgcgggcaggccagcgggcgtcaggctctgtccctgtctctggacctgccttctgcttaggccc

SEQ ID NO: 17380 - DNA, 1188 bp, Homo sapiens
acaggcgcggacccggtactgcgcacgcgcgcggtcgcaccgattcacgcccccttccggcgcctagagcaccgctgccgccatgttgagggggggaccgcgaccagctgggcccctggctcagggaggggccacgtcagtgctgccagagacgtcacaatgccggcccagccgttcggtgcgcgattggctgccgctgccacttacgcgtcgctcttcctcgtttgcccctcgtgttcatgggagctcgttttcttttcctctaggcagagaagaggcgatggcggcgatggcatctctcggcgccctggcgctgctcctgctgtccagcctctcccgctgctcaggtagcggcccagccggggcttctttcttgcgagcctctgacccacggcaggtggtgttgggggcaggagggatgcgggggtccggcctttcagggtccgtcgctgcgggccgggccttcccccgagaggcaggcggccttgggacggggggaccaaagcacctcgcgcacgtttaccggcagccaggcttttccttgtctgcccatacgaagaggagtccccgagcctccatggtgcgcccggcccccaagctgcagcacggaacgtgacacatgtcccggctcccgctccctgcggggtcggaccggagcgaagctctgtagcgctgagcgatcgcggccaaaaacggggctggaggagccacataagctaggaagggacctcagtgaggagagggagcaagagcggggcgagttagatggggagccaaaggtgcgcagggccttgagtgccaggccgaagactggcttttccggagggccctgccttacccttaccagagttttcggcagagccgaccaggggtcccgtcgatttgcattcgtgaggggctgaggtctgaactccagagtgtgtttaggaggtggctgcagcagccagccccgggcccgggggccaggactggacaggggcggctttctccacattcccttttctgccgtccttcaggccagtagccttgctgcctgcaacgttttggcagcctaactggcctccctttccgcacactcctcatctgcccctcaggaattccctgaactatagtcagggacgtatccagaggacaagcctggccataaaacccttcgggggctcccctgcgccacaggaagcaggccca

SEQ ID NO: 17381 - DNA, 2729 bp, Homo sapiens
gcagcagctgcgtgagcgctgcatgaaggcctggctgctggaggaggagagcctctacgacctggcggccagcgagcccaagaagcacgagctgtccgacatctccgagctgcccgagaagtcggacaaggacagcaccagcgcctacaacactggggagagctgccgcagcaccccgctgcttgtggagcccctgcccgagagccccctgcggcgggccatggccggcaactccaacttgaaccggacccctcccggccccgctgttgccacccccgccaaggcagctcctccaccggggagccccgccaagttccggtccctctcccgggatcctgaggccggccggaggcagcacgcggaggagcgcggccgccgcaaccccaagacggggttgaccctggagcgtgtgggccctgaaagcagcccttacctctcgcggcgccaccgcggccagggccaggagggcgagcactaccacagctgcgtgcagctggccccgacgcgaggcctggaggagctgggccacggccccctgagcttggccggtggccctcgggtgggcggggtggcggccgcggccactgaagcaccgcgcatggagtggaaagtgaaggtgcgcagcgacggaacccgctacgtggccaagcggcccgtgcgagatcggctgctgaaagcccgtgccctgaagatccgggaggagcgcagcggtatgacgaccgacgacgacgcggtgagcgagatgaagatgggccgctactggagcaaggaggagcggaagcagcacctgatccgggcccgtgagcagcggaagcggcgcgagttcatgatgcagagccggctggagtgcctgcgggagcagcagaatggcgacagcaagcccgagctcaacatcattgccctgagccaccgcaaaaccatgaagaagcggaacaagaagatcctggacaactggatcaccatccaggagatgctggcccacggcgcgcgctccgccgatggcaagcgggtctacaaccctcttctctcagtcaccaccgtgtgagctgcccgggcgggtacacggcccaggcccagggaaccccctggggccccggccctcactctcctatagagattgtgtgtgtgtgtgtgtgcgcgcgcgcgtgctcgctgtgcgcacgcacacatctcctcgtctgggtgtgcgcacagggctttgttagcagagagaagcccctgaggagaagggacgcttttcttccttctgcccaagtaaagtgaccatgccagtggccagcactgggggcacacctgtgatgggcaccccttcagctgtgcgtgtgcattccccatcccccatgctcttgcgtgtgcttgcacgtgcacgcacacacacacccagtgctctctccacccgacccgtgtacttgcagacagggaagctgagctgaaaggagcacaagagagtgtccggcttcgctgctgagcgcggcctctccccgccgctgcgcactgcagttatttgtagacaaaggcacccctgatttttgtggtttttctccctttctgtgcttgccaatagttgttttgttttgtggacctgccctgggggctggcagctccttcaggcagcctggcagaagtggaactcccctctccactgatggctgggaagggagttggggaggaagagtgggagggagggctggggatggatgggagggaaggggagggaaaggtgggaggaatgggaagcagctgttctggtggcttccactctgaggtgtgggaacggggagcctctggggggcacctgtttccccagtgactcagagagagcaagactgcaggaacggaggggtcctgcagggtgtccaccaagaagtcacagagcccgttctgcgccccacaccatctggagcaggggcttctcttctgagtgaactgaggaaggtgcttagatggtgagggctctagaaaccaagccccatgagcagcagtggaagacctcgggccatgcggcctggggaggacttggtggcgatccgcaacctggaccccagtgagaggcggtgggctgactgggaaggagaggcccccaacctcctcaggatttgcacgtgtgaactaggctgcctgtggggtgccccttaggcttggagagccccagattggaggcagacagactgcaccaccccttccccccctgcatctcaagaataaagcaagctgcctttgtacttggttgaatcgtggcctccctgtgttcattcttattgggctggggaaagagttgtcagtttggggtgggagaaggaagaggggggcagggttagggtcaactgaaagccacgctgcagccctcggtttgtcttggatgtcaggagcagtgactgtgacctcccatggacaattgtgtggcactccaggagatataccagagtcgcctgagtcatttcagaggtgtcacagtcacagggtggtgaccagatgcagaaggctggcagaagcctgacttcagactagcctccaggcaagggccacggtcatctccatgggccaaaccgtaggtggggcccgctgctggcacatgccacagagaagtgggttccagccccatccctcccagcagggcctgatgccgtccactctggaaggcggaagctgccctccccatttggtgatcccacagtgcctagcaaggtgctcagtttgcagaaggcacctagtggatgtcttggccagat

SEQ ID NO: 17382 - DNA, 1221 bp, Homo sapiens
aggagccccaagacagtggctgcaggcgagaccgactttggatgccagctcttgtggctacgttgccaggagtcacgacctcagtttcctaggctgggctttagaggaggccatctgcctagcagcctggagggtgatgggagaggcagagggaggaggcttttagaagggaagtggggaggtctagggaccagtgggtggcctgcctgctcaaaggtagttctgagtcagggttctgcccaaggctcatcgggtggcagggctggtcaaggggcagcgctctgtcgtgggggcctccatggtagtcggtaagcccaggtagcggtggactggggctccagccaggtgtccccactcagtcccgcgtgtcctgcctagccctgctgcctcactatgcccctctcctcagccagcgacagggccaggctccctttgtctggaaacttaggccctgtctctttgcccccgcttctccctgggttcctggtggcagctgaggcggcacctggagctgaaagagaagggcaggcacgtggtgctgggtgccatcgagaacaaggtggagagcaaaggcaattcacctccgagctcaggagaggcctgtcgcgaggagaagggcctggctgccgaggatagtggtggggacagcaaggacctcagcgaggtcagcgagaccacagagagcacagatgtcaaggacagctcagaggcctccgactcagcctcctagagcctgccccatcccctcctcaccccacgagctttcacaataaattcgctccgtggcactggggaactttgtgtgtgagcgcgcgcacatttagagggtgtgtttctccaggtcctctggtggggatgtgagccttggccttttgacccagagcatcctgccaggcccgagtacaaggaaagagctttggaggtgggactccctagtctcatgaccttcagcagctgtggccccggggaaggaggccctggacttatgggagagaccctgccttggaggtctgcttggccacgctgaatgtgttttgtggcacaagccggggctgctcaggctcaaagctcaacagcagggctcccactcttggtggccttcagttctcttcccaccttcaccttcagactttctctccctaatcacacctgcttcgggctacagcagctccccagcatacccgtgggctccagatgtggacatccaactgctcattgggc

SEQ ID NO: 17383 - DNA, 1224 bp, Homo sapiens
agggccaaggccctcagccgccctgccggggcccctggtgtagggcggggtgggtggcagccccgttccccctcatcccagaccctccggccatcccagcttttcccaccaagcaggatcttgagaccagagctcccagcaggggccctggagggactggcccattcgagtggagggtcgcggcaggaacaagtgcgggggtcgggctcaaagccccgccccaggcccagcggaaccctgaagaggagggggagggtgagccgggcgcggctgtgtcagctgagtgacagtcacgggaccgcgaccaactctgtctggcttcctagaggagcaggagggatgagcaagggtctcccagcgcgacaggccagtggtggggtgcttggggggagtgctgtcttggagggtcccggggatggtgacgtctgaagccccgtgcagaggtggggagatccctgagggctggttcccgaggctgggggggcctaggtcccatgtgggggctgcgccttcaagccccatttcccctaggacatggagaaagagcgagagactctgcaggcctggaaggagcgcgtggggcaggagctggaccgcgtggtggctttctggatggagcactcccacgaccaggagcacgggtactcggcgtgcttctggagtcctcagcagggtttttgcccttcctgaggccccttctcactctcaggcacctcacagatttgctggccccagaggggcaggaggggctggcaaggcccgttccagactttgctaaccctgccttcccacaggggcttcttcacgtgccttggccgcgaggggcgggtgtatgatgacctcaagtatgtgtggctgcaggggaggcaggtatggtgttcccagcctggaagctcaggcacacggcccatcgcctcaaaggtctccccacctcaccccagccggccacttaagccactttccctcccgtaccccgcaggtatggatgtattgtcgcctgtaccgcactttcgagcgcttccgccatgctcagcttctggacgcagcaaaagcaggtaggtgcccccttcctgcccatctcccagtgactccgtccatgtttactcaacagggcacatgtgcggagttcctagagggatctagaagcagcgaaggacttggggaggctcaagggtggtgtgtgcggggcgtcctggccttacccctggcatgccaaccccccaa

SEQ ID NO: 17384 - DNA, 1764 bp, Homo sapiens
ccagtcacctaacttcccttcctcaggctcccccggcccaccctgctcagtgaccccacaggaagcttacacattttctcagaggcctttgtgctcccacctcttctaccctccccctcttctttcccattttaaaaaagaaaagaaggaaaaagaaaaaaggggcaaggagccccgcggcggcctgggcagcgcctgtgcagacctccctgcaggccgcactgccaactgctgcatttgttgtgttttttaggttgcaattggtgaagttcacactttcattgtaattttagcgtgtggggttttgtcccttttttgttgttgttagctgtgtacagaatgtgtaatcttttttcttttctcttttttttgttttgttttgttttgtttttgtttttttacttttttcttcttggctaattcttggcagggatctttctggaggaaaagctggggccagccagggcaggagaggtgtgaaatctgccacgaggggcctgctgtttgccacccagcccaacttcctgttgctggcccctgccctctgcccttttgcctgtcctcaggccgctggaacaaaggaaggacagctcattcctcatgggcgatcactccgcatctatagggtcgagcctaggggagcttgagggagggctggggcctccttgtcctggatttccagctctccccatgccccctccctgagcaccaccggcaccgcctcccaaacagggctgctggtttccgcagccactgctccacctcccccaaatcgtcatggaaagggtggagaatggaggggaaccaggcgtccttggaggcagcttgggagggtgactgtgtagtgtcacccacaagggaggctagggcaatggagcaggccaccagcagcagctgtgcagcatggaactcaggccaggctccgaggctgggggatctgcttggagttttctgccccccaccccaaacttctgtcgaggagcaaggcttgccagcaagtcagaaggatttgaaccgagcagccaatctttccagccctcccctaccgacctctgcctggagacgcagcagcctgtgtcctccagggcctctggtttgttgtattatagtatatttcgctgtggaaaatgtcacgtttagtcaccttggagcccactcacctggtcctgttgttttaccccatcccttctctcgcgcgcctattgatttgtttctgaggagagtacaccgttcactattgtagagtaacccctgtgactcaatattaccatagtgcgatgtcgttttgtgctattttgaacaattaaaagactttttttgaaataaccactaggtgtctcactgtgtcccggcatcctctcaggaagcctgagcgggaaggctgagacctgcccgaggctcacgggagccccctggagggagacctgagctctggtgaaagcgtagaaggccccagagtgaggcctctgctgtggcctccggtctttggaccaagtcggaccagggtccagcaggttgcttggtagctgccttgcagggcaagggccaaagagccccttgggcagctgctgctgacttcctgtgtctggggcccagatctccctccctcccctcctgcactagaggataggatggggcaagggcctggcaggtcaccagcggcagcctccttgggtgggttggggggaggtgggctgagtcaagtacaccacgggtactgcagaggtggatcccttcctctggcttcctcttaaatgtgagcca

SEQ ID NO: 17385 - DNA, 1153 bp, Homo sapiens
gtcccgggcccctctgtgccggtaagagcccagggggccgtgttcttccccgccttcccggcctacgcccgtgcagttccacactcagacgccagatgtcgctcttgtaccaggcatggggccgctcctggtcccttttccggaccataaaagggcagcctcggtgcctgctgcggcaggaggcaggagcctcaccgtcccccgcatctctggggcgcttttatttctgggactggttctcatcgcgtgtcacttcaccgcagcctgtataagacatggcgggggtctgagtgcccatttgtccaggccagggtgactgaggacgggttaaacctgaccgggggtctcaagggcctttctcctcatgctggtcagagaaccactgtcccctccctatttaacatgggctggagctggcccatcaagaatgaaaacttaggcccacaaggaaaggtgagggctggcttgcttctcagccctgctgcctggctctggcccctctcctcccctctgacaggggcttctctccctttctagaagatctcatcaatgactgagactgccccaagggctctgactactgaagtccccatcccggccaaaataacagtgaccatagccaacacagaaacttctgacatgcccttctctgctgttgacatcctgcagcccccagaggaactccaggtgtcgccaggtcctcgccagcagctgccgccacggcagcttctgcagtcggcttccacagccctgatgggggagtccgccgaggtcctgtcagcctcccagacccctgagctcccggccgccgtggatctgagcagcacaggggagccatcttcgggccaggagtctgccggctctgcggtggtggccactgtggtggtccagccacccccacccacacagtccgaagtagaccagttatcacttccccaagagctaatggccgaggcccaagctggcaccaccaccctcatggtaacggggctcacccccgaggagctggcagtgacggctgctgcagaagcagctgcccaggccgcagccacggaggaagcccaggccctggccatccaggcggtgctccaggccgcgcagcaggccgtcatgggtgagtgccggtgcaaccctggggaagccgggccgctcg

SEQ ID NO: 17386 - DNA, 1147 bp, Homo sapiens
cctgtcctcacagcctcttcctcatcccagttgcctttgaggcaaagtggtgcctcttccctggcctctgagcaagtcagtgtcttgggggcaggggtgagtgggtcttacgtctgccagggccgttgagaagtggtcagtggtcccagcctgtgtggtgacagtgcaggacagtgggagggacaggcagacagccagctgcagcactaactctcctcctcgtgtgtctccccagcccgtgtcccagcccacccaggtaactctgatcacggcacctagtggggtggaggcccagcctgtgcatgacctccctgtgtccattctggcctccccgactacagaacagcccaccgccacagttaccatcgccgactcaggccagggtgatgtgcagcctggcactgtcaccttggtgtgctccaacccaccctgtgagacccacgagactggcaccaccaacacggccaccactactgttgtggctaaccttgggggacacccccagcccacccaagtgcagttcgtctgtgacagacaggaggcagctgcttctcttgtgacctcgactgtgggccagcagaatggtagcgtggtccgagtctgttcgaacccgccctgcgagacccacgagacgggcaccaccaacaccgccaccaccgccacctccaacatggccgggcagcatggctgctcaaacccaccctgcgagacccacgagacgggcaccaccaacactgccactacagccatgtcgagcgtcggcgccaaccaccagcgagatgcccgtcgggcctgtgcagctggcacccctgccgtgatccggatcagtgtggccactggggcgctggaggcagcccagggctctaagtcccagtgccaaacccgccagaccagcgcgaccagcaccaccatgactgtgatggccaccggggccccgtgctcggccggcccactccttgggccgagcatggcacgggagcccgggggccgcagccctgcttttgtgcagttggcccctctgagcagcaaagtcaggctgagcagcccaagcattaaggaccttcctgcggggcgccacagccatgcggtcagcaccgctgccatgacccgttccagcgtgggtgctggggagccccgcatggcacct

SEQ ID NO: 17387 - DNA, 1194 bp, Homo sapiens
tcccccgacatatgagtgtctgcaagtcctcactggaggggaaatggagtccgggttataaggcgtgctgtgtttctgtttagtttacccttttctatcttctccttgctgccttttgtgtctaagggtagtgaggagatgggcagggctatggctgtgacttgtggatgttcattatagtctaggggcagcaggggcagccctcacagagcctgtctcccctgggccccactctcccatccaggtgtgaccagcagtcctggcatcaagtcccccatcaccatcatcaccaccaaggtgatgacttcaggaactggagcacctgcgaaaatcatcactgctgtccccaaaattgccactggccacgggcagcagggagtgacccaggtgaggcactcccagccgtctctcagcccagtgtcctagtgcagtccaccccagcacgccacgcaggtcctcccgacaggcctgggaggggcagcatcggtggcatctaccagcctggtggtgacgttggtggcactttcctctggtgttccaggtggtgcttaagggggccccgggacagccaggcaccatcctccgcactgtgcccatggggggtgttcgcctggtcacacccgtcaccgtctccgccgtcaagccagccgtcaccacgttggttgtgaaaggcaccacaggtgtgtacccataggccaggtcccctgccacccctagattataacgaagcagggctggccttcaatccccatggcacagctgggtggcacagcagctcctctctcccgagccttctatgcaagcagctccagagtgccccagcctgtgcaggaggagctgctgggaaggagacagcagcagccttggcccaactcttgcctcctttccttcaggtgtcacgaccctaggcacagtgacaggcaccgtctccaccagccttgccggggcggggggccacagcactagtgcttccctggccacgcccatcaccaccttgggcaccattgccaccctctcaagccaggtgatcaaccccactgccatcactgtgtcggccgcacagaccacgctgacagcggcaggcgggctcacaaccccaaccatcaccatgcaggtagggcagggcctgaggccacgtgtgggcgagggaccccacacaagtggaagcacgtgaggctcacgccgtccgtccac

SEQ ID NO: 17388 - DNA, 1583 bp, Homo sapiens
acaagatggcggctcccagggaggaggcatgagcgccctgccgttaccgcttcttctgccgtacagttgccgcttcggggcctaactctagctctttgaagcggctcctgtgggaaggagtcataaggcgggaagtgaggatcggacaccgccttgagtttggtgtgcagtggaagaactgacctaggaggaagagaataggggggaacggggagctagtctcaagatggcggctcccacggcggcaggcgcagcctgagcagcagaggcggactaaggggagaggcgcgagacttcacaagccgtacggcgcgagcccccaaacggccctcgagagctcgagctggttccaccggcctccggcccgcctccattcgttaggtgtgtcgaggctgtttcgggagcggcggctgcactaaggcgctgggcggggaagcgggacggtctcaagatggcggctcccacaattgtggtctgagcgccggcggggctgcgacgaccgcggcgcttgtggctcctttccacccgccccggaagccggccagtgctggggacttgggggtgtgggaaccgggccggggctccgccatttccggcgggggagggctacgactgaggaagggaggagagagaggcggctcaagatggcggctcccagggcctcccgcccgagcttgtaagcgggagcgcccggacaagtagtcggggcgacgggactcagcggcctccagcttcttgagcctaggcgctcgacagtttcgggcggctcttgcggagacggggtgagcgagaagaaagggaagagccaaagggaaggagggcagttaagatggcggcctccatggagtcgtctaccgctgtgtgagaaaccgcttctccgtgagagctgccttagacgaaagggggtgtgtgaaaggaattgaggggctcccttcccgcttgttgacttctccccaccgcaccctttcccggaactatggcttcggccgtgtcgcccgccaacttgccagcggtgcttctgcagccccgctggaagcgagtggtgggctggtcgggtccggtgccacggccccgccacggccaccgcgccgtggccatcaaggagctcatcgtggtgtttggcggcggcaacgagggaatagtggacgaactgcacgtgtacaacacgggtgagtgcaaagcccgctgggtcttcggctctttccctccctccatctcctccctctccctcctctttcctccctccctccatctgctccctccctctcctccctccctccatctcctccctcaccctctacccttccctctctctctcccctcctcccttacccgtccttctcccctctccccgtccccctcccccttctcccctcctccccctccctccccactgatcggcttgcccctcccctttgctgtgccgggcttcagtgcttttctctgatcttctccccgttcccttgtctctcccgtgtttgaggattggttttcgttagttaaaagaaagcccctagtccgactggtgagggagaggggctgtcgccagcggtggtgacttcagacccacaccgttacccagc

SEQ ID NO: 17389 - DNA, 1222 bp, Homo sapiens
ctctttggacagtggccaccctgcacaatggggccgacgaggcctagggccctcctacctgcttacaatttggaaaagtgtggccgggtgcggtggctcacgcctgtaatcccagcactttgggaggccaaggcaggaggatcgctggagcccagtaggtcaagaccagccagggcaacatgatgagaccctgtctctgccaaaaaattttttaaactattagcctggcgtggtagcgcacgcctgtggtcccagctgctggggaggctgaagtaggaggatcatttatgcttgggaggtcgaggctgcagtgagtcatgattgtatgactgcactccagcctgggtgacagagcaagaccctgtttcaaaaagaaaaaccctgggaaaagtgaagtatggctgtaagtctcatggttcagtcctagcaagaagcgagaattctgagatcctccagaaagtcgagcagcacccacctccaacctcgggccagtgtcttcaggctttactggggacctgcgagctggcctaatgtggtggcctgcaagccaggccatccctgggcgccacagacgagctccgagccaggtcaggcttcggaggccacaagctcagcctcaggcccaggcactgattgtggcagaggggccactacccaaggtctagctaggcccaagacctagttacccagacagtgagaagcccctggaaggcagaaaagttgggagcatggcagacagggaagggaaacattttcagggaaaagacatgtatcacatgtcttcagaagcaagtcaggtttcatgtaaccgagtgtcctcttgcgtgtccaaaagtagcccagggctgtagcacaggcttcacagtgattttgtgttcagccgtgagtcacactacatgcccccgtgaagctgggcattggtgacgtccaggttgtccttgagtaataaaaacgtatgttgcaatctcgggctctacttgtggactttgttgcaccgaaagccttgagctttcctgatgccttacacttcagggttcttgagcgtccagggtcttgttactactctgggctggccacacccagcacttcccgtgtcaggtttttcctgatgtagtccatgttttttatgctattctaaatggtatctttgattttctagttcatcatgatattatacagaaatgcaattgatgctgggcacggtggctcacgcctgtgattc

SEQ ID NO: 17390 - DNA, 1138 bp, Homo sapiens
cagagcaccactggcccacagtaggtgtttaataaatctctagaagctactcgggaatctgaggcaggaggatcgcttgagcctgggagttggagaccagcctgggcaacatagcaagataggcatggtggtacacacctgtaatcccagctgctcgggaggccgaggtgggaggatcacgagcctgggaggttgaggctgcactgagccatgattgcaccactgcactccagcctgggtgacagaatgagtccctgtctcagaaaaaaagtaagttgtagaaagaccaagagctgtggcacagtgtctcacacctgtaacaccagcactttgggaggctgaggcgggaggatcacttgagcctacttggagaccagccaggccaacaaagcgagaccccatctcttttttttttttttttttttttatcaaaacccatacgattgagtgacaaggacctgaggactgcagctgcaggtgtggccacctggtagccatactgacagtatttatcccacagaaagacctggtggaagaggaggctgaggaggctggagtggctttgagaagcacccagagcacactgcaagcaggtctggctgcagatgcctgggctgctcccatcgccatgcagatctacaagaagcacctggaccccaggcccgggccctgcccacctgagctgggcctgggcctgggccagctggcctgctgctgcctgcaccgccgggccaaaaggaggcctcctatgacccaggtagccagctgcgcactgggacggggtggccagatagaaagcccgcattccaggccttgctctgtagtgaccccatctcagcacctgctaggtctctctggagtctccacacatttcttgcttgccctttggttctgtttggggcagcgcccctctgaactgaggggccccgggcagtcctgctttgcggagcccagctccgacccccttcacatagagagaaggaaagagctgctgccgcgccccctgctgggcgcactgcactactgcatctgcctttttctgtcccctccctagtaccccacctcttctcctctggtgacagttgaaaatggagaggccccgtttgagggcagcggggcagtgagattcattttgtag

SEQ ID NO: 17391 - DNA, 1145 bp, Homo sapiens
agtgaagtggctgttccaggctgcacggtgacaggtagaaggatggttgggatcaaggaacggccatccagcaacctcccctgtccccctttgccaccccagacccaggcctgcccacctctctcctggcctcagcgactggacatccttctgggtacagcccgggcaattcagtttctacatcaggacagccccagcctcatccatggagacatcaagaggtgaggaggggcccttgagaactgccggggcagggcctgcagcaaggggggccccgcgtcctatcaatgtggggatcaggcatggcctgggacctcaacaccccggcatcgcacaggtgtgggaacgggccaaggatgggccctactgatgagcagaggcccccaggcagctggagcgctcagggcagtgccagcgctttctgtgggcaaggcaccgggctggcagcctcgagtccagccttatctaagccgggcaggtgtaggagctaggaccgggctgacgccactgtcttctctccccaagttccaacgtccttctggatgagaggctgacacccaagctgggagactttggcctggcccggttcagccgctttgccgggtccagccccagccagagcagcatggtggcccggacacagacagtgcggggcaccctggcctacctgcccgaggagtacatcaagacgggaaggctggctgtggacacggacaccttcagctttggggtggtgagccactgacccctctgctggctcagaggaggagaagccacaggcaggcagaggtgggggctgcagagtgcactgcgggccaggggccatctgccaagaccccaggaggctgcagctccagggtccccctccctccgaggccctcctcctcaccctgcacctaactgtgtgtttgtaatttgtcttcaagtgggctctccgagttgcccgagcttcagtcccataacatctggctctgcctttgtccacacccttgtcaggcccaatccatgtccacaccagaggcctcttccctgccaaggccactgccatgctctccctcttccctctctccaggtagtgctagagaccttggctggtcagagggctgtgaagacgcacggtgccaggaccaagtatctggtgagcc

SEQ ID NO: 17392 - DNA, 1624 bp, Homo sapiens
atgtggagtcagcctcgcaggcctccctgccagtagggtccgagtgtgtttcatccttcccactctgtcgagcctgggggctggagcggagacgggaggcctggcctgtctcggaacctgtgagctgcaccaggtagaacgccagggaccccagaatcatgtgcgtcagtccaaggggtcccctccaggagtagtgaagactccagaaatgtccctttcttctcccccatcctacgagtaattgcatttgcttttgtaattcttaatgagcaatatctgctagagagtttagctgtaacagttctttttgatcatctttttttaataattagaaacaccaaaaaaatccagaaacttgttcttccaaagcagagagcattataatcaccagggccaaaagcttccctccctgctgtcattgcttcttctgaggcctgaatccaaaagaaaaacagccataggccctttcagtggccgggctacccgtgagcccttcggaggaccagggctggggcagcctctgggcccacatccggggccagctccggcgtgtgttcagtgttagcagtgggtcatgatgctctttcccacccagcctgggataggggcagaggaggcgaggaggccgttgccgctgatgtttggccgtgaacaggtgggtgtctgcgtgcgtccacgtgcgtgttttctgactgacatgaaatcgacgcccgagttagcctcacccggtgacctctagccctgcccggatggagcggggcccacccggttcagtgtttctggggagctggacagtggagtgcaaaaggcttgcagaacttgaagcctgctccttcccttgctaccacggcctcctttccgtttgatttgtcactgcttcaatcaataacagccgctccagagtcagtagtcaatgaatatatgaccaaatatcaccaggactgttactcaatgtgtgccgagcccttgcccatgctgggctcccgtgtatctggacactgtaacgtgtgctgtgtttgctccccttccccttccttctttgccctttacttgtctttctggggtttttctgtttgggtttggtttggtttttatttctccttttgtgttccaaacatgaggttctctctactggtcctcttaactgtggtgttgaggcttatatttgtgtaatttttggtgggtgaaaggaattttgctaagtaaatctcttctgtgtttgaactgaagtctgtattgtaactatgtttaaagtaattgttccagagacaaatatttctagacactttttctttacaaacaaaagcattcggagggagggggatggtgactgagatgagaggggagagctgaacagatgacccctgcccagatcagccagaagccacccaaagcagtggagcccaggagtcccactccaagccagcaagccgaatagctgatgtgttgccactttccaagtcactgcaaaaccaggttttgttccgcccagtggattcttgttttgcttcccctccccccgagattattaccaccatcccgtgcttttaaggaaaggcaagattgatgtttccttgaggggagccaggaggggatgtgtgtgtgcagagctgaagagctgggg

SEQ ID NO: 17393 - DNA, 1131 bp, Homo sapiens
gagcgggaaaggactgaagacctgtaagagccctgggcggaaaagcaaggagagcagccccaaggggcgcagcagcagcgcctcctcaccccccaagaaggagcaccaccaccatcaccaccactcagagtccccaaaggcccccgtgccactgctcccacccctgcccccacctccacctgagcccgagagctccgaggaccccaccagcccccctgagccccaggacttgagcagcagcgtctgcaaagaggagaagatgcccagaggaggctcactggagagcgacggctgccccaaggagccagctaagactcagcccgcggttgccaccgccgccacggccgcagaaaagtacaaacaccgaggggagggagagcgcaaagacattgtttcatcctccatgccaaggccaaacagagaggagcctgtggacagccggacgcccgtgaccgagagagttagctgactttacacggagcggattgcaaagcaaaccaacaagaataaaggcagctgttgtctcttctccttatgggtagggctctgacaaagcttcccgattaactgaaataaaaaatatttttttttctttcagtaaacttagagtttcgtggcttcagggtgggagtagttggagcattggggatgtttttcttaccgacaagcacagtcaggttgaagacctaaccagggccagaagtagctttgcacttttctaaactaggctccttcaacaaggcttgctgcagatactactgaccagacaagctgttgaccaggcacctcccctcccgcccaaacctttcccccatgtggtcgttagagacagagcgacagagcagttgagaggacactcccgttttcggtgccatcagtgccccgtctacagctcccccagctccccccacctcccccactcccaaccacgttgggacagggaggtgtgaggcaggagagacagttggattctttagagaagatggatatgaccagtggctatggcctgtgcgatcccacccgtggtggctcaagtctggccccacaccagccccaatccaaaactggcaaggacgcttcacaggacaggaaagtggcacctgtctgctccagctctggcatggctaggag

SEQ ID NO: 17394 - DNA, 1104 bp, Homo sapiens
cacgtgtgcacacagctgctaggcccttgcctccaagctcttggtgacaacaggaggcacctggaggtgacaagcctgtgctgggtggccgaggacagggaggcaggccagtctggctctgcctgacctcctgtgctcccagggaacccagctgagttcgtcgtgaacacgagcaatgcgggagctggtgccctgtcggtgaccattgacggcccctccaaggtgaagatggattgccaggagtgccctgagggctaccgcgtcacctatacccccatggcacctggcagctacctcatctccatcaagtacggcggcccctaccacattgggggcagccccttcaaggccaaagtcacaggtgagcctggggccaagctattggcatctgcccaacgcccggcaccacagccacctcttagccccacccactctgccttgcaggcccccgtctcgtcagcaaccacagcctccacgagacatcatcagtgtttgtagactctctgaccaaggccacctgtgccccccagcatggggccccgggtcctgggcctgctgacgccagcaaggtggtggccaagggcctggggctgagcaaggcctacgtaggccagaagagcagcttcacagtagactgcagcaaagcaggtgggcaacccgggcccccggcccaccttcccaccaaaatgaggccagaaatcacaggatggccagtgtctgggagagcagggaccgcctttggggcgtggctttcacttctagagccacctccctgccacctcctggacccctcaaacaaagaccagggaggagctggaatctgctaagctggcctgggttggggaggtgctggcagctctttaggaagagagaactgtcaccccagaactggcttagggacaggagaggagagcaggacaccagcgggaggaagggggctgggacctgggactgaggacccctcttgcctcaggcaacaacatgctgctggtgggggttcatggcccaaggaccccctgcgaggagatcctggtgaagcacgtgggcagccggctctacagcgtgtcctacctgctcaaggacaagggggagtacacactggtg

SEQ ID NO: 17395 - DNA, 1130 bp, Homo sapiens
ctgagtgtgggtattggacccagggctggcacagatagccctgcctggcactcactcttcactttgaggtcacagggccacccaggctgttcgtgggaggtgggaggcccaaaggctgatgagccggtcttacactctttccctgcccaggtgactacgaagtctcagtcaagttcaacgaggaacacattcccgacagccccttcgtggtgcctgtggcttctccgtctggcgacgcccgccgcctcactgtttctagccttcaggtgaggcaccgagagaaaccgcccacctggggctcctgggcccggacagaccagagccaccgcagagaccaggccttggccctgtgttcagtgacccccctggcccagctctgggttccaggcctctgctctggccgggtgcagcccacgcttggggtcggcaggaaatatcctgcccaccacgtggagtttttctcgtgtctcaggtctaaaggctttgaacagaagcctgtgccccttgagcaccagggctgcggtttaaagagggacagcctgccaaggctgggtgctgcccacagggtggggcagccctcccttcctgccacctgggtgtgtgcgacggcagagtgtgggggcaggggcggggatgtgcgcctgtggcttgctgccccttgcaaatcagtggctctccctctttaaaccaagttggacgccagatgggtaagtgcgacccgcgggcctcttgctcctggggcctttccgtcctcccttgccctggctcaagcacccccatctaaccatgtctgctgtgcttccaggagtcagggctaaaggtcaaccagccagcctcttttgcagtcagcctgaacggggccaagggggcgatcgatgccaaggtgcacagcccctcaggagccctggaggagtgctatgtcacagaaattgaccaaggtgaggccctgtccctgcccggccgccctgccctgctggctggaagcaggctgagagtacaaaaggaaggtaccgcttctgtaagcagccaagacggggccccaactcctgggccccctaagccaggcaaccctttcccaattggtgacccaagccgctggggatgtggctcgccacccacagctattagga

SEQ ID NO: 17396 - DNA, 1183 bp, Homo sapiens
tcaccatcaggcctggggggtggggaggcaagtgtcacatccccccacgctgcagcaggactccgcctcaccgcgtccacacacagcaatgggggccggggccaggccagaagggcgcaggcagccgtgtgcccagccagatgctggcgttcagcagtgtgggccatggtgctggacgaggctgagtaggcaagggagtggctgtcaacacttaggctggagtgggcccttccttttcctcccaggcacctgggtgctactgtcgggcctctcccacatgggcacttgaggtggtcaggagaaaccttcctgccttctgagaaaccactcgccatcccagcttggaggggcagggcggggcaggaggcctggcggcctggctgtgcttggtggtggcaatgagaggcctgtgtgggcggcaggcggacgggaacaacctgaacccgagctcacacgctggcccccctttggggacccaccctgccccaccaggtgctggcatcggccccaccattcagattggggaggagacggtgatcactgtggacactaaggcggcaggcaaaggcaaagtgacgtgcaccgtgtgcacgcctgatggctcagaggtggatgtggacgtggtggagaatgaggacggcactttcgacatcttctacacggccccccagccgggcaaatacgtcatctgtgtgcgctttggtggcgagcacgtgcccaacagccccttccaagtgacggtgaggaggggtggggggtaggtcagcaggggtgtctggcaggtcccggcctgttcccctggggcccctctgtgacaacagactctccagcagctctctgctttgccctgcaggctctggctggggaccagccctcggtgcagccccctctacggtctcagcagctggccccacagtacacctacgcccagggcggccagcagacttgggtacggcctggccagctagggacactggggctagccagctgggtgttctgtgagcccctagtttaccatgtgtgaggagggaccccagatcctcccactgtccctcacccatgccctgtgtctccactgcaggccccggagaggcccctggtgggtgtcaatgggctggatgtgaccagcctgaggccctttgaccttgtcatccccttcaccatcaagaagggcgagatcaca

SEQ ID NO: 17397 - DNA, 1501 bp, Homo sapiens
tttttttttttgagaaagagtctcactctgtcgcccaggctggagtgcagtggcgcgatattggctcacggcaccctccgcctcctggcttcaagcaatactcctgcctcagcctcccaagtagctgggattacaggtgcccgccaccatgcccagctaattttggtaattttagtagagacgagatttcaccatgttggccaggctgttctcaaactcctgacctcaggtgatccacccaccttggcctcccaaagggctgagattacaggcgtgagtgaccgcgccctgccctcctttttgtccttatgactgatggatggcccatctggcaggcagcctgggcccgcccgtgtccctgtttggtgagggcaggaagccagggcaaggggaggcaggtggaaagtcaagcaggaggtctgggatcggggcatagtgtggccttggctcctgaccccttcttccctcaggtgaaggcgtttgggccggggctgcagggaggcagtgcgggctcccccgcccgcttcaccatcgacaccaagggcgccggcacaggtggcctgggcctgacggtggagggcccctgtgaggcgcagctcgagtgcttggacaatggggatggcacatgttccgtgtcctacgtgcccaccgagcccggggactacaacatcaacatcctcttcgctgacacccacatccctggctccccattcaaggcccacgtggttccctgctttgacgcatccaaagtcaagtgctcaggccccgggctggagcgggccaccgctggggaggtgggccaattccaagtggactgctcgagcgcgggcagcgcggagctgaccattgagatctgctcggaggcggggcttccggccgaggtgtacatccaggaccacggtgatggcacgcacaccattacctacattcccctctgccccggggcctacaccgtcaccatcaagtacggcggccagcccgtgcccaacttccccagcaagctgcaggtggaacctgcggtggacacttccggtgtccagtgctatgggcctggtattgagggccagggtgagttgccctgccgtggggtatgtgacgggggacagggaccagaacccccgagccccaagcctcctctctgtgcctttgcaggtgtcttccgtgaggccaccactgagttcagtgtggacgcccgggctctgacacagaccggagggccgcacgtcaaggcccgtgtggccaacccctcaggcaacctgacggagacctacgttcaggaccgtggcgatggcatgtacaaagtggagtacacgccttacgaggagggtgcgtgctggggactcccacaggctggcagacggggtgggtggggtggcccgggctcctcctgacctggcctgcactcctccaggactgcactccgtggacgtgacctatgacggcagtcccgtgcccagcagccccttccaggtgcccgtgaccgagggctgcgacccctccc

SEQ ID NO: 17398 - DNA, 1373 bp, Homo sapiens
atggcggctaggtgatcaagccacccaagagtcagacaagagtgggtttttgggactagtgaaaacgacaagagaatgctaataggttcctccagtcacagaagcctgctgcgtggggtcctcggggaggtagcatccagcggtctttattataaatggagatgaaccaggtctcagtaacagggacctaaaacccagtcaaggctcacacaggaacaagggcccagtgcggtgagaatgaatgttccagaaaacaggctgggcctgtcccagcagcgagagcacagctgggtcccgaggccaggctctgtgccacagctcacactgaatgaacttgcccagtttggaatgtgcctgacttaggggccagcagggagggctgaagggtggaggggtgaggctgtggccttaacagctggcccgtggttggctcgccttcccctgccaggcatcgagcccacaggcaacatggtgaagaagcgggcagagttcactgtggagaccagaagtgctggccagggagaggtgctggtgtacgtggaggacccggccggacaccaggaggaggtagggccagctgctggcagcagaggccccgcagcgctccctttcagtggggctgctcttagcaaaggctcacaggctccttcccactgcaggcaaaagtgaccgccaataacgacaagaaccgcaccttctccgtctggtacgtccccgaggtgacggggactcataaggtgagcccttggccaggggggaggcttgtgacctcaggcagtggctggaggcccccagccctaccctcacggcccacccttctggggacaggttactgtgctctttgctggccagcacatcgccaagagccccttcgaggtgtacgtggataagtcacagggtgacgccagcaaagtgacagcccaaggtcccggcctggagcccagtggcaacatcgccaacaagaccacctactttgagatctttacggcaggtgaggggaggctgccaaggcccagctggtctgtggggagagccgcactggggcctgggagctgagcaggtgcctcgtggcaggagctggcacgggcgaggtcgaggttgtgatccaggaccccatgggacagaagggcacggtagagcctcagctggaggcccggggcgacagcacataccgctgcagctaccagcccaccatggagggcgtccacaccgtgcacgtcacgtttgccggcgtgcccatccctcgcagcccctacactgtcactgttggccaaggtaggcccggccctgactgccctctgctgtggcactgcagtctgggcctcccacaggagggggaccccctgggccagtcccgctgcagcccgccccgg

SEQ ID NO: 17399 - DNA, 1091 bp, Homo sapiens
aacagttgtatttcccaaccacccagggccacccaccttcctcttcctcagccccagccccactccaggtcatgggccctggattctgggccagctggagtcagcctcctcctcctggttccccataggcccctgaggtgtgtggcggacccctgctctggcagctgtggacactgtccagctgttctccagagctgcccatctgcaggctgggtctgccctctgcccttcctctgggcccagggcttctggcagtaatcataccctgctggcatcgtgtgtgtgtgtctgtgtgtatctgccctcaccccaaagtctccttcacctctgaacaccccctgggaccctgggcagagagggcctcatccacatcctaccactggccaagagggggtgtctacctcctccttggcccctgctaccccgtgctgccagaccctgaccccaaagcctgggatcggcccctcccgcacagccgtgtgcccagcgtggccactcttctactcacagacagcaaggccatcgtggacgggaacctgaagctgatcctgggcctcatctggaccctgatcctgcactactccatctccatgcccatgtgggacgaggaggaggatgaggaggccaagaagcagacccccaagcagaggctcctgggctggatccagaacaagctgccgcagctgcccatcaccaacttcagccgggactggcagagcggccgggccctgggcgccctggtggacagctgtgccccgggtgagggggcgcagaggcaggagagactgggctggggtcacccatgggtggcccttgagggggttctgcggcccccagactcacagcctcccttgcgccacaggcctgtgtcctgactgggactcttgggacgccagcaagcccgttaccaatgcgcgagaggccatgcagcaggcggatgactggctgggcatcccccaggtacacccgcccggcctggctacagctgtaggggaccggatcggcagttgggagagactcggaggcccgatggctcctgttttctgcctgtgacaggtgatcacccccgaggagattgtggaccccaacgt

SEQ ID NO: 17400 - DNA, 1197 bp, Homo sapiens
gagcccaagtgacttagggaagagagccaccccaccccccgcaggggccctggggaaggaaagtcccttgtaaggcgcgccggctgcaggccaagcagtcccgcgccagacactgctcagcctttcctcgctctagggcgcgtttcctgcagcgccaacgcgaggctgcggggctgggagcatccttgcccaccccactgcccagcgacccaccctggagcccgggtttcgcgtctgatcagccgaacccgggggcctagtgggggcattccaacgggcggggcggggtggggcaggcgcgccctcgaagccccaccccacggcccctccccgcaggaggcccgccctctggccccgccctcctcccgcatttaaagggctcgctctctccgcagcgcaacctctgctccctgcctcgcctcccgcgcgcctaggtgcctgcgactttaattaaagggccgtcccctcgccgaggctgcagcaccgcccccccggcttctcgcgcctcaaaatgagtagctcccactctcgggcgggccagagcgcagcaggcgcggctccgggcggcggcgtcgacacgcgggacgccgagatgccggccaccgagaaggacctggcggaggacgcgccgtggaagaagatccagcagaacactttcacgcgctggtgcaacgagcacctgaagtgcgtgagcaagcgcatcgccaacctgcagacggacctgagcgacgggctgcggcttatcgcgctgttggaggtgctcagccagaagaagatgcaccgcaagcacaaccagcggcccactttccgccaaatgcagcttgagaacgtgtcggtggcgctcgagttcctggaccgcgagagcatcaaactggtgtccatcggtgagggacgccccgaagcgccgggcgggcgggggcggggactccgtgcgtccttccatctccccgggcggacccctccaaaccacccccttccgggccgcagcgcaactcccgaggcctccggctgctctgctccacgcgggcctgcagaacaaaggcgcgcgggctggctggctggccggccgggcgtgcgaaccgctacgcgcccccgcccgctgcgccccggctggccggcgcccaggctgaactcacatcctccgcaggccgcgcctccgcggctgtgctcgcggtgggagtgggcctggggggtcgg

SEQ ID NO: 17401 - DNA, 1433 bp, Homo sapiens
gcccgggccgccgccaggcctccgcctgagcccgcacccgccatggacaactacgcagatctttcggataccgagctgaccaccttgctgcgccggtacaacatcccgcacgggcctgtagtaggtacgcggcggcgggcgggaccccttccgggccccctcctcgtgctccgcctcgcgacctccccgctgccctccccgcgcgccttccccggcccgcggccctgaccgccccgtgtccggccaggatcaactcgtaggctttacgagaagaagatcttcgagtacgagacccagaggcggcggctctcgccccccagctcgtccgccgcctcctcttatagcttctctggtgagagcctcgcctgtggggacagcctgggacgcggggaggatggggtcgcgagggtgtggcaggggggccggtcgagagcggcactggagaaaggggagggaagtctgggggggcaaacagttctgtctcctcctttcaatccagacttgaattcgactagaggggatgcagatatgtatgatcttcccaagaaagaggacgctttactctaccagagcaagggtaaggcaggggttgggtgggcacgctggcaccttcacccgacttcgtcagggaccccgctcacagggaggacctgagacctcagtcccaaccactccagcagccttaggagggagaaactgttacaggtcccgaaatgggattcagattagggccatcaggccaggcggggcacaccgatgccccctctgctaccgctgccccccttcccaaggctacaatgacgactactatgaagagagctacttcaccaccaggacttatggggagcccgagtctgccggcccgtccagggctgtccgccagtcagtgacttcattcccagatgctgacgctttccatcaccaggtgagctggctggcaggcgtcctgtacttgggtacaacctaggggatcgcggctgtgtttggataaatccaggggggcactgggtacaaatggtggctcttgggcctccggggagactctgtgtgactagagcaccctggtctgggatctaggctcagactcttcctgagagtcctgggggcaaaaggggatgctggggcatgagcacaagtggcaaggccccatggataaagggctgaacacccagagccattcaggagggtgtgggttcctggcctctaaccaaaggtcagaggggactggctggggaagtttggactgagggacatgacagggccatggtggccctgccagccagtcccctcgccctgactctcttctgcaggtgcatgatgacgatcttttgtcttcttctgaagaggagtgcaaggataggtgcgtagtgggggagcccagggacgggctggttctgggtccaggctcctggcccacttgctcccctcttttg

SEQ ID NO: 17402 - DNA, 1106 bp, Homo sapiens
tgtttcattgaggtttggagagtgttgagggtaagctaacctgtcaccccacgcccccgagaatggttactgatagggagaggccttttccttgcaggagatggcgtctaccagaaggggatggacttcattttggagaagctcaaccatggggactgggtgcatatcttcccagaaggtcagcagggctgactgggtcgagcccccccagtatgagcgggatgggctcccaagcctcgcctctgtgctctctcaccagggaaagtgaacatgagttccgaattcctgcgtttcaagtggggtaagggctgctggtctctggccacagccatcctcccggcccagagatggccctgtgggcccctggctcccgccccctcgggctggcttgtatgggggtagatgggcgtgtttgtagcgccaggaaggggacaggtgctgagactaggcctgcctctcgcaggggcttgcccaagggagctgaattgaactggaggatgtcgggggtggcagtggccagaggctggcacagaagcttggctcagggcccagcttatgctaacatttctacctcccccctgggcaggaatcgggcgcctgattgctgagtgtcatctcaaccccatcatcctgcccctgtggcatgtcggtgagcctggggacggggacagagagatggcatctggggtggggggcctgggactccctctggtcccaggctgccctgctccaccccacgtctggccttctgtccactgtgctgcaggaatgaatgacgtccttcctaacagtccgccctacttcccccgctttggacaggtgggtggggactgctgaccttcggctgtctgcctgtctgctgtctgctccgtgtctcccactcagcactatggaggccagctgcaggaggagctgagcatgaggctacagcaggggacagagtggaacatagacagggacttcctggcaccgagacattaaaatgagagcagaggaagtcaggctggggcagaggtgggctgtggggtcaggacaggacaggtcatctacagcacaggacccaggaccaggaccttgttttagaggaagagtggcccctggggagt

SEQ ID NO: 17403 - DNA, 1223 bp, Homo sapiens
aggcagtgtggtgagtctgcttggaggtggggagtgtatgccacaggtaggctgcccaggaggcccagcataggggaagcatgaggcacagaacccctgtggtgtgactatttggagtggctgactctgggggcagggctaggatgagcactcaagtcctgcctccccattccaggggcagctttccatctcgtcctgtgaggcttgtgggtggcagacttggacactaagtctaaatgaccctaagtttgagggactaggaatgtcatcagggtttagggggcatcagggaaggcttcctggaggaaaggtctcctctggctgatgggactttgagatagtggacagggtgtcctgttgggaggggaaggagggcacgacaattgggttcaagtgtgacactctcccagggctgctgaaagaaggctggttgggtgtttctgcaggtggcccgtgatgtagccgtggtggccggagggctaggtcgccagctgctacaaaaacagccagtatcacctgtgatccatcctcctgtgagttacaatgacaccgctccccggatcctgttctgggcccaaaacttctctgtggcgtacaaggaccagtgggaggacctgactcccctcacctttggggtgcaggaactcaacctgactggctccttctggaatgactcctttgccaggcaagggcactaggctggggaggactgtgccaccacaggtgaccttcccatcactgtgggtcgcaggtggggcagggagccagggtcaggtctgtgttttggggtggggatggccatggtctggttggggtctgggcagcgtgaggatgtaggaggtgtcatggcatggggtgctgttggagggggagttgctcagacttctgcctccccatgcttgcgagtctttggttgggaccttggttgttaacacctcaaggttacctgggaacctgtcacctcccccttgagcaaaacctctgggactttgtgtgggcaaataccaggccagctatctgagccatttatggggcaaccatgcccttctgtttgctctcgcccccaaagcccagcccaggcaccttagtgaccctaagagggagtaaaaggaggggcagtgagctcaggggaaccagaggaaggacccccatgctggtggcaagggggacctgggtcctggcttccagctctgttccgaccttgcaatgtgactggatcctca

SEQ ID NO: 17404 - DNA, 1341 bp, Homo sapiens
tcaaagacatctacaaacgcatggctggcacggcctttgactttgagaacatgaagcgcaaacagaacgacgtctttggagaagctgagcagtgattgtggccgcccccagcccctgctgccccagcctgtgtctgttctcctcgagggctccagcatcctctgcttcccccaccacgttcccatcacccacctcattgatccactgaccaaatccttaaccctagcgatggcttgggagatggggggttggatagcatcctctttcttggcccttccttatcctaggaaaagagggttcctctccttgtgtgtgtctcttccccccacccctaattcttctgctctgtttgggaagacgtggaggaaaaggtgacttctgcccccaccgctcttacccccactgtagtggcctttggagatgcccccacctcccccccaccaactctcgcgtgttggagagaaggggccctcccagcacaaagttgcattcctcccccctaatttattctaatttattaactttgacccaccctttctgagcctgcagccttcccgtgtggcctgagggctgtcgagtgagctgccccagcccctcccagcccttgcccagcctgggggagtggggaaggcttgggcatggccccgttggaggttgatttgctgttttgtttcttgtctttgtgttctgtggtacttgctgagagaaaagaaaagtgagccaagcagaaggaggtgggaaaacggacccaaaccccagtgtgccctgccccatgcctttcctttagtggtgggaaacccttatcttgcaaagtgaatgtgtccccttccccaccctctagtgtatttcacagaaaacaaaacctcccaataaaacggttgaaacctgaatctctggatcttgatggttatctcccaaaagctgggtacctggcagggctttggctgcctgggttggggctctggcttagcttcactctggactgtaaaaggtggcattcttcaccagggaattcctcacccagagcacgctggggccaaattgacttaaagcttaaggctacccagtgagtcgatgctggcaccaggactgcagccctcagtgctcaatgcagggggagtgtggtggagggcgggtgtcaacgtggaggaagcagagggagcgggggtcctggcctctggcttgaaaggagagggcagaggggaccaggggccagcctcggatgggattctaagtgaagcagggagacgggtgccagttttcggcttaatgcgggggaactagggcagccaggggaccagcgttggggtcaccaggaggaattagagggaccggggccca

SEQ ID NO: 17405 - DNA, 1114 bp, Homo sapiens
tctgttgtccacagcctgccgctgcgcttctgggtgaatgtgatcaagaacccgcagttcgtgttcgacatccacaagaacagcatcacggatgcctgcctgtcggtggtagcccagaccttcatggactcctgctctacatccgagcaccgcctggggaaggactcgccctccaacaaactgctctacgccaaggacatccccaactacaagagctgggtggagaggtgggctccgccctgctgtgggtggcagagggcaggacctgcccctccctgggctgcctgtgcgaggcaggccagctacaggcaggaagcccgggggctggctgggcagtgagggcaggggttctagtttttgtgatgtcgcctgagtgacatactcagggtcccaacaggtattatcgagacattgcaaagatggcatccatcagcgaccaggacatggatgcctacctggtggagcagtcccgcctccacgccagcgacttcagcgtcctgagtgcgctcaacgagctgtatttctatgtcaccaagtaccgccaggaggtgtgtgtcatccccacagactcccagttacttggtcctgaaggtgcagccagtgacaaaggcaggagggttggtgggggttggggattgttcacggtctctcccctgaccagggcctggggccggcacaggtgatgctctctgggatcacaggtagatgctggaatttgagggacccaggagataagccactggctgggtacaaagtggccactgggcaaaagttaaagggcctgagcactggaagggatgggtcaggctttgtgatgagaaatagccagaggcaggaggacatagaggtgtggactttaggatggagtctgggctggacacatttgcaagcctgtggatggcatttaaagccctgagcctggatgagctcacagggaagccacaagtgggtgtggagggagaagcggcccaaacactgagcccagggccccaggacacaaagaggggaggggaggggaggtgcagcagccagcggggaggatgcctgagagcgcctggtggggtctggcaacctgagccagtgaggacccctcacaggtcagggagtggcagtg

SEQ ID NO: 17406 - DNA, 1199 bp, Homo sapiens
accctcactcacctgcctcttcttgagctgtcctgggccctgccacccgtctgggctcctttgtgtagcattatcagcctcggtctggcctctggcacctcacccttgccatggctgaccccacccattccaaggcggggtcacggtaccagcagcacttggggtgaggcctccaaagcttcctcagaattgtggctgtgccacgctggaccacagggtccccctcaagcatctcggggccctattctctctgagcacctggagggctggactcaggcttgtgccagggcctgacttgggcctgggggccctagaacactcctcctcctgagcctactgccaaacgtcctcagtgttgtctgcacctgctccgactccttcagccgccccattcagcgcccgctccgtccagtgcccgccctgtggggccaaggcggccgtgccttactactctgtgtcttctgcctcctctgaggaatctggccctgtctgacagtcccagaccccccgttctctcctctttagttgcatgagtttttctttgttcatggaatgttttttcctgattaaatgttggggaaatgccatccatgtggggctctgtccttggggcaggtcagtagacctgtggatgctgcatgagctggagccccattgtgggagaaaggaccactccttgcagggtcccagagggtttggggaggttcagggccatacccgacccatcagcaaaccccggtggctctaccttcaagacagattcaaggtagatagattctcctcccttccaccacccccacccagctctcctgtgccatcgtctatctctgcctggatgccagtctccctgcttctgccctggctctcttcagcctgttctcagcgtgggaggcagagagatcctgttatgatataaggtggatcatgttgcctcactgtttagaaccctccggcggtttcagctgcagccagctccttcaaaacctgacaattgcatactgtcgaggttgtggcacccatcatggtgcacctaccaaagtcttactcccaggcctgttaagtaatgcaggtggggagaaggtgacatgcaatttatttatttatttattttgagacagagtgtagctgtgttgcccaggctggagtgcagtggcaagatcacagctcagtgcagtctcaaactcctgggctcaagtgat

SEQ ID NO: 17407 - DNA, 1150 bp, Homo sapiens
gaatcgcaacatggacgttgtgccacatctcctggggctcttgggtccaggtaagaaacggggcgggaagccgtccaggcaccgcagggcctcactggggcctccagggacaagggggaaggccccgccagcgcaggcgcgctaaggtcacaaggcgcgcttaggggcggagcctcgcggggtgcgcctctgggataggcgaccacggtgtcttcaaaagccccgtcagggttggcttcctggggccggaccgactgtgggtcagtttgcaccagcgctctggaatcgagttacgcgcgaaagggcagagtttctggaggaaaccgcagcctctcaaccgctgaccgggtctcagaaggcccccggcagggccgcttggcgggaactgaccacgcgccagtcaggctctccagggacctgcgcaggcgcgtgtgggcggagtcgtgcgcagggggcggggcttcgggaaggagccacagagagggcggggcgtaggacctgcgcttcgggggtggagtcggagcggcgcggcggcggtcatgcgggacgcggatgcagacgcaggcggaggcgctgacggcggggatggccggggtggccacagctgccgcgggggcgtggacacagccgcagctccggccggtggagctcccccagcgcacgcgccaggtccgggcagagacgccgcgtctgcggccagggggtcacgaatgcggccgcacatattgtatcctttccgagctgggggctgcttgcggcggagcgagggctggactcggggagaaggaaaggagggcgggcggggggccgacggaaagggtagcagggggggaccggggctggcgtatacggtcagaggtggtcggaggaggggaagacattgaaatggagggagaagctctgctaacggtggcctgggcgaggtaaggagtgaagggggtgacactaggcagggtgacctgagagggggcttcagaggagcaagaaggcctgagacataggcaagatcgtatcagatggcaccttaaccgaatgacccccagcaccctcagcgtgcctttcccgacccccttggaggcggaaatcgcccatgggtccctggcaccagatgccgagccccaccaaagggtggttgggaaggatctcacag

SEQ ID NO: 17408 - DNA, 1118 bp, Homo sapiens
ctgcaggaggccgagtgacagccagccctggaaccccccgacccccgcagctgctgcagccagtgtgccagtgtgcgttcgacaaatggaaaagcagattggggccagggagtcagcaaggcaccccagctctgtgatgtgactttgggcgagtctcagtgccacttggtccccagccatggactctatacagtgagggccactcaccgacctgagtcagtgtcctctgtctcacagggcccctctcccttctgttcagtaaacaaactgaagccaaaaatgaagccgtggccaagcgtgacccagagatggggtgtcctggcccttagtgacacagctcctctctggggcaccctatctgcttgtctcgtccaggaagcgttagggctgatgggtgactcagcaaggcagtgtcagagctgggactgggcgtaggcctttgtcctcatccccagcactggcctccctgtggaagatgaacatatcccagccacctgtgtacaggggctcactttgtgtgctccttgttgcctgagaagaaaccttggggtgccagggtgggggcagaagcatgggctgggttccggttcatcctcctccaccctgccgtgtgtgtgggcacaagaggacatctaaccacctgctccttggaggaggcccccaggggtggtagaggctggaaggaagccacatcaggaggacgccactccggcccttcacccttgccaagtgagctgctcacagtgtggtcagggctgcgcgtgctggaggccctcctgcctgggccttgtggggcaaatattgggtccccaggctggaaagatggacagaggcccaatgggtgaaggctttgaagagcacacagaagcccctggccccccacgagagctggagagccatgtatatggcttcaaagccacctacggcagggacacactcgtgagcatgtgtggcctgcagttcaggtgatacatttaccagtgttcttgtttgtgtggtgccaggaaattgattttggaaaaagtgaaataacattaaaggtgaatgtgaggcttctacttttatccaaaaggagctatattagctaggctgtttctgatatccaatcattggtttaa

SEQ ID NO: 17409 - DNA, 1188 bp, Homo sapiens
ccgcgcggcggtaaaatacacgctgtttgttgtgcttgagaaccgagcagaatcgagagggtcttaaccaatccctttataccccgcacctcctctcttgagcccctgagaccccgagagcgaaggggacttgccgaccggggtcacccagcttggcaaggggagggctggagctgaactccagcatctgcaccatctcccatgctccaggtcattgtggagttcccgctacagtcgggaatgagatggtcctgggcacgcagttccatgccccacaaggattttactcggttgtccagaattgatgctgtagtcggaatacaccaatgctttgagtaattttgtaatgtacaccctgaatgaaggctgcctaggagagagtggctggagcccagagccagcagtttctaacccatcaaccactccccaatgcccagccgttcacaaggagtgatttgggcaatcaggtgtcaccctggtgtgagaccccagaggaactctcaagaaaggggctaacttctcaatgctctcctgttcttctgccttgttaacgagcctttcttccaccagacagcgtcatggcagagcaggtggccctgagccggacccaggtgtgcgggatcctgcgggaagagcttttccagggcgatgccttccatcagtcggatacacacatattcatcatcatgggtgcatcggtgagtatctcccaggccccaatcttaaaagccaggaagtgcctgctccatgcctcagcttttccaactaattgttgcagggccccacaggctctgctaagttgagctcctcctcccgctcctgctagtgcgccaggatcatcccggctctacctggtgtgcatatgcacttgcaagacttttttttttttttttttttggagacggagttttgctctggtcgcccaggatggggtgcagtggcgccatcttggctcactgcaacctcggcctcctgggttcaagcgattctcctgcctcagccccccaagtagctgagattacaggcatgcaccaccacacccggctaatttttgtattgttagtagagacggagtttcaccatgttgaccaggctggtctcaaactcctgacctcaagtgatccgcccgcctcggcctcccaaagtgctgggatgacaggcatgagccaccacgcccggctgcaggac

SEQ ID NO: 17410 - DNA, 1216 bp, Homo sapiens
taaggtatctgaaatgagaaccaagtttttaaaaaattggcagtgcactcaacactgttgtagaacacatgtccccacaatgttaaattgctgagtttgtcaacagttctcagtttttgtacttagtccatcttgcagacctatgccagtttgtgggccacatagtggtactgactctttttttacatgtgctcacgacatggtattttgttttgtgttgtgtcgttgctttgtagaattttgataagctgaatgtaaggacaacacactatacacctcttgcatgtggttcaaatcctctgaagagagagattggggactatatcaggtaagtgttgggaggaggcactgtgcaaacttactttcttttgaaaatgctttcacatcagctattcaggaaggcagtggcatgccagaatagctttgtcttgaatatataacctgtacccgcagtgaattatttttctttttaacttttcagatttgttgtttcactggagcattaagagtgggtgatacattaattttttttttttccattccaggacaggtttcattaatcttgacaagccctctaacccctcttcccatgaggtggtagcctggattcgacggatacttcgggtggagaagacagggcacagtggtacgctggatcccaaggtgactggttgtttaatcgtgtgcatagaacgagccactcgcttggtgaagtcacaacagagtgcaggtatgtgggagagggagggaaggactggctagagtgaaaagctttctgtatttcccttctatgttttgtctgctggaaactatttcttcattaagaaaaaaaaaaatcctaaagcaaggatattgttttggtttctgtgtacgttctgtcccctgccagatcttggtggtccgcgctttttggaattccacatactaagcatgtattcatcaagctgactggatccatttgtccgggttcagctctcagcttgtcactccaggcttctcactctgtgctaccgcttctgcctaaagtatccttcgttcatttttatctgagaaaagcctgcttatcttgcaaggctttttccacgcagcttctacactgagtactcccaactgtccctgttagtacattgaattcccagtgagaaagtgtcttcattctttcccacatcatcaccatgaaatctctcttaatgcaaattttatagaaacacaaggt

SEQ ID NO: 17411 - DNA, 1073 bp, Homo sapiens
ttgggaagcctcaccttcagacccagtaactgtccgcagctgtctgctagtggttgtcttaacatcgtagtcctagtttgcattttttaaatcccctctgtttaaaaggtttgtaaaacaaaaacaaaaaactaagtctgctcagtgaaatgctgtagaaccctaaataagtggtagaagagtgtcactgaattttgtctctgaattcagtataactgagttttgtccatgctggtgtctgggttataggcctgatgggcctggtagttttccatcttgttctggcctagaggtcagtcctttgcacttcctcaaagcttgtgtacagtgctcacctaaatccatctgactacttgttcctgtgccctcttgttttaggcctcgtttacttttaaaaaatgaaattgttcattgctgggagaagaatgttgtaatttttacttattaaagtcaacttgttaagttttttatgtattcctgttgggttttcttgttgatctcatgctagcagagcaaaaattgtaaaatattttgattaaaaatctagggacctttatgtcctatttgaaatgtgatgcttttatgtttgttttctggtttttacatttttgttctgtatcttacacaatccaccttgggccctgtcatctgatgtgagatcaagtactcagaggcagtgattaccacaaaaccactgatctctagaagaacagagaaggagagggttaatgtatttatacatagtgggcctggcaggagcggggggcagggtgagtcgggagaacgaagctgagggtggggacatgcaggaatctgaaggccttggtgacagattagtggaagaaaggtctagggttgcttccgatttggtattaagaaccaagaaagaggccgggtgcaatggctcacacctataatcccagtgctttgggaggctgaggcgggcagatcacccgaggtcaggagtctgagaccagcctgggccaacatggcaaaacccatctctactacaaatacaaaaattagccaggtgtggtggcgtgtgcctgtaatcccagctactcgggaggctg

SEQ ID NO: 17412 - DNA, 1239 bp, Homo sapiens
agtatgatgcacagctgagcaacgctaacaattgctgtttaaaatctgtcactggcctctctgggctgggggtggtgcagcttgcttcatctgtggctttcttctttgcagacagaagccctgcagcagctgcagaaggactctgaggccatccgcagccagtacgctcactactttgacctctcactggtcaataatggtgttgatgaaacccttaagaaattacaagaagccttcgaccaagcgtgcagttctccacagtgggtgcctgtctcctgggtttactaagcttgtagaatgggggaacccactgtatgcccctctccagcatttggaattccacccgccttgctttaagacaaacagggctgctccaactagttttgtgtcagcttccagctctctgcagctatcctaattcagccagtaaggttcagtcttcttgctcaggctcctgaagggttgattctcctgatagatggggccccactgatctggatttgaaaaggatttctagaaattgggggtaagaagtactaccaaaatgtaactgctaatcaagggtgatgcacagcaaaagcaatggaccccatccctctaaagcctgccctcctttgccttcaactgtatatgctgggtatttcatttgtctttttattttggagaaagcgtttttaactgcaactttctataatgccaaaatgacacatctgtgcaatagaatgatgtctgctctagggaaaccttcaaaagcaataaaaatgctgtgttgaaatgccaatgaccttgtaactctgggtttccacacaaaaagaaatgtggcccatttcacttaagctcctggacaacagcattaacacaagatgcctctcttgtgttcagatgataaacactggtgccctggaagagtccccattctctgcccccactgcagggctctactggctagtgcccatgtagaaaaacacccttaaggttgttgtagctagtggagcgctcattgtgggcacatatttagaacgagagaaaatccaagcctggggtcccgtggtacagtggaggccggtcgctgagccagggctggggcccaccctgcatgcctggctcatgatatggctacagctcagggcctcgcctcgctgcatccaagagcgcttttttttttttttttttttttttttttttgagacagtctgttttgccaggctggagtgcagtggcaggatctcggctcactgc

SEQ ID NO: 17413 - DNA, 1099 bp, Homo sapiens
agaacttgaaaaaaggataattgtggatgacacctcaacccagtggtccaaaaacatgaaacatttgaccccgagcaccctcacacagatagactacaatgagaaggagaaaggggccattactcagtctcccttatcagattgccttacgaggagtcatagcatccctcaagcaaatagatctccattacccattgcaaaggtatcatcatttccatctattagacctatatatctgaccagggtcctattccaagacaactcttctcatcttccagcagcatcttatagaaagaaagattctggggtccaagaaagcagtcatttcttacaaggagccaaaaaaaataacctttctttagccattctaaccttggagatgactggtgatcaaagagaggttggctccctggggacaagtgccacaaattcagtcacatacaagaaagttgagaacactgttctcccgaaaccagacttgcccaaaacatctggcaaagttgaattgcttccaaaagttcacatttatcagaaggacctattccctacggaaactagcaatgggtctcctggccatctggatctcgtggaagggagccttcttcagggaacagagggagcgattaagtggaatgaagcaaacagacctggaaaagttccctttctgagagtagcaacagaaagctctgcaaagactccctccaagctattggatcctcttgcttgggataaccactatggtactcagataccaaaagaagagtggaaatcccaagagaagtcaccagaaaaaacagcttttaagaaaaaggataccattttgtccctgaacgcttgtgaaagcaatcatgcaatagcagcaataaatgagggacaaaataagcccgaaatagaagtcacctgggcaaagcaaggtaggactgaaaggctgtgctctcaaaacccaccagtcttgaaacgccatcaacgggaaataactcgtactactcttcagtcagatcaagaggaaattgactatgatgataccatatcagttgaaatgaagaaggaagattttgacatttatgatgaggatgaaaatcagagcccccgcagcttt

SEQ ID NO: 17414 - DNA, 1178 bp, Homo sapiens
cagggtctcactctgttgcccaggctggggcgcagtggcatgatcatggctcactgaagcctcgacctcctgacctcagcctcccaagtagctgggactacaggcacgcaccaccatgcctggctcatttttttgtattttttttgaagaggcagggttccaccatgttgcccaggctggtggcaaactactgggctcaagcaatccacctgcctcggcctcccaaagtgctaggattacaggcacgagccaccgtgcctggcctccacttggctgtcttaatggcacataaaaattaatatatctaaatctgaaatcatggttttcaatctaaactatattcccttccaacatttcttacctcagtgaatagtgaatgtaacatccatttgcacaaaccagaaaccaaatagacattcttaacatctctctccatcaccttctaaactatttatattgataaagttacagcgatttgaaattctttttctagcctagtaatctgagtaatttgtaggataaacatgttgggggaggggcaggtacatggaggtgtcaaagtgcctgatggctgaggaagcaggctgggattactgcatggaggtgtcagagtttccagctttgtggctccatggttgggtggaggggcagggggagagatccagtggaagccatgttgtgccagtgccctcagggcgaggaggcagccagcagtgtgctacattaagcaaataactaagttgattgagtgaagaagtaaatctgttgaggaaaatgggagctaggtttctcaatgtcagagaaattatttgaaaacatggaaaggccaggcgcagtggctcacgcctgtaatcccagcactttgggaggccgagacgggtcaggagattgagaccatcctggctaacacgctgaaaccccatctctactaaaaatacaaaaaaaaaaaaaaaggttagctgggcatggtggcaggcgcctgtagtcccagctactcgggaggctgacgcaggagaatggtgtgaacccgggaggcagagcttgcagtgagcgaagattgcgccactgcactccagcctggacggcagagcaagactctgtctcaaaaaaaaaaacaaaacaaaatcatggaaaggaggaagggtaaaatgaatctcatggtattggattaaaattgg

SEQ ID NO: 17415 - DNA, 1767 bp, Homo sapiens
ctgacagttgactaataccatagtaaacaatgggttaacaattaatttgagtccttagttttgatagagtttaattatagtattttcctaacaattgacattatagcaggatgtcttacaatactatttgttaccagtatttgtatatgtttcatttctgtgtctttgattcattgtgtgagtggagtgaatacttagtcattgcatgcattatctttagaattgcatttgcattttctttgacaattcttgcagatatggccagggtttataattgggatgtaaaaagaagaaacaaggatgactctaccaagaacaaagcataatgctggcaattaaaaatgtggtttagttttccaaacatgttatcttaaatacccctttatccttacaggttgacataactttgaatgttttaacagcaagaattttaagaaaagataaacaccattttatttatttataaaaacaaaattagtttcaaatatttttgacattgtgatttttttttccacatttctcagcaaagctaatggtattttaatcattatttttgcctgtcataagaaaactcttagctgaaatggccgaaaactgtgagacatgctatggaagctgaatgccggacgctagcacagtttactttttccctttctaatcggctgatgttactctcacttgatgtggttaaaccattttagaggtagagaagacagacagtttgaatatttgtaaacttgtttttctttggtatatttaggacttagtggtcctctgttgctattgtcttctataagtggagtttcatgacttactgcttaacgaataactaactactatgatattctggacattttaggaaatggtaatttgccttgctacacattaagagggctattaagactacattttttctaacctcagataagtgcagtgtctttgcaatgccaacataagggagatcttggccaacgtgaaataaaattactcattcaaaactctgcctaaggtgattttgtagttcttaacagttctccagagcatcttgaacaggaatattaagataaatgtgaatctgcaatggctgaaaagagttgtgagcttttttattcatgataaaaccttataggaatagtataaaaaatccctgtggaaagctactagtacattgaccagcgctgggtgatacagattctgataaaaacataaatgtattagttcatctccatgtagtaaaaagtatacttatacaatgttttgtacttgtatttcatgaaattaaaacagtgatgctaaaactatggcagagcacttttttcatgttactctttgtcttactatgtttgggctgctataacagaataccacagagtggggggcttataaacagcagaaatttatctctcccagttctggaggctgggaagtccaagatcaaggtgctggcagatttggtgtctggtaagggctgtgtcctggttcgtaaacggcaccttttcactgtgccctcatgtggcagaaggggcaaggagctcccttgggcctctttaatttggcactaatctcatcatgagggctctgcccttatgacctactcacctcccaaaagccccacctcctaataccatcaccttgggggttaagattttaacataacaattttggggtgacacaaagattcagacaataacacctttttaaagttaacatgggtcttttcacgtatttgtaaagtttacttgtacatatactagcatgttccaagaa

SEQ ID NO: 17416 - DNA, 1162 bp, Mus musculus
accgccatgcagggaccacttacccttagggctggagagcgcatagcccaagccttaccactcccactattcggccatttcccttatatgaaagaggagcgaggaccttcctccctgggatcctcagaagtctactgggcacagaaaataactgattcatggcccatgccgactttgtttctagaggacaaacagtttcaagggctcctggataccagggcagatgtgacagtaatttcctcaacacattggcctgcagcctggcccttacagcccactaagggatggtgtaatccactgatcataaaatttacttctaaggggagaaacttagaggcttgagaaagttctcgccctctcacctggggcctaagattgtatcaagataactatgacaatggcctgacctttaaggttccgcttctaacaatcataaagcatccataggacttccaggtacccgccccctgttcctgccccagggtgtgctacgaccctgtttcagcccactctccctgtggggaggccccccctcttccactgatttactgcggtctatattgaatgcttctgctttagccttgttgtataagacacaaagagataatgcgtcagaatctgaagattgttggatgtgcttttctgcttccccgcacttttatgagggcatagccttatttaaaaattttaccctgctttcagacgctaggcagcttccccttgagtcagttcagcttaccttgacagaactctctggcgtaagaagttgtgtgttgggcccaggcatgcttcgaggcccttgctagagatttacaataacacatttagagtaaataaaaatgggttttaaagagacttcgtaaaggtcaaaaaattcatagattaggttttattggaagttaagaaatcatttcctaaaacatatataattcattttgtcaatggtgtttttgttggttgcagaaaatagagagcgtttttacagatggctataaaatatttaactaagtgtggactaataatgacttcaaaaaagatttagcatggtaaaatttaggctatttgaagcatttagtgtatagagattgtgtgttttctcaaaaatttgccctcagattaaataaattaaaagttttagatgcttgccagaaactgttagaaa

SEQ ID NO: 17417 - DNA, 1270 bp, Mus musculus
acctgggcaactgaagaccgagcctcagctaaagaggctcagctgtgttagactgaagttatctatttgagacacacccttcaaggtggaaagcagtggctaaagaaagccagaaaaaaagactaactcagattcccaccccgactacaccaaagcaagtaagagaattcttgggtactgctggcttctacagactctaaatacctgggttggcgaccttagctgccctgttgtaccccctaaccaatgaaggggaggtgttttgtggactccaaatcaccagaaagcctttaagccttactcagactttgggactttaaaaaaggccagtggcttacctatccaagaagttacaccctgttgccagcaggtggttttcttgcctgatggatgatgaccaacgctcctgtgacacatcagaacttttcgttgactgaacgagtgacctttgcttcattccacctgctgtcccactgtgtgagactgcacatagtcatcacttcgctgacattctggcagaagagctggtacactgatggcagtagcctcatggttaaaggtaagcagaaggcggggacagcagtatggtggtgagcagaaagcaagtgatctaggccagcagcctccctaaagagacatcggcccagaaagctggacttgtgactttaagacaagctctataaatggcaaaataaaagtctacactgacaacaggtatgcctttgccactgtatggggcaatatacaaagagggctgttgacatctgcagaaaaagacctaagatgctgtggctaaaaaaaaaaaaaaaaatcaggtggcagatctcaccgccaaacaggtggcccaaggagcaatgatcctggcagtcaaggagcctaaagattattatgacatcagagagacaagctttagatacaccgctgagcactatcaagttatggacattatttgacccacctgggggccaagaaattcaaaggtgtggttaggtcctttgactactatgttacaggactctctgacttggcagaagaaatagtcaaacgctgcaaggcctgtgctatgatgaggtagaatttctaaaagaaatctttccaaggtaatggacctgtctttgttgcccaggtaaatcagggactggcaaagatattagagatcggttagaagttacattgtgcatgcaggccccaaagctcaggacaggtagagagaataaatagcaccattaagagacccttaccaaattaacagcggagactggtgctaatg

SEQ ID NO: 17418 - DNA, 1180 bp, Mus musculus
gtgggcctgagagcgctcttgaataaaaatcctcttgcaatttgcagcaagaccgtttctcgtcggtgattttggggtgtcgcctctcctaagtcagaatgtgggggggtcctcacgttgtgggtctttcatttggtgcgttggccgggaaacgcgaccacccctcacacccgagaaccgacttggaggtatggggatcccctcttgtgtgtgtgctggccggtgtctctgttttgagtgtctgttttctgaaacgaacattggaacatgtgcttgttgtgttgggttgtttgtgtcttgtcctatgtttctgaagcacggcgaagtctgagtttggatccatctgagtttattgaatttgtgtcttggtttcagggttacgagatcgtgggttcgagtcccacctcgtgccttggttttacacctggcagagtgaggaacaagtgtgctgctctggttttggtcatctaggtagaagtggacgacggtgtttgtagacgatggggtgatggggttttctgaaatgcgctcgcggtcggtatttgcagctgtccttttgggccgttaggaccagaggactgtggttggcagacgtgctaggaggaccacaggctgtggccctgggggacgccctggaaggtaaggagagccagggacgcctggccatctccggatcggtcagagggaccaagttctgttgaagtggaagcttccccctccaacatcgtctaattcttttgcctgcttgtggaggacaagaaagggtcgaatgtgtctggatctgttggtttctgttttatgtgtttttgtgtatgtgtttagagctatgcgaaaatctagagaagcaaaggtaattctcataggtgctttatacactgattagagatagtttacacctgagacgtgagagaatgggttttaagaaaagcagtacttactctccgactatctggggataacttggtaaaaaaataaaataaaataaaataaaataaaataaaataaaataaaataaaataaacagtattaattggtctttggaaccctgcacctgtagttagaaatctagtgtggctagagaagccctgctaggcgctgattataaacgctgctcttatagggaccagcagcttctcaagttctatggtaagggatcagatggctgtttttcctacaaaaa

SEQ ID NO: 17419 - DNA, 1174 bp, Mus musculus
ctattggaaaagccaaaattgaaaggcaagggacccacatcactgtagttgcccattcaagcccagtgggccactgcctagaagctgcagctgtattgtctaaagagggaattgaatgtgaggtaataaatctgcgtaccatcagaccaatgcacattgaagccatagaagccagtgtgatgaagacataccatctcgtgactgtggaaggaggctggccacaatttggagtaggagctgagatttgtgccagaattatggaaggccctgcattcaacttccttgatgcccctgccgttcctgtcactggtgctgatgtccctatgccttacgcaaaggtcctagaagacaactccgtacctcaggtcaaagacatcatatttgcagtaaggaagactttgaacatctaattcggactttgaatgtaaagtcattgaaatctatttaaaatccttggtgggacttcacctgatgtgtactgcgagactgctagtcataaagttaacgctgaagtgacagcaggtgtctgaactgtaagaagtttcaatgtgcttatgagtggaatgttttccactccctaccctagatactctgctttctttgtctgttactgtttaagttaaatttgccctctttcactagaaggggcaagataagaatgcccccacagaagataacttatgtgtctaagaagtatattatctacatttgctgtttaattgttttgataaggaataaaggggattcccaccaataaataaataaataaataaataaatagaattagttttcttttgagtaaaaaaatgaaagcttttaaaataattaaatttgaataataaatttaaattcttcaaaaaatgtattttgaagaagggaatacatgtatgtgtacacacgtgggtgaatgcacacatttccatgtgtgcagagagcacatgaggatgtctggtgtcacacaggccgtttctgactaagtcagtgacccccaagcctcagagcatcctggattcactctccacagtgctcaagtcacaggcatatgcaattgtggccgactgtttatgtaggtggtgggtgttcaaactcaggtcttcactgttgtacagcaagctctgtttaccactaagtcatctctttggcccataatattcattgtcattttgttactagg

SEQ ID NO: 17420 - DNA, 1154 bp, Mus musculus
tttctttttcttccctctatgttttatcttcctttttctaaactattacgaatgactttccatgcgaagtaggtagttaagtaggagaacccactgtgcaagcctgacctgagtttgattcatggtggaaggagagcaacttcccgatagttgtcctgatatacagcatagcgcatgtgaaagcccctccatgacaataataagaaaatgaaaagaaatgtaaaagaatcatttccattttgcttacttaagcccgtttaactacaaagttcttggaattaacttctcatcttaggaaatctaaaatgtgtaacagttattacctatagaaccaatatttacatctctttctaaaaaaaatctttttagaaattctgtgcaagcctattccattctttctgcggggacaaccaattccgaaaagaatgcttccccctgagtcactggtgccctattacaccgatgcaaaaaaccggggctacctggctgaccctgccaagtttcctgaagcaagacttgaactcgccatgaagtttggctacgtccttcctgatattacgaaagatgaactcttcagaatgctcagcgctcggaaggatccgaggcagattttctttggtcttgctcctggctgggtagtgaatatggcagataagaaaattctaaaacctacagatgagaatcttctcaagtattacagctcctgaactgccttctactaaatcagacttgtgagccagacgggctgcacatggattcttgtgggtattaaagctttgggtctgttaccagccttcactgctcaggtcttttgttctttttccatcttaaatagcagacagcaaaagctgcacgagcgactgagcctttgagggtgtgtgcttgaaaatctgaacagtggcaggctttagaaaggggattaaaaagaaaaaaacctacttaaaattacctttcttttggggggtggggagactgtgttttgatacatggtttctctgtgtagccctggctgtcctggaacttgttctgtagaccaggctggctttgaactcacacagttccgcctgcttctgttgggattcaaggcatgtaccgccactgcccagcctgactaagtagtttaaaacatttctttactgtccatcttttcatgg

SEQ ID NO: 17421 - DNA, 1171 bp, Mus musculus
agcctgtggccctgttccctctcttagaagcacactgtgcatctgccttttcctacccaaagcatttttctttttattgcttttattttaagtgtgtgagtgttttgcctgcatgtgcgtctgtgtaccatttatgtacctgatgccagctgaaggtttgcatcccctagcactgaagttagagatggttgggagccaccatatgcgtgctgagaataaaactctgcctctctagaagagcagcctgtgccattaactgctccagcctcccaaataatttttcttaatatctggtccaaaactgcacttcggtttcactgtctttctcactatcacctaagccttgcacaggtaggtaatttgttatagtttcagcaatgtcggtcctcacactgaaagctacttaatatctacacaatatctactgaaatcctgtttcagcggcagtaaaaaattctgttctatgaattcaacagcagttcataagcaaatgaactacatagctgaataggtcggtaacttagtgtccactagagggaagcatatgcccatagaagaaccttttaaatgccccgagactgtgaacctcagaaaagaattggcttgggagatttggtagactgcacctgtgatcccagtacttgagaaaccactgcagggtgttgctggatgtttaaagctaccctgagctacatagtgagttctaggccagccttggctacacttaaaatcctgtcctaaaacaaaagaaaagaaaacaaacaaaccctaatcaaatcacaaacagaggagttcatttggaaaagcaataccaacgatgtgattgagcctcaatattttactttggatgcgtaaaaaaaaaaagatatagctctactttatagaaaaatccatgaccttggcagtatttaaattgcatgtcttgatactcttcagttatgtgtgtattatgctagcagacattagcctgaaaattataccctggggcaatggttgaataaatgtacacacacacacacatagcttgtccattgtctttcctgagtttaaatatgtaaggaaatagtgggtaataaatgctgtgattagtaagcacagaattatttggaaatatatattctcaaggaaaatattgaaacttgatttgtagactttcctaaaaatgcagttt

SEQ ID NO: 17422 - DNA, 2386 bp, Mus musculus
catccttcttacattacctttatgtagtagtaaaacatcctcacctgcatggattttattagtggcattctcggaaatgtactttctgacttctgtagctgtttattaaatcattttttccaaacaggaaatgatggatgtcaagcacttcattgataagctcctacctccaattgattgacatcactaagaggccttgagtagaagttcaccagcatcacagtagtagagtataaacctcttcccatgactgaccatagaacttctaatgtgtgcagtgttaaaatgttttgcaaatacataccaatgatacagactaaatgatgttaccctcatgggaaatatatgatccttttaagtgtctatgcatatatttgtattatacaattcagaatatactaagtattacagtaggtaagtgaagcaactagattctttgtctcaaattcagcaaaataagataacaaacagttttattacatcatttgaaaattactagtatgttctgtgaagatgtgttcaggtaagatgtaagtgacttcttagttctgtgagttagactatagttttactccacaattgttcagtctccatgcagtgtctgtatttttctgtttgtattcacatagatgatactataatagctaagaatcagatggtattacattatccctaataatggggataatgcttttgagtgtcaaaaagtaatactgcattcttcaattaatggcccttctattgggagaccaggctttttttcccttctatgtaatttttctcaagaaaaaacaaggttcttttttgattttccgtagaaaactaatattgcctctctgtcatatattttattttgacattttgagatacagacatagccgggcgtggtggtgcatgcctttaatcccagcactcgggaggcagaggcaggcggatctctgtcaatagcctggtccacagagtgagttccaggacagccagggctacacagagaaaccctgtctcggaaacaaacaaacaaacaaaccgaaacacagacatacagtatttccaacctaggtaatatgaaaagaaatcaaacattacttaagtttatatatttcaaataactgcaccttagtccaactttagactgtagagttatagactctccagtcctggtaataaatctgtggttttatttttctgtaaaacacttaaaggggaagtaatatcttggcatatttagaaatacttgtgactggcttcaaaatataatttcttaaatatcttatagccgattttaagtttacattttctgtacatgttatgcttaaaaccaaatactgttcaagatgagcaatcagacttatgttttatttttatctgggtaacatattattttgaaattttcatcttaagtaaaggagcttttgataatcagtctcctgtacaaatattaaaataataatttgattttaaatcatcagcatgttcaaaatactggtgaaaattatttaatataaggactggttagaacattatatatatatcccatatttataactgttaccacacagttgaatatgttgcaaaaattatggttatttctgaacggttgcttttcttgctgttttccaaccaaccaagaagcacctttataaacaggtgctaattgatatgaagatcattttggtatgtcctagatagaatgaagccaaatgtctggatttaaaacaatttcaaacaatcatttactattttgctttactttaaagaacataaatttacttcagttattctatctgtaaagatttatttggtataagaaatattccattgactgtgtgctgtaatgtgggaaaatgtcatgtttttcacagtttctatcaatgtgaaataaaatttaattttggctttatcgattgctttatatagtactgtttcttttttcttttcttttttatagataggatctgtactggctagttttgtgtcaacttgatacacctggggttatcacagagaaaggagcttcagttgaggaaatgcctccatgagatccagctgtaaggcattttctcaattagtgatcaagggggaaaggccccttgtgggtgggaccatatctgggctggtaatcttggttctataagagagcaggctgagcaagccaggggaagcaagccagtaaagaacatccctccatggcctctgcattagctcctgctccctgacctgcttgagttccagtcctgacttccttggtgataaacagcagtgtggaagtgtaagcttaataaaccctttcctccccaacttgcttcctggtcatgatgcttgtgcaggaatagaaaccctgattaagacaggatcttactgcatgcccctgctggcctggaacttg

SEQ ID NO: 17423 - DNA, 1149 bp, Mus musculus
aaggactgaatttatgaatatagatcaccagggtttatgctacaaagacttctattatatattttatatttttcctttctaaacttgctatgtttgttcaaaaaactcttcataatgattcagaacaaagtttctgctgggcttttttgtgatttcctttgtctgtgtaattaatataaatctgcttaccttagcctcagctagactcttcagacaagggcaaaaatcaacctcgttcttcaccaaaatcgcacaaaaacaatctctaggccacatattgaaatcctcttgggccaggtctgtacagttcaaatcactctcagttacaaagtttttttttttttttttaatattcctattagaatagccaattaagccccacttaaagatatccactgctttccaaacacaaaacccccaaatctacattcttccaaacaaaagcaccgtcaggcctatcatagcaataccccactcctggtaccaacttctgttttagttagggttttattgctgtgaacagacaccatgaccaaggcaactcttagaaggacaacattgtattggagctggcttacaggttcagaggttcagtccattatcaagatgagagcatgggaacatccaggcaggcatggtgcaggaggagctgagaattctacattttcatctgaaagctgctagctgagtactgactttcaggcagctaggatgagggtcttaatgcccacgtccacagtgacacacctattccaataaggctacccctccaaatagtgccactccctgggccaagcatattcaaaccatgacaccaactgagccatttcactggcccctgcaattgattatttttaataaggaacagtgagccgagtgtagtgacacacatcattaatcccagcactcaggaggcagaaagagggtagatgtctatgagttcagggccagcctagtttacagggagttccaggacagccagggctacatagaccctgtctcaaaaatgtacaaacaaataggagcagtgaagcatccctctctattttctttttctgtttgtttgttttgtgacaggatatctctagttggcaaggaatgcatagtcctaccttcagagtgtgatgattccagctaggcatatgccat

SEQ ID NO: 17424 - DNA, 1176 bp, Mus musculus
cataacttctgttagtttcactgtgtccctgtatactttctgtttccacgatctgtccattgatgaaagtggtgtgttgaagtctcccactattattgtgtgaggtgcaatgtgttctttgagctttataaagttttttaatgaatgtggctacccttgtatttggagcatagatattcagaattgagagttcctcttcgaagattttatctttgatgggtatgaagtgcccctccttgtcttttttgatgactttgggttggaagtcaattttattagatattagaatggctactccagcttgtttcttcagaccatttgcttggaaaattgttttccagcctttcactctgaggtagtgtctgtctttttccctgagatggggttcctgcaagcagcatgttgggtcctgtttgtgtagccagtctgttagtctatgtctttttattggggaattgagtccagtgatattaagagatattacggaaaagtaattgttgcttcctgttatttttgttgttaaagttggaattctgttcttgtggctttcttttttcaggtttgttgaaggattactttcttgctttttctaggacatggtttccgtctttgtatttgtttttgttttttgttttttctgttattatcctttgaatggcttgattcacggcaagataatatgtgaattttgttttgtcgtggaatactttggtttctctatctatggtaattgagagttgggctgggtatagtagcctgggctggcatttgtgttctcttagtgtctgtataacatctgtccaggatcttcttgctttcatagtctctggtgaaaaatggggtataattctaatacgctagcttttatatattacttgacctttttcccttactgcttttaatattctatctttatttactgcatttgcttttctgattattatgtatcaggaggaatttcttttctggtccagtctatttggagttctgtagacttcttgcatgttcatggcatctctttctttaggtttgggaagttttcttctataattttgttgaagatatttgctggccctttaagttgaaaatcttcatcctcatctactcctattatccataggtttggttttctctttgtgtcctggatttcctagatgttttgagttaggatctttt

SEQ ID NO: 17425 - DNA, 1903 bp, Mus musculus
aatgatgagatgcaggccaaggggattccacaaagggctccacccaagaggaaaagaaagagagttaaacagagaattaatacttacgtatttgtgggtaatcagcttatccctcagcctctagacagtgaagaggatgaaaaaatggaagaagacagcaaagaagaagaggagaaagagcacatcgaagccatgaagcgcgaggaaccacctcagaacctactgagggaaaagataatgaagctgccactcccagagtctttaaaggcttacttgacatattttcgagacaaataacttaaacaaggaagaatgcctactgataaactcccttactcttgtaaatgtagtattaattaggacttagagaattacttcattagaatgaattattgcagaaaaaagtctaagttatttcttttaataacagaaatgatgtattcagtgatttaaaagagtctctttcctaagatctatttttcttaaatcttgaagaattactgttttgatctcaaagtgggatgggtcaatagtaagaactttgtatacagtactctttctggttcttcatggatttgtagtgttggcaattgaatttcattctataagaggttgatacacatattgtcacacatataggcttatttaaattgccgtttgcatttctgttacttgagcttgcttatctaataaggaaagcaaatgcttgtagacctacttaccttacttatgttctagacatattccgggcaacgtatgagtgcaatactaattcaagatactgagtaatttagctttaaaaaccacagacttcatgaaattttacagacccgaaacttaagcttttgaatctattgccaaaaggcatggggaaaatttctgcttctctcatagagatttttaagagctagtgaatgttaaagtaggaagtggctacttgacacaactagtttgtatgggccctttgtgttctcagtatttaaagataatgaggttatcttaactatagaattttaagcggtagtatatttaggattgcttttctataaataactataaagtattagatttggaaagtcattcactgtcccatttgcttctaaatgcagactgtgaataagtcacattaagtgatcagcactgcttagggacctccagcagcagggggaatgatatgatcagtagagacattttagcagtggaacttttcattaagtagatatttatctttgacaaggtaggccacactggcctcatctgctctgaatctttctaatataaatagtcatgggagttgtatgtagatgcgtttgtgttaaaacttgcttcagaatcagagtgggatctctgggacctataccaaactcattatccttcattctgtattttgtttctttgatagaatgatgatgattttcactttttgcttaatactacattcttaagctacttacatagggtatcagtgatacaccaggcagtgcatgtcattactagttctttcttcctggtagggcctgcacagttattcctggttaagaagctgtgggatgtgacctacttactgcttaccatcacacggaagggaagatttcaagtgtctcacttattcccaccacatcactgtcagagcaccctctcggatttacataaggaagtacaatcatgatgattcaaatagtttataactcaggtccaataattctgtgtaggtgatcagttaaaacagtttaaagatgaaattgacccaaataattgataatgttttaataatgtgaacaacagtgttatggaaaggattcgtttgactcttgtgaaatgggcctgtatgatttttcttaatgtaattagtaaacaaactattattaagatatgctctatcctgtttctgtccaaaaaagaa

SEQ ID NO: 17426 - DNA, 1248 bp, Mus musculus
cacccaagccaaggttaaaagcccactcatctacgaatgagaaaatcatttgatcacctcagttaagccttgccttatttaacttaattaataggggggagagagattggagacgtactattgaaagggcaagcccttcactgcctcccacccaaataaaaaagccaattggccttgtactacaagagctggtcgaactccttctccctgtttcccacctatcatccaaaaatgcggaggaatatcaacttagtgttattcttattatagtgtatttcacatttgttcagtcaaacttagccagagttccaacgccctacttaaaattcaactagaaagttacctaccaagtactaattagcattataaagtcagagcctacagctccaggcttttcagttagttgtttactaagataagaaaggacagtcttagccttatacagtttaccataagaaaagttaaggaatcccatgaaagcaagttttttctttagccctagctttttctttttttaaattttgttaataaaagggaggagatgtagtctcccctcccctagcctgaaacctgcttgctcggggtggagcttcctgctcattcgctctgccacgcccactgctggaacctgaggagccacacacgtgcacctttctactggaccagagattattcagcgggaatcgggtcccctcccccttccttcataactagtgtcgcaacaataaaatttgagccttgatcagagtaactgtcttggctacattcttttctctcgccacctagcccctcttctcttccaggtttccaaaatgcctttccaggctagaacccaggttgtggtctgctggccggacacaacacagtaagaggcctatgattggacagggaaaggggaggcaaagctatgaattttaaagacagatagcaactcaggaaagaggggagaagcaagatggaactagaaccacctggctttgaatagccacagatatgtatgttattatatagggataaaataatgtaacttgtctaatctaggtggacagctcttatcattatcaaattttattatttatcattatcaattttgtttattacttatcattatcaattttatcattataaattatctctgagattattgtatgggcatcttgtgaattgagaatttattgagacataaatctgactggttaattataagcttcaaaagttttcttttactgggttactggaatgtggtac

SEQ ID NO: 17427 - DNA, 1171 bp, Mus musculus
acgctcctgtgacacattatcagagctttttgttgactgaacgagtgatcttcgctccacctgctgtcctcaatctcgctaccctactgcccaagacttcacctactcatcactgcgctgacattctggcagaaggaactggtactgaaaatgatctgaaggatcagatcatccttggcctgagagtttgagcagtaccgatggcaacaccgatggcagtagcctcgtggttgaaggtaagcagaaggcggggacagcagtacggtggtaggcagaaagcaagtgatctaggccagcagcctccctgaagggacatcagcccaaaaagctgaacttgtgactttgatacaaagagggctgttgacagctgcagagaaggacctaagatgctgtggctaaaggaaatcagatgacaaatctaaccgccaaacaggtggcccaaagagcaatgatcctggcagtcaaggagcctaaagattattatgatgtcagagagaccagctttagatacacccctgagcactatcaagttatggacattatttgacccacctaggggccaagaaattaaaaggtgtggttaggtcccttgactactatgttacaggactctctgacttggcagaagaaatagtcaaaagctgcaaggcctgtgctatgacgaggtagaatttacggaaattaagtcagctagatatggaaacaagcacttattagtgtttatagacaccttttcaagatggatagaagcttttcctaccaggactgagacgaccaatgtgatagccaagaagatcttcccgaggtaatggacctgcctttttgtccaggtaaatcagggactggccaagatattagagattgattagaagttacgttgtgcatacaggctccaaagctcagaacaagatgaatagaattctaaaagagactggtctagacttggtgctccttccccatgcccataactgtcttaaatgatgtgtttaaacttacatgttgttgtaataataatctgtgtgctaagttaaaaggcttgcaggtggtgcagaaagaaggctggccacaattggctacagcaaacgagccggataccacaaaagaaatcttaccagttccagccagagatctgatctacatacacctacatcatgcccagaccctcaagcct

SEQ ID NO: 17428 - DNA, 1099 bp, Mus musculus
aaatcatttgatcacctcagttaagcgttgccttatttaacttaattaataggggggagagagattggagacgtactattgaaagggcaagcccttcactgcctcccacccaaataaaagagccggtcgaacgccttcttcctgtttcccacctatcttccaaaaatgcggaggaattcaacttagtgttattttcacatcgttcagtcaaacttagccagagttccaacgccctacttaaaattcaactagaaagttacctaccaagtactaattagcattataaagtcagagtctgcagctccaggcctttcagttagttgtttactagaaaggacagtcttaagccagatacagtttaccataagaaaagttaaagaatcccagtgaagcaagttttttctttagctctagattccaggcagaactattgagcatagataattttcccccctcaggccagctttttcttttttttaattttgttaataaaagggaggagatgtagtctcccctcccctagcctgaaacctgcttgctcggggtggagcttcctgctcattcgttctgccacgcccactgctggaacctgaggagcaacacacatgcacctttctactggaccagagattattcggcgggaatcaggtcccctcccccttccttcataactgagtgtcgcaacaataaaatttgagctttgatcagaatgaaattgtcttagctccgttttttcttccgccctgtctagattcctctcttacagctcgagcggccttctcagtcgaaccattcacgttgcgagctgctggcggccgcaacactttttggtggaattttggattttctccatataacagcacatttggcaatgctgcaaacttactgtatcttctgtagctcgtacacatttttccttatctaatctctcttgataggatatttatggccttgtttaattgagtgtcaaatgtggacatcctggtcttgttccaaatcttagaaggtcttctattactgttcattccactgtcacttgtgggtttgtgatcatgacctttatcatattgttaaatttcagatttgcatctgaaactag

SEQ ID NO: 17429 - DNA, 1351 bp, Mus musculus
agccaagcttctgtgcatgccattcttaatgcaattctccttttgtctttccatgtgcacactcccaaaggtctcaagatattcactctttacatgcgctctttgtgcttagggaatttaggagcatcattctgggaccttggtgtggtcctctggtcgagaccctgagtgattaggagcttcaaactagttctgtttttctagttacttattctcttttctgaaaaacagctgtctcatatctatagatataatagaacacctaggtctttctaggcacaaaaagataaatacaacttgttttaaagtcaattatttgttctctctctctctctctctctctctctctctctctctctctctctctctctctctctctctctccacctgtgttttggggccatgcattttgaccagctgcatgaccacttcagatattctgagaagtttgggatttcaggcatgaagtccaggaaagtccaagaaatggtctcaggagctgccattgttgatatggtccctggcaagcccatgtgtgttgagtgagagcttctctgaccatcctccacttggtctttttgctgttcatgacatgaggcagacagttgctgtgggtgtcatcaaagctgtggacaagaaggctgctggagctggtaaagtcaccaagtctgcccagaaagctcagaaggctaaatgaatattacccctaacacctgccaccccagtcgtaatcagtggtggaagaacggtctcagaactgtttgtctcaattggctgtttaagtttaatagtaaaagactggttaatgataacaatgcatggtaaaaccttcagagggaaagaatggtttgtggaccatattttttgtatgtggcagttttaagttattagttttcaaaatcagtactttttaatggaaacaacttgaccaaaaatctgtcacagaattttgagaccattaaaacaagcttaatgagaaaaaaaaatgaatgtatttacaagagaagaaaaagatgaagaaaatggtagggtaggacaaattgctttcacacttgaggaaaatgatttctattaatatttgtaaaattgattgacaagaaattctatagtcagagaaggtagatggaaactgtcaaatatatcagtcagaagctataccacatggagagtgttgggtgaaaatagagaagcttggcctctgttagctgaattactcagtagctgaaatgtgtatttaagtatgagtcttttttgttgtttctttataaaatatatttttgaactgtgtgtttgcacacgtgtgtgtgtgtgtgtgtgtgtgtgtgtgtgtgaatatatctctccactgtac

SEQ ID NO: 17430 - DNA, 1116 bp, Mus musculus
cagaggttatggcaggagtggcagctatgacagccataacaacagaggaggcggaggtggctttggtggtggtagtggaagcaattttagagctggtggaagctacaatgattttgacaattacaacaatcagccttcaaatttttgactgatgaagggaggaaactttggaggcaggagctctggcgcttatggttttggaggccagtactttgctaaaccatggaaccaaggtggctatggagattccagcagcagcagtagctatggcagtggcaggatgttctaattacatacagccaggaaacaaagtttagcaggagaggagagccagagaagtgacagggaagctataggttacaacagatttgtgaactccaccaagcacagtggtggcaggacctagctgctacaaagaagacatgttttcggcaatactcatgtgtgtgggcaaaaactccaagaccgtatttatgattaattgtacaacaggttattttagtttctgttctgtggaaagcataaagtattcaaacaaaaggttttactgtagacctttttcacccatgctgttgattgctaaatgtaatagcctgatcatgaccctgaataaatgtgtgtgtgcgttttattgtttttttttaaattagatattttctttattacatttcaaatgctatcccaaaagttccttataccctcccccctgccctgctctcctacccacccactcccacttcttggccctggcattcccctgtactggggcatataaagtttgtaataccaaagggcctctcttcccaatgatggccgactaggccatcttctgctacatatgcagctagagacatgagctatgagggtactggttagttcatattgttgttctacctatagggtagcagacaccttcagttccttgggtactttctctagctcctccatttggggccctgtgctccatcttatagatgactgtgagcatccacttctatatttgccgggcactggcatagcctcacttgagacagctatatcagggtcctttcagtaaaatcttgctcgcatatgcaatagtgtctgtatttggtggctgtttatgggatggatcac

SEQ ID NO: 17431 - DNA, 1632 bp, Mus musculus
aaggaggcttgggaagcaaaaagcattcctggccttctgctttagctggcaagaagaaaggagtgccgccccaaggtgggaagaggaggaagtagcgttctcccctcgggaccagttctgaaaagctgggactgtactaaaagttaacttgggcggtataggtggccgctgccctcagtgacatttgacattaaaaggacgggtttgccttccctcgagtcagtgctggacgagttaatagagacactgactggaaattggtgtattttgagaattatagaaatgatatagccagaaccaggaataagttaaggcctgcctttttatcttgactttggatactgcgttacagtagattggtttcaacatttttgcattatttttataacaaagcttgtgtatttatcaaagcggggagggcgggggaaaattatatctacctgtgatttgcaagtattgtaaatggatgcaggtacctggtgttgcttttaacttttactgtcggtagaggttgcatgtgaagccagtaacctgggcaccaatatggagtgtgcttgagaaaaacaaagtagttacagtggttctaaaaaagaccccttgttttaggaaaactttggccctaactataatattaaaagtatagtgctttttggtgttggttcaggtggtgcatttggccaatggattgctttaagtccagaaatagttgtcattttgtttgtaaccggtggcttttgtttaattggcttgggttttagatattgtcaaaatatctggcattcactatggaaccaaggctgccctggaactcagggccaagtgctgagattataatcgagcagcagatttcatgtttatttctgtcctagatgtttttccctgtttcattgtcttattttgttcttaataaacttatctttgcataattagtatttgcattatttttgtaagttattaatagcaattctagaattgaggaaggggtgttttctttaaagcaagttggtctgtcagttgctagcagttgggaattgggttggaggttactcttagtgtggtttcagttttataaggttacttgtagaaatgcaaggaaagctcaacttgtctcttaactcatggaaacactggattgttagtgactttgggtaaagctctaactaggctcatctttactgaactcttccactggagaagaactataaactcttccagtttatagttctaagtatccatgagaactttatcaaagccaagctgttgacagctaaaagtaacctctagcccaattcccaactgctaacaacaggacttaactttcagagattaatttggggttttggttggtcagtttggggcctttttttttttttttttttttttttaagtttacgaaaaacccagtggggttcttgccattgagacatttcagagtttcctgagaaatgagctaagactgggtcaggtgaccttgcattggaggcagaagttttcctcctggagtccagcagcgaccggattggctgttagtgggggtggagtaggcggcgaacaaggagaactgccatggctgcagctgcacgcgctcgagtcacacacttgctgaggcacctacaaagcacagcgtgagta

SEQ ID NO: 17432 - DNA, 1632 bp, Mus musculus; identical to SEQ ID NO: 17431

SEQ ID NO: 17433 - DNA, 1143 bp, Mus musculus
atgggtcagggaatcttcttgaagttcagttttttcttctatgtacaagggaggtggggaaggaatttctggccgttgccttttaaaatctttaaaaataatttagtcccagccacttgcctttttggaagaagacattcgagaagttttaaaagaagaaactggaacagatatattcctcaaagaggaagatgaacctgcttataaaagctgcaaacaggaggtaaccttgagtattgtgtatgcatttcttttcagagttagttagaggcgggtctttatgtaattttggctgccctcaaacttccaaacgcccgccatcactttctgagaacggtgattgcagatgtgcttcccatcccagctcttccagtattgttgtagtcagtgtttaccatgttggagagacttggctataatgtgaccctgtaaattacttttcttagcactctgcatctgtgaagaaggtcagaaaatcccttgccttagagagctgggacaaagaagaaccagggactcaactgctaactgaagacatttcagacatgcaggtttgtaaagaattcatatatgtttttaaatggctgtcttaagtcataattgttctcatttcatatggattgcttggccagataatttaaaagagagttacagaaaatttagggttattttgcctagttcagagagaatctattatctgtgaagaatatatgatttttttaaacttgttttattttgagaagttagatttttgtatgatatcaaaaagtggaggttcataaagctttaagttttagtattttatgaaattaccaaatattactatagcactagaaatgtatttatgtaattaccaagctattactatagaacttagtgagatgttattatagagccagatgcttcctagtagggcagtgagcagggcttctattaccattcactcagtagtttcttgtctctgtttttgaattagttattttcctctttcttttttctcttagtcagaaaatattcttacaacatctttattaatgataccattattggaaatacatgacaataggtgcaacttgactcctgaaaaacaagatataaattcagccaacaaaacatatacacttaataaaaagagaccaaacc

SEQ ID NO: 17434 - DNA, 1379 bp, Mus musculus
acttgggaagaaatatctaccctagtatgataaaatcagtgtgattcagttagttggtctgagatatggccagttgtgtgctcttgttgataatatgttgccagtattttttaaatcttggccttgtcaagttccacctattatttttaaaatcttacataaaagagaatggcattttgttttagaatatttaaaaataatggtagcagtagttaatttctaattttcagagtatgtcagagtcacaaagagtttatctgtatgaatggttctatagttttgacacagtggtgtgtaagcctgtatatgctaaatgtctctaagcccctatgaaccaaaaatgttttccttttttcttagtgtccttaagattttctttttgtcagcttcacttgagtttggatgcatagtttactccagtagaccattagcatttgcttatattgctttcatgcttatgtagtaaaaacaatgcatattcctgagattggtactgctcttgtattctgttctgtagatttgtatttgtaaatgtgttttcagtccatcttcctttgtttactgaaattaagttgaatttgaatgaacgaatgacaaatgtatgttaatataatctcttagagcattcaaagcccggctatctctgtttgcacatgtaacagatgcagaactgtttgcaattctacaaaattgtatgtcagaaaatacattatcaggtgtttaaaaaaatctcttcctgttcattcgaaaagaatgttgtacttgaactttttctagataagggaggttttttgtttttttctgtgatagtatctttaagtgagtctacatactgaaagtccactttgttgaatgtggaaggaagggagaatctagatgtttttaaagtggagctgagtttaagataatgtacaccaccacacacacctgggttagtgtttatcacatcatactttgaaatattttatctcattcatttatattaaagttccaggaaaatatataactttcatatactaattttgcatgaagtaagatagccaaattcttaacaattagctgtgctttaatgcccccccaacccctccactaaccactattattttggcttagtcagccactgagatactcttctcaattttttttcctggtttaagtacacaaaaactgctcaataagcagaaaatgtactgtgtcaaataaattatataatcaccctgctttaacagatgctcttctgtggcttggtattttaagttaataactggcaggatctcaaagtaggagtatcagaaacaagttttgttttttccagacatggtcttactactatgtagccttggctggcctggagcccactctatagaccaggctggcct

SEQ ID NO: 17435 - DNA, 1273 bp, Mus musculus
attcgccctgggcctggactagacctcgtcgggccggcggaggtctggctatgtgcctttgagggtcgcttgggacgccgagcgagagccgagagcgatgtctcagccgccgccgcctcctccgctgccgccgccgccgcctccccctgaggctccgcagacttcgtcgtctctggcggcggcggcttctccggggggcctttcgaaacgaagggaccgaagaatcctttccgggagttgcccggatcccaagtgccaggcgcgcctcttcttcccggcctcgggttctgtcagcatcgagtgtaccgagtgcggacagcggcacgagcagcaacagctgctgggagtggaggaggtgaccgacccggacgtagtgctgcacaatctgctgcggaacgcgctactcggagtgacgggggctcccaagaagaacacggaactggtaaaggtgatgggcctctccaactaccactgcaaattattgtcgccaatattggcacgctatggaatggacaaacaaacgggccgggccaagcttctccgggacatgaaccaaggcgaactgttcgattgcgcgttacttggtgaccgggccttcctcatcgaaccagagcacgtcaacacagtgggctatggcaaggaccgctccggaagcctcctgtatttgcacgacacgctcgaggatatcaaacgggctaataaaagtcaagaatgcctcatcccagtgcatgtggatggggatggacactgcctagtgcatgctgtgtctagggctctagtaggccgagagctcttctggcatgctctgagggagaatcttaagcagcactttcagcagcacctagcccgatatcaagccctgtttcatgactttattgatgctgccgagtgggaggacattatcaatgaatgtgaccctctgtttgtgccacctgaaggtgtccccttaggcctgaggaatatccacatattcggccttgccaatgtgttacatcgtcccataattcttttagattccctcagcggcatgagaagctctggtgattattcagccacctttctacctggcctcatacctgcagagaaatgcactgggagagatggtcatttgaacaagccaatctgtattgcgtggagtagctctggtagaaaccattatattcccttggtaggcataaagggggctgccctgcccaaactacccatgaatttgttacctaaagcatggggtgtgcctcaggaccttattaaaaagtacatcaagcttgaggag

SEQ ID NO: 17436 - DNA, 1101 bp, Mus musculus
ttcctacttagcagtaaaaaaacaaatctcaccatgataataaaggaggaacagaataataacgtaggggaaatctaaacttgccggggggaaatatgcaaagtcataaagacactttgatgaactacgttaatgaaaaatgaataatggactgagttaatgaaaggaaggtaaggtgaatgattttgtgcttttgatgttttaggctggaccagatgatatcagaaactttgatgccgtcttcactgaagaaacggttccctattcagtgtgtgtgtcttctgactattccatcgtgaatgccagtgttctggaggcagatgatgcatttgttggtttttcttacgcccctccttcggaagacttatttttgtgaacactttgacattcagaaaccaatgaacaacctctagcttgcagaagaaatggaaacacctatttgcgtgaatatattcaactatgtataacagtgcctcatttttatatgtaatagtgaaaactaagaaatacgtattttctgctgtatgcaagaaatagggcatttcaaagagctaagttttgaactgaaatttgtattcttgtttattaagcttatttttaaacaaaaatttgaagctattcttagcattaacctatttttaaaaataactttttgctattgactgttttttttttcctgttaagtttacactaacacatccaaggtagacttttactagtctgttacagttaagataagatgtattactatctttataattctatgacttttttatcatagcagaactatgcaggttggtttatgatggtacaggatggtttatgatgaaaccctatcttcccatgataaatcactatttgcttagtaggattaaaatgcaagggcagatgaagcacactggctgctagtggacgactgcagccactcacctgcagccccagaagacaaggaaaaggcaggcatttgctttgaaatgctcagtccccatccatgcaccatttttttctctagaggaaaagaaaatatttaatggccagaattttttagaattcctaacgaactgagaagtgtaataaaatgctaccagatgtttttttaag

SEQ ID NO: 17437 - DNA, 1200 bp, Mus musculus
aaaaaaaaaaaaaaaaaacctagaagtttttgacaaatttttctaatttgctttacatttctgtgataaacaccaggcccggaagcacttcactgggagaaaggggttatttcagcttacatgttacgctccatcactgagagacaagggtaggagctcagggaggaacctaatccagaaactgacagcagaaccaaaaacgaccactgatatctgacttgctctctgtgtctggctcagctgccttccatgtacatcccaggacccacagagtgacacaggccacaatggctggaccctcccacatcaatcattaatcaagagaatgtttgccagacatgcccacagaccaatctgacggaggcagctcctcagctgaggctccctttcccaggcggctactgtctatgtgaaagggcaatgcccagcacacactcactctgaaaacttaccgcagtctttcttccacttatcaccataactaactttcctgttgttggcttcccttccctttcctgttcctgagacagggttctctgtatccctggctggcctggagctctcactttgtaggtcaggctggccttgaactcagagactcgcctgcctctgcctcctctgctgggtttatgttgttgttcttctcccgatgatggttttgcatgttttgagtattataaataaactgctctgttttaacattttggtgatagggatcaatactaggacttggtatatgctagacaaagcctctacagctgagctacataccctgtaaacactcttgtataacatttgtgtcacttcgatttagaggatttctgtttccggtttgttatttcctcttgtttcatgttttctgggttcagttaagaaatttttgcctacatgaaagttgtgaaaattctttgttttctttctagaaatatactttgggtttttttgtttgtttgtttgtttgttgagtcttttcccagtgtgtccatgttgtggtggagtgcgcatgccacagagcacacacgggggtcagagggcacgttggtggtgttgattgtctctttgtacctttacatgtgttccagggattggacccaagttgctgggcaagtgtccttacccactgagagattagctgtccagctggcccttgagagagtgtctatatggtgttatgtagtgaaagttgatgtttctcctatg

SEQ ID NO: 17438 - DNA, 8327 bp, Mus musculus
tttgggaatatgatacttgttgttatgatctgtgcatgtgccaaagaacccatgagctatatttttgtatgggttcttggctctgactattacagttaaggttgtaaatacaaatactgattctagacaagttagccggaaatgcaggaagctgtagttctttggtaaattttagaacaaatttctatgtttttaataattgtcttttaattctgggacctgaagttattagtttgtatttctctgcctgccttttttaaaaaaaaatatttatttattatatattcactactttgtttatatgccagaagagagcaccagatctcattatagataattatgagccaccatgtgctttctgagaattgaattcagtaccctctggaagaacagatagtgctcttaacctctgagccatttctccagcctgtatttctctgtgttactattttgtgtgtcatgtcaggtccctaacaccatttctgagctgggtgattcttgagaatggctcacagtttttattttgtgtacagtcataaccaaagcctgtgactctgtttatattagttttattgagatagcatcttgctttttgttttatttattttttgccttagccttgcagacacaccaacacacccagcaggcagcaataatttagtgtagttataggacagaaaggacgaccagcaaagggagaaggtgcatggggcagaatcagaggcaaaccagatgagttttgaaacttcagtgatgagacacagaagatacaattcccacagcactaaactgggactcaatgcctaaagtattgaggtctgcttatatatatgccctgtcctagcacaagctaacattcgggcggcttcctataggagaagcaagtgtttctttatagcctgtatgtttgtgcaactagtttaggaacagtgacacactcattaattagttcttagactagtgggaacctcctgaaacatatgttgtaagctgacaatcaagggctgcctgtgtcacagccctttcttagtgtagacattcttaagcctgctgcactagattttctgtacatgtgtattattatattgatgcagtatacctcaatatgaaggacatattagttattaattccagccaattaaagactggaatttgtgtttgtatttacctttgctctaagtagtagaatagattgatgtgttattttaaaagagttttgagcatctgtgcttcagtttaaatagtgctagctttttaagagagttaaattgaagtaaattttcaaatggtgtggagagtactgtgctagatatgggtaaaaactggaagcaattcctgtcttcatggccatgtcatcgtgttattaggactactatatgagcagatttcctccagataagtgtggttgtagtttgtggtgggaccaagtaaggaccatagtaggcaggctcattggtagaatgcgtttgtttcttttacagcggaatgtggccagaattcttaatctgatcagcgactttatgttaatggtgtagtttctcaaccatacttttcatcttcttcagaaggaaaacataatttgttaacagccacataaagaaatgtgacctgaaaatttttgtttatcgtggatgctaataaatgttcatataaaattttatgctggtttctctggcataacaaattatactaaaaaacaaaaaacaaatcagtgtttgccaaatggaaaaaaaaaagatagttgaaaacattttcactgttttaaatgtctgctttttttatggaagaaaataaattctaactttgtttttcttctttatgatcttataagtgaaggttcttcaggcctgttctgtatcagattgttttaaaatattttctgttttgcttcttcattctttcatggggtttactgtgccaatttttaatttaaaaaccttggttttatgtataatgaaataattcccagaatttatgtgtcttaatcaaaaaacaattttgttttgagttctgcctgcaaacttaagtgtgtacagggatgttgtctgctccatgtccagaataagacttggcctgctgacagtgcctgtaattaccatattaaccaattgataaaaatctgtgagtgtgttatcttatatctatagctggagagatggctcagaagttaagagctcttcctgattttccagaggacctgtgttcagttcccagcacccacgttgaatgacctacaacctcttctaatttgagttttagttgatctgacaccttcttctgggctcctcaggcatcagcaaagacatggcttgtgtacacacatgagggtatacacacacacacacacacacacacacacagacataaaaatgaaaataattttttaaaaattaaaaagcattaaattaaaaaattaaatatttaaatgtaatattgaaataaaaagttgtatagaaataatttacaataatttcagttaaaaaacatgtattagggtctggctttatagcattatacagaactttcctagtatattcttatatatgaaaacaacagcaaacttgaatgtaaattcttactatttcttgctagctagcagatcatatttgaagcaaatctaatttgaattaactttaggatgcagtttcagtaaactgatagcacaatcttttgctcaccttaatgctaacacataagactgtagaaccctagagatataaggtccactgtatgtgggccgtgctttataagctaatgtgttttgaaggccgcatgggagcagacgagggtatgtggatggggatgatgtcccagaagagccaaacacacagatctcagctgctgaaaataaaaggtacgtgacagcaatgatctccttgagtcttcacaccctgacacagcacctgcctaagactggcttcaggaaaagtggaaaagtacaccgtgttagcaagccgcctttatagtgagaggaagtagtggggggagaggttgagggcctgggaatgagcacctacggtatttcctttggcattctctctgtctcgctccccctcctgtactatggcttgagcacaaatcattgagtgaggtaagcactttaccactgagctacatccctaggcctataccattattttcaagaataagttttttagtaaagtttggcagggctttcagtgtaaccctctctcattataaaatatataaattcgtttgaaagaatgaaggagaaataacataattgaatggtgttataatgaatttgaaacatctgggaattgtggcttgcagagatgacacagcggttaagaagttatactgttcttgtagaggactcagacttgagttcgagcaatacatctgatggcttaacagctgcccttaattccagtgccagaggagcctaatacctcagcaggcacatacacacatacatacttaaaaggaagtcatggtactgcagttggactgaaaatggattgagaatatccccttagtgtgagtttttaagtttatttttcatttatttttgattattggtggggttttaatgcttacactgtaaaattagtattcaagtttctattgataacaaagcaaataactttctagttttattttggtgcttttttgtgttgtccataagaatgaatagtttaaaaaaaaaaacaaaaacaaacaaaccaaaaacctaaaagaaaacacacgggccgtcaagatgcctctgtaggtgaaggtgcttgtcacagacctaatgagttgatccttggaatccacattatgtgggagagaactgccaaggttgacctctgacctccactctgaccatgccacatgtgtattataaacacaaacaaaaattttaaaattgatgaaatgtaaagcaaacccacatgagctttggggatgtggcttagtggtagactggttgctcacatggacaaagcccaggaattaacccccagcatagtataaacctcacatggtggggcacacctgtgaccccagcactacgggtgggaggggcagaagttcaaagttcgagactttagagggaattgaaggtgaagatggggtacatgagacctctccccccccaaaaaaaagaaaaaaaaaaccaacaaaacctcggatcagggactggatcatgaggatctgcatggggaactgaatatgatggaactacattctgtgcgtggatgaaacatgtacagttggtgtatgctgctcaggaagacggaggaagctgtcctaaaatacagtataaggaaggcggtgtgcagtgtcctgaacagtgcccgttcttagaggaaacaaagtgactatcatccctggctgttagaaaacctgctgtttgtttcaattaggttcccttgacaatcagactcttttctttcaagaaagtttgtttttgaaattctttttaaagattttatttttatcctaaagggataatcttcttttctaaatgggaatatagttaggagtatagtgggggtatttcatataaaaacagatttcaaatctgtggacccagtgaagcaggctgaagaataaggagataaaataccatagttttaactagcatttttgaaagaaaggataattcatattcaccttttcttcttcaagggtacatgtatgtacaggtgtttgtgaaggctgtaggtgaagctctagtgtcttcctccattcggttccactgtattctctgaggtgggactttgccatggctggccagcaaaccctaggggcactgttgtagtcacctccctagctgctgagttagctcttgactgtgtgctgaaggttgaatacaggtcctcatgttttccaagtaatttactcactgagccgtctcaattccttattttttgttcttcaagacatggggtttttacatgtaattgaattttactgtgtagcccaggctggcctcaaccctacaatctttgcttcagccttctaaatgctggcattaatgccatgtaccactattcccagcctttatgttgaattttatttcctaaaaatacgtggattttaatatttgctctctcatattgtttgttttagtgttcactgtaatggaccacccagatctgctgatctcgatatcacaagtccatttgcaggcatgctctttggtatgtccagcactttcagctgattagacctttgtagagtgttgaactaaatgtccttagtgagaactcagggttgtaagtagtgatgacttgtgaagaacagcaggcatttattgaggcttactttatgatggttaccatacaagcatctagtgtgcattgtatagaactgttgataccttaaagcttaatacctaagttagctatggttatagatgatagctgaaaatcagtctgagtaataaattagctatatggttagagatgatagctgaaagtcagtctgagtaataaattagctatgtggttatagatgatagctgaaagtcagcttgagtaataaattagctatatggttatagatgacagctgaaaatcagcttgagtaataaggctgtttattttttaaagctaggattttgttgtattatgactgtttctttttattctgttttatatgtaactcttgattctttgcttatttcttgtattttatttcacttcttttgaacactccattctactactcttgctgccttaatcattattcttgagtgtgtgtgtgtgtgtgtgtgtgtgtgtgtgtgtgtgtgtgtgtgagagagagagagagagagagagagagagagagagagatatgctgagagggatttgagactgtgactgtgaaagacatagacatagagactgacagagagaactgaaaaagaaactgagactctcagagactgagaaagactttgaaggttttaaaagcccacctccagtgacacacttcctctaacaaggctgccctttcctatcctaatccttctaatcctatcaaggagctccatcccagtgactaaacattcaaaatgtatgagccgatgtgcgccatttatattaaagctatcatatttgttctttttctatagtttctgaataagtgggtttttttttcaaaatcatgatgacccaaattttctattttttttaaatcaaagttcaaggttattactgaatatagtccttttggtttgctatatatattatgtttgtcctcatttcatttcagaaatggtatggtgagccttgatttttgcttatagctttgtatacaaaagaagttgttctttgaacaacactttaaaagcttagctaaaatttagttttagtaagatacatgagaaaattgaagccgggcgtggtggcgcacgcctttaatcccagcacttgggaggcagaggcaggcggatttctgagttcgaggccagcctggtctacaaagtgagctccaggacagccaggactatacacagaaaccctgtctcgaaaacccaaaaaaaaaaaaaaaaaaaaaaaaaaaaaaaaattgaatagcatattaggttgatccaacctaaaagcaacctaaaagttaaattttgtctttgagacatagttacctggtacttttagacatttatttcctagaaatgactattgtgagaaagatggctatgctcacaaaaacttagttcttgttgcctgtaaggtttgagcaagtttgtcttttaggtcagaataaagacacatgcttaggctatattttgaatggacgttaaaggggaagtaagtggtaatgtgaaagcaggctgaaaattaattttatcagcaaggttacacctccatccgcagaggagtggacttaggtcaccggtatgcagttaggagctgtgggcaacacgacacagcagtggagtgtttgcagtgaacgagaacgactgacatcattcaaagtgatggctcatcttacatttgaggagctctatccctgaggaggtttgcacagataggggacttatgcctctccaaaggcggtggattttgtttcatgttactccaactccacttgtactaaaatttattttcctattgtttagcttcagaaatttcatttgggacttttacttaatcaaaaaacaaaataaaactaaggtgaacatggtagtacatacctttcatcgcaacacttggagttgaggtagaggcaagcagatttctgtgcatctggggccatcctggtctacatagtgagtgccaggacagccaaggctacatagaccagtgggttctcaatctgtccatctcaaccctcacaggggttgcatatcagattcctggttatctgatatttatttgcataatggttcataacggtatcagaattgtagttatgaagtagcagtgaaatacttttgtagttgggggtcatcacaacataaggaactctattaatgagtcacagcattaggaaggttaaaaaaccactgatacacactctttcttagcagggaggagttagggggagcacatgagcaagtttggagggaaataacaatgtgctatggcatttagaagagagcacagattacttagacgtatatatttaaattcatacaattgaaagctttccttcagttttgtatttttgttgctgcctgtttgtatctcagtcctagggattgagtggagcactgttatgcctaccagctaagagttgtaccacagagctacattcttaatgcatgtcggtgtctcttatagtctgggagcacaattcacaaaatattatttcaaatttgtggggcttatgaaaaggttttaaaagctttttatttacgtccctggttcagaatatttgagacagaatcttgttgagtgacccaagttggactagaacttgctttgtggttcaggctgactgagttcacaaccctgtctgccttctaagtgccgaaattacatgcgtgtgcttctttcctccttttcctttgttttctgaggcactgtttcaaagaattgctatagaccaggttggtcatcaacttgagatctactgagattgcatgcatgagccaccatgcctatgtaaataatcttttttttttttttttttttttttttaattttcgagacagggtttctctgtatagccttggctgtcctggaactcactttgtagaccaggctggcctcgaactcagaaatccacctgcctctgcctcccgagtgctgggattaaaggcgtgcaccaccatgcccggcttgtaaataatctttttaatggcttagaaaatacagtgtgtattttaaagattgtttatggtctggttttcagtcataatggtttgtaactcagttaaatcaggctgc

SEQ ID NO: 17439 - DNA, 1253 bp, Mus musculus
cttgtaatcttgtgaagagatgcagagttgtaatgggctggcttgtaggtgccctgtgtatgtcacctgctacccgacttgtatcttttgccttctgtagatgatgagggttcactggttgatcctgatgacatcatgagacacctgagtgatgatggacgcaactctgcggcaactgagccctggctccgccctggcacttcagaaagtctgaaacggttcatggcagagcatctgaatgaagaacagcataaggggcctgggaagccaggcacgtttacttggcagggcctctctgctgcacatgcttaaaataaaccctctcggatccagtagtgccttttacagtggaacgttcacctgtatcttgaatactatgtcttgcttgtggccctactttaatattagttatttatgtaaagtgtatttttcccatgatgatacgttatgtatatataatgtacataaaagccctgattattggtttctaattgtatagaattatttttgcaattttgctatgggtggtaatgaactcttgattgagctaccgtatgtgcattaaaatgtgcttgccattaagaggtggtgagctagagtgtacacagcactgtgaaacaatacactgttactagcctacttgccactgttagcattgtggagaaacaattcagagagacttgttttatatacttgctgttgctgtgactatgccagctgctaggcaatgaaagattcaaacaagctgctcattttcatatctgtagttacacattccataggagcaaagggatttgtgatcatccatgagccatgattaaatgttacatttttctgcctccatcttatttttatgctgatagaagcacagactgggttactaatttatctgatttcactatttcttaacacaaataaagttctatttttattaactaccagtgtcggtttctttctttactcaaagtgtttctaggggttaaaaaggtcccatccagagaggatagaggcagtggtcttctgtcccaccacctgagacccttggctacgtgaactgataagtaaatgatattttacttcataaagactcattcaacttttagaaattctagaaaataattcttacttggattagggtcttcagtgtgtaccatgatggcagttgaagacaggcagccactgcttctctgtaatttccagggataacatcaacatccaattttgacattagagtttaccaaaaataagacatt

SEQ ID NO: 17440 - DNA, 1741 bp, Mus musculus
gtatttcaaatatcacaaccacctgaacaggaacttgggataaacaggcaatgatgagagccgatgtttttctgttggtgtttacattgctctgctctgtgaaaggatcctgcagcagaggcttcctacctgaaaaatgtttctctcaattgtagtgtgtgagttactggtaagacgcttacacctataactcaaggtcggaatagtccctccagtccctttagtaacccagtggcctctgtctcgtgttgggctcatgttgagcagaaaggctgttcccacagcatcagcctacctttagggtccttccctgtcctctaagcagggtgagcccacactgtggcaggtacggaaattacccaaagaagtatagatgtaaagactgagcttctgcgagaagtacaactcaggagagctgtattttgaaggataaaatgtttataattgggggtgggggaagggagaaaaaaattattgctcatggtaaaagatatttagcaactatggtattcttactctgaagatttttgcacactcaggctatctgagacaccggaaatcatcatctttctgtgaaaatgtacagagatgcaggtctgtaatataaaaatcttaaacatattgttcctcctgcactgttttatttctttattttcttatctacttgctaaatacccataatattttgtcaaatgcactaaaacatttgggttgaacttttagtctttgggggagtggtggtcattttgagggcttgctgtgccctgaatctgttgtggctgatgcctgtcaagatgacaacaggaggggatccaccaaggtagaaaacatccctgctgacaagacctacctgtgacatactcactctcttagggcttttaaagacaagccattaaaatagatgacctttcacagactgaaacttgaatcactgcaaaatgaatctaggttgctgtcactttttcttttgggtggcggggcttgatgtagattttattctatgtacagaatttaatgttgaatatattaaaaataacaaacctggcatggttttgggaggttagatttactggaaatgtattcatactgtgaactgtgctctgatggttagaatgaaaagcttatcaagcattccatataacagtggatgtagaaaatgttttcaggtggatatgtatatggtacagatgtaaagttttctatgtaaaaaattctgtacaactttctgtacaatattgattctcatctggcatatctaatcaggttataggtcaataaagtttttgaattatttcatcagtgcagtgtaacccacagccctgttttcattgttttttgtttgttttaattaaaggtcaaaccatgaaaagattttttttaagctacagagacccttcttcacagtctacattggattcttcaacttcctttcttaatcttaagatacccaaaagcatatttattactcagtgataatgctggtagtttatactatggcattttatagatcagtcagttccgtggtacatagcattaaaaatcaaaactgcagtggttaatttcaaaacaggaaatatgtccctaaataatgagaagttagtatttatgacaaggccaggttaaatgctagaactaagttacttcagtgttttctggtctaagccatttcctcccatggctgaagaggacacaattgttattttcaaatgttgacagaagaaaacttattatcagagcaaaa

SEQ ID NO: 17441 - DNA, 1179 bp, Mus musculus
taatctgcaggaaatagcatgagctgagcccaggaatctttaggctatgtaatggtagcaggaaagacacatccgcaatgagaagcagtcctgggacaaagtctcatgcaaaagagcaggccttcaccaggaaacgctcttgtttgccatagccttttctgtctgttttctatggtaaattagtaatttgactaggaagtgggagctggagagacagctcaaaggttaagaatatttgctgttcttggcagaagacccagtttcatttctagcaccctgtctggcagttcatagcttcctatatctctggttccaagggaattaacaatcctatagcctgtgtgggtacctgcatacacatggttcacatacaaacgagcaggcataaacatgtatatgtaaatattagagagagcagaattgggagggatcgttgagtcttcagtttactaaaactggttaaatgtatgttatggctgtttgttttccaaagagagatgcagtagacttcgatgttcgagttgatactcaagaccaaggaatgtaccgctttttaacatcacaacaactgttcaagctactggactgcttattagagtcgcatagatttgcaaaagcatttaattccaacaatgaacagaggactgctctgtggaaagcaggtaagctgtccaggtctcatgctgtcactgagaacacactgatgtatgtgattgtcaaaattccctgagtgagcactttaggtctagtgaaaaaaggcaggcaggctctctgagtttgaagtcagtcaggggtacacacagaaacccagtctcaaagccctccccctccccctccccctcccccccacaaaaaggaagaaaaaagaaaagaaatagatgtcagtgcctactcatagaagagagtcctcagagcacagccaggaaaatcaaggggctgttgtctagtatcaccttctgtacccactacagtgctggccgtctttgttcatcctctccccttggtgacccaacgtagagaagaactgaacggcacttgccttttcccctccccttattgctaccctctgactaggacatccctgtgagggcctgggttcctctgccctttaatgtttctggcttgcattatggagccctgccataggcagagcactgcagctgcgttctgcctgaagag

SEQ ID NO: 17442 - DNA, 1236 bp, Mus musculus
cttgaagcgtctgtgtgtttaaaaaatacttacctagatcactaaaacccataacaacaataatatggctcaataacatagagtgcttgattgtttaagagtattaccataggactagagagattcttagtgtttaagagcaaaaactgaggttgcagaggccccagtttatttctcggcgctcacatggtggctcacaatcttctgtagctccagggaatccagctccctttgtggtctctgttggcatctgcactaatgaacacacacacacacaaacacactctcacacacacacacgcagacacacaattaaaaataaatcttgaagaaaatgttttcatacttaatcctttcaaaaaatataaatatacataaaacccctatttcaaaagctcattaaggttttccctcccactgctattacagctcaagtcagactaccatgtaagtctgtttgacttgtgtccagcttcccttcatgacagcaaactcctgtttagtcccctcatactgacctttctggtccttgatgccttgtgtaacagaggatactttcctaactcctcccacaaaggaaagtcatgtcagctacatgaactctccctccactctaacacatgtgcgttgtgtcagatctggagaacacttgtgaagagtgctgctttctcattcattgcaacatcacattcctatccatagcacatgaaggctatcaagcctgacaccacaaaggctcagaaagggtggtttggcttggtttggtttggtttggtttggttttttgagacaggctatcctggaactctctgcttcttgtgtgataggatcaaaggcgagcgctgccacacccagcctgggtttaggttttgtgcactgagtttcacactctctgtagtccaggctggtctcacatttgcagcagtccttttgcatgaacctcagtcatgtcctgaagacacttatctttatctatgtctagacaattttaaatagaggaaatcttttttatggataatgtgtaaattttatacttttaaaaaactagtataatggaaagcatgtttgtccctgtgatgtgcttatctgatgaatttatcttattaggatgcaatatcacaaaaatctgtagacatacatgattctattcaaccaagatcttcagataacagacagcaagcaccactggtttctgtttctactgtgagtgaagaagttagcaaagtgaaatccaca

SEQ ID NO: 17443 - DNA, 1159 bp, Mus musculus
agatatggaccagggtctgctgagtataaaataagtactctcttccaaatgtgtagtgaatagtttattgaatattttaacatactgtccaactaggaatcaattattgctttattaatgtaagtaaatagacaggctgagtgatatttggaaatcaggcaatgaaaaatgtagggtaacttattgtaagtaggaaaataattcaggggattatattgaaactaaagaatctggattattgtaaaagtcagtgcttgtaaagagaaattaattttaaaccaatgataagactttatacatggatgttgactatgtctgtgttttcttttttgtggatagtttatagatactgttattaagatacacctaacgtcgttactgagtgtattattgtttccatttatttaagcccagaaacgtaattttcttttttctttacgaaaactttctcacttattatgccaagatgttcaattatcacttgatgcatatgttattttaaatttttaattcttctagttggcttggacaccttttctggctgcattcagtgtgggtctccaagactgtgatgatactgaagtagcctctctttgcctagaagggataagatgtgctatcaggattgcatgcattttcagcattcaggtaacaaagaattttaccttaatagccagttttgaaaatatacaccatcaatatagttcaactcatatcatttttctctgactttcttaaaaaccagcttcaaatttatgataagtttaaataatttttaagagactgtgatagagcaattctgtatgatgtttctaaacattgtaagtatttattttagatgcctcttaaacgtcagaactagttatctttaaaagaaccaagtacctaacatactctccatgaagacagtccttttagagagtttatgaagtttaagcatgacctttagctagactcttctatttcttaacccattttatatttcattgagaatgttatgacttagtgtattacaaaatacagcctagctatagaggaaataatgaacaaatttataaataaaggttttgctaatataattaaaacaaaattttcagtaaacttattttcactgtataaattcatttattgactactgaaaatctcatttggaattgtc

SEQ ID NO: 17444 - DNA, 1109 bp, Mus musculus
gtattaacatctaatgccttctttcccagcaaaattggtagtagtgtatagatgattctgggatttttttttccttttttgcagccactatttacaaactgaatgtcataaaaaatgatgacaaaatttggaaagagatttgatgtcatttgaaagtgttaagatagtccctccaaaacactatcagtaaaacctggtttagattgaaagcagcaagcaattctaatttatcacagtgttcttaaggcctggctttctagaagtattactattagttttgttattggtttggttttttttggttattgcaactacaaatagttttccaaatttagtaaactacaggaaaaaatagactttagctttgattatacctcactgtttttgtttaaaaattagtatatattcattcacatatatttcaactcatagtccgctagtatatttattagttatctcttatgtctgtttcagaaacttattgcttatgggcacttgactggcagggctccagatagtacgacaccaggcaaaaaattaattgatagaattattgaaacaatatgtggctgcttccaaggtcctcaaacagatgaaggagttcagttgcagataataaaggtaatgaattatataaggtgtattatttattatacttttgaatccagaagcatctcgacctgaaaacatcaggaagagttgttctctgtgcactttgggtgtgacgggcacttgggataatgtttagaacccatatgagatttgttgttttatgccattaggagaaaactgtgtttctctatctcttctcttggccatccagttaggattgaattctttgggtcttgaggagtttttctgaacctacctgctttttatacatctttcatcttttaagtttcaagatgattcataaagttgtgaccttaccaacgtttactgtattgttagagcctacgttgtccttctcaggccttgtatcaatcaccaggtgtactgtctttcacaactctcttgtacccatccatctagtgaacctgctcaaacaaagtgaacaaataaaatccaagcttgtgttgtaatgaatctggatggttaaattcgtttag

SEQ ID NO: 17445 - DNA, 1451 bp, Mus musculus
attcattatcatggccatctctcctgcccctccccacatctgatcctgaacccacccccaattcccctccccattccttctcccacccagttcccttcctccatctgcctttttatgactattttattccctcttctaagtgagattcaagaattctaacttgtctcttcttcttccttccttctttcttcctcctcctcctcctcctcctcctcctcctcccccttcttttcttcttcttctggaaaacaccaaatatcggatgacagcaatgcagcaggagggcctggaggacccaggggcccaggattaggaggccccggtggcttccacggaggattctgcagcggtcttaggagctgtggttgtggccaaggccgtggctgtggtcgaggccgaggagctcgtggaggtaaagctgaagacaaggagtggatccctgtcactaagctgggccatctgtttaaggacatgaagatcaagtccttggaggagatctacctgttctccctgcccattaaggagtttgaggtcattgacttcttcctgggtgtgtccctaaaggatgaggttctgaaaatcatgccagtgcagaagcagacttgggctggccagcggaccaggttcaaggctttcgtcgctattggggactacaatggtcatgtttgtcttggtgttaagtgctccaaggaggttgctctgtgctggtgtgtctcatccctgcccccagaggcactggcattgtctctgctcctgtgcccaagaaactcctgatgatggccggtataggtgactgctacactttagccagaggctgcactgccaccctgcgcaactttgctaaggccacctttgatgccatctccaagacttacagctagctacctgacccccgacctctgaaaagagactgtcttcaccaagtctccttatcaggaattcactgatcatcttgtgaaaacccataccagagtctctgttcagaggacccaggctccagctgtggctactacataaggattttatacaagaaaaataaaaggattaagtctgcaaaagaaaaaaaagagaattctagcttataccttcattctatttattgcctgcatctcttaaatatgaggttagctgtggtctggagatgatattctatatagcataatgttgggtgatgaaaagtcagcttagtgattacaagcacttccaaaggtcatgagttcaattccagcacccacatggccctcacaaccatctgaaactccagttacaggaaattcaacatactcttatggcttccaggggcactgtacacatatgatgcacataaatatatgcagtcaaacacccagacatataaaattataaattgaaaaatattaaagggaaaggtgttacttatttgtatttatttcaacagttacagttggtctcatcccaggccacaatggcaa

SEQ ID NO: 17446 - DNA, 1107 bp, Mus musculus
cagtggctacattgatagcccagctgaactaaaatcttttcaagtctcttgcaggcaattttgttgtgatgctatttacaacttgtgcaatgaaaaataagtcagtgtaaaatgattaggaaagttgttgacaaaaaaactctccttgtgtctgtgtttccagtgaagagggagccatgctttatcaggaaagtacagacatgactcaggaatagaaaatgaagtcaagagttttctttctttagcttctttcagcgggtttaatgagcattattgattaaaccgttagggtcaacagattttaaattggagtagaggacggacaccttgctgagaaccaaaaggttatagctgttgaggaggcaggcaattaaatgaaattgattttctttttacatgaaccattagatacagtgcttgaccttcggtggcctacagttacatgtgaaacaatgtgtagaacaatttgaatcaagtcagatgctaaatccttgtgaacatcatgcccaactagacgttaagtatgtaacttggaaccattagcgtgtgaagaattcagaggaattctcagtaatgattctgaggaggtcacttctccagttgcttattgggaagtggaaataaaaatttttattataaatatgattattcaattttctatggaaaagatgtcttttatacatagttcacaatgtcaagctaattttaattttaaattctctatcatatatccccgatcatgtggccccgtggcctatttttttttactgttaattcttatcaaactattattattatcatcattattattaatcttttttatagtccagttgttatccccctctgggtcctccctctgacagttcttcatcccccacccatatccaagaggatgtccccacccctatcccaccagaccttcccactccctggggcctcaagtctctccagggttaaatgcttcttctctcactgaggccagtcctctactatatatgtgtcagggcccctcctatcagctggtgtatgctgcctggatggtggctcagtgtctgagagatcttgggggtccaggttagttgagactgctggtcttcctacggtgtt

SEQ ID NO: 17447 - DNA, 1175 bp, Mus musculus
gaagctgctgcaagtttaaattattatgaacatttggtggtggtaaaaataaaagtaaataaaataataattctatataattttattaccactgagtatagattcacttatcaaatgttccctgcaacttaaatctataattacatcatgtgtatatagacagtttcagaaatgcagaatgaaaacacaaattaacagctttatcttggtcccaatgttattcttttctttatgatttggagatgcatgatttgaaaaaatgaactatagcatgcacatttttataatcctctcttatagtgaagcatgagttccaaaatcatgacctgcccttccttaatggctcatctttagatactacagcatattcaatcataacagtgacatactttatgctgttgtattttttgttatgtatttgtgtatttctagcgtttctcttcttttcaattctgttaaaatgtgtagactgtaagatttaccacactgagtgtggaatgaagcattaagtgtgtgtgctctgtcagcattcactaggatgtttttatcttacaaaattaaatctcaatgccaattaaacagcctcactgcctcccgctctggactctctacaagcttccatgcttctgctgatagatttttctagatcatgcccaggaactcatctaggcaattattccaaatgaagctcacagagtatttttcataggcttttctaaagtgttataattttaggttttgcatttatgtgtatgatcctcttaaataaaaccttctatgtcgttgatagatgtgctttgaagtatatgataaaaatctgtttctaattgacttatttgtatatccttatggtcttcattataataatttgatacatatagtaaatatagtaattactaaattagggtaatcaatttttcatcagcctgtgctcagaaacattgtacctttttttttctaattacatggaaatttatcaattgttgtagaccatagcatctttctgtgtcacagaaccctgaagggaacattcattctttttatttctgtatgaccatttgttccattaccatgttcaattgaatgccttttaaatctttgtagaaaataagtcatccatatgctggatatatttctggactttcatgtctgttcctttggtttcattgtctcta

SEQ ID NO: 17448 - DNA, 1287 bp, Mus musculus
gactcagtttgtgttttttcacgagatgaagatggagcgcggtggctgccagagagattaattcgtcagatgaacacagattctgactcttctggtaagtatcattctaaagactaaaattccttttgtgcttaaaattcagctgagagcaacagctctcaaaggtgttctccagctactctctgaaccagctcccgacaggaggccggagactagcctcagctttacaatttgcatttgaataaagtacctagacttcccggaaagaagttctgctttcctactttctcactgtctttcaagattttgtctttcaagcaggtaaatcaacattcccgaggcggaccagtggatgtgcatccccgcccccctagagcacacaagtgacagctgttacccccagtctcaggacatttccagcatgtggctttcagtctgagttaaaaatttaggtttacctagagggctagaagagtagatttttctatattaataaagattggtttttattttgatagacaggcttagccccttagctgacctctggcttttcacccttgctgttactgcaaggtgtccttagctcaataggctgtggaaaaaacagggatgaggaggagcgacttccagctcctattttacccacaaatcgtggtgttattaacgacataattcttgctcaggctttgctaattctgaggttgataattctcctttaggagctgcacagcactcagaactgtgcatactggtttgtgattgtacaaattcagtatgggcaccgcttggtgcagagatacttactgcaagggaaggtccggcttgaccgtttctgagtttcctgtgagataaacccggtttaaaagaggttggtatcatattttggttaaaaataaaaaatattctccggctctacctcgcctccccaaaaggtaccaagagccacatgtgtgggttttacccacgggaggaatcgggtccatgtccacccaagccaaggttaaaagcccactcatctacggatgagaaaatcatttgatcacctcagttaagcgttgccttatttaacttaattaataggggggagagagattggagacgtactattgaaagggcaagcccttcactgcctcccacccaaataaaaaagccaattggccttgtactacaagagccggtcactccttctccctgtttcccacctatcttccaaaaatgcggaggaatatcaacttagtgctattttcacatctttcagtcaaacttagccagagttccaaacgccct

SEQ ID NO: 17449 - DNA, 1114 bp, Mus musculus
aagcaacttaagtgctggcaaagcccagagccaaattattaaacttgctctccataaagaatgcatcattcataaaatattcagctcggggatgtggcatgtggcttttagatgtcacctctctccagccctgtagagcaacagagtgaggtgcatgctctgaacaggtagaactactgttgctaacggaaggccgtgggaataaagttctgttggaggtaattgtataatttgcattggtaaagccatgactgtatctcctcatatcatgagaaatggaaaattattattactcaatactgttttgtgaaagaaaacttagaaatctacaaggatgcctaaggttgaatgctctaagcattgtgattaatccactaagctgtcatttgcagcactagacagacttgtgtcctgtataacagagttgtgcgtatgtgagtagctctctctctctctctctctcactctctctgtgtgtgtgtgtgtgtgtgtgtgtgtgagtagctctctctctctctctctctctctctctctctctctctctctcttttatgtgcaaaatggaccaaatagaaagattccttgtcaagttttaaagatttcctttaagtcagatgtggtggaatgcctgcaatttcagcattcagaaacctgagccaggaggatcgtgagttcaggaccagctgaagatacatggaagagcttgtcacaggaaaaaaaaaatgcaaaaacgaataagtcaattatttcaattaaatttaaaattcttatttaaattatatttctacttcaaattatctgtgactatcaagaaattgtaagatacaattgaagctgagccctagttctcttacctctacattgggatgaaatccatcaacattctatgtcaggcagggtctacaaagaccagccctgtcatgtcaaccttagcctcagttacagcagaggggacacaggcagataagattcaagtcggagtttgtgtcactgtcacctgaggaccagcagtaagataaggcagcagcaagacctctaggaaatgagccaaaactccacatccccaggggatgagtgttggaaggacgaaaggaagtgcacagaaaagtatcta

SEQ ID NO: 17450 - DNA, 1192 bp, Mus musculus
ccaggccactgtttgtacagctgcttgggaaatggagatgctatctgagtcactgatcagtagttctgtgtgttacccactgccttttgcagaagaaagggaaaaaatccacgttccaaggcattactttagatcaaaagcctgttttgaaacccttaactgatgctgcctttgtattttttcctctctcctttctaggactccatctgcagatgttctgaaaacctctgagtctagaaattgattattcacccaggatacctaattcaaggtattagctcttgtcagaaagcttttacatctcagctcggtcctgcaaattacactttggcaatagctgggaacgggaaagttggatggagaataaaggataaaagtgattttgtaaaataatcaagtatttaaaatctccctggtggtagtgagggtctgctacctgtgactcacacacagctcagtcccgccagcctgcctgccagctctggcttatttgcgggcccttttgctacaaccgtgtttcggtttggatttaattctcacccttttccctatttctcttgatacctcccccatcccctacaccccagctcccagaactcagccgaccaaggagcttggaagactttgcaactttggaccaagcacaatgaagtattccctctgggctctgctgcttgccgtgctgggcacacagctgctgggaagcctgtgttccaccgttcggtcccagaggttccgaggaaggatacagcaggaacgaaaaaacatcagacccaatattatccttgtgctcactgacgaccaggatgtggagctgggtgagaatctgactttttgatttgccagtctatttgattcgaatgctttccagagcctcgcctgtatcagtggtaccagtggtcctttagaggaccagtgctttgctagctgctcctaacaaccatctggttaacaaaccgaactcgtacggctcataaactatttgatttgtttcagtattacttctctggtattatatccgtcctgttacagcattaaagaataatttcaaacaggagaagaagatgggaagcttgggaatccacagaggtcgtggactttataaactttatgaaccctggaccaagggaattgtggctcattcctgtagtctcataacttggaaagtagagatgagagatcagcagtttaa

SEQ ID NO: 17451 - DNA, 1115 bp, Mus musculus
atgtttggatcccaaatggcttgttttgttctagaattgagaactgatagaattgtagactccttcacacggggaagggaactaataaatgagggaacagcgctatctaaatgacttatggaagtgtgtgttttgctaaccagtgtcagacctgtgcctttcaggttccctgcaagtcatgaacaagacgagaaagatcatggaacagggtggggccaccttcaccaatgcctttgtgaccacgcccatgtgctgtccatcacgctcatccatgctcactgggaagtacgtgcataaccacaatgtctacaccaacaatgagaactgctcgtctccctcgtggcaggcaatgcacgagcctcggacctttgctgtgtatctcaacaacaccggctacagaacaggtaaaacatgacgttcctttccccccacagtctcagatgaggggaactgcactgggtaatattatatatgagaagttccaggagactcaacaatgaagagtctaacttctctcgtctctgccttggtccatgttctgttgctataacagaatccacgaggcagggtaacttactgaagaaaaaggtttaaggagcatagagtcagtgggtcaaagttgcaagaacatgctagcagcttccagcagaagattttattctcaatcattaatggcaacgagtgaaaaaaaacaagttaagtgccctgggaacacaaggctggcctcacttcctagtaaccttgtcaggaggcaaaaactactcctgggaaaggtacttagcgacctacttaggtctaaaacactcaaattttaaagaagataagccatattaacaccagagcaaaaagtgttttcactcaggaggatgtaccaatgtgacatcccttatagaaaacccaggacttgggctggagagaccactcagtggttaagagcactggctgctcttccagaggtcctgagttcaattcccagcaaccacataaccatcagtaatgggatctgatgccctcttctggtgtgtctgaagacagtaagtgatagtgtactcacatacataaaatgaataagtattttgaaaagaaaagaaaatcctggattctcagtgggtgcc

SEQ ID NO: 17452 - DNA, 1828 bp, Mus musculus
tctcactaatctagggtccccttttctaaatttcatctaagcccagtgttgtactgtcagaaagaaagctggtgtgctctgtgcacatgtaaaacctgctcacacagtggcttccaggagcatgcatccatgcaggaccatgcatatgaagaaacatccctgagcagctcacttgcagcacttaagatttggttttgtactgagtaccaagaaatacaaaataaagatactccgctgagaatttgcctattatattaaaatattgtgcagtctatctgttacctggaacctgatccgtataaatggctttgtcctgtgactgactgttctcacactgaggagctgagcaagcccagtgagcacgctgtccctgcacgaggcagaagctgtccctgcacaaggcagaacagtgccactcctgtttccacatcacactatgctctgtgtagtcaaaggtggtcttgactttctcattctcctgcctcaatccactgagtgtgtagcaggtgtgtagctggctttacgtgctctaggcatgaaacccaggcttttgtgcatgctgtgcaacacttcaccaactgaccccagtctcccctttctcttattttcattgtccttctgtcacctttgtatacaaacatcactcaacattcaaatactaggagagaatactttccattattacatttcaaattaatttatagaatatttacatggctcatccggttgagtcaaaaatgttttgttacactaacgaggtctcttggtttctcttctcacagaggacagttatgggatggatgggaaggttagtcagtccaatattacttcagacaccagctggcaaggcctggaggagttatccggtgcaagcaacatcgatgagtacaggtctaaccctagactaagtctggaggactggactaactacctgagggctgtctacagagcctttgcactgctgaacagtcaccctgatccaaacaaagcaaatgggactccaaccacacaaggtggtgacttcctggtcacctctgctgagcgcttggtgccagcagagatggcttctgcagaatcaggtgaagacccaagtcatgtggttggggaaacacctcctttgaccttgccagtcaacctccaaaccctgcatctgaacagaccaacgttaagtccagagagaaaacttgaatgggataatgacattccagaagtgaatcatttgaattctgaacactggagaaaaactgagaagcagataggatgggaggagctgcatcatcctgaaggtgacgtcgtcagtggcaatggtatgacagagctgctgccccagtctcatcttgggcatcagctcaccagtcagcaccaacaaaaatgttcccaggatgtggagacagagaaggatgcttttgaagatcaattgcgtcctcttgtccactctgacagaactccggttcatcgggtgttcgatgtgtcccgtgtggagcagcctcttcactccagccacacggagagaatgttggccaagatggggcagagtgatacaaaggagtggctaccaaatctcgaaggcagtgcctccgctccagtcatctctgcttagattagatgttgcctaacataatatttctttccatgttttgattagtaaactagtggtggcaatcatgactgccaacattctgagcccccacctccacccccctccctgggcacactcatgtgcacagcagacactcatgtgcacgtgtgtgggcaatgctcacacagactcattgtaacttgctattctaccaagaagggagaggtgggggcacattttctgttttga

SEQ ID NO: 17453 - DNA, 1135 bp, Mus musculus
acagagagctcgtccccagggtcccgcagcaccttcaggcaagtacaattaggcaaagacctcggaaaacccctggagggtttcaaaacttaccccctccctcagactccaacctgctaatctaatgctaatctttgctcagaaactacaggtattttaacaccaactaattaggtttgctagttctccgggcgtaggccgggtctttcctaaagcttgatgtgtgtgttattagctaagtgggtctatatactcccgaaagctcgcctgacccttttccatgacacagaagtcaatgaatggattgataagaccacaaaggagacagggggcatttgtgcgcagtgatttctcctttaaagaaatgattaactgacagagtctattgaatgccaaaatctaacatcagattttattcttaaaccaatgcagtttaatacagtggttataagataaacatttttattagtccacagagaattcctggggaaacttggcataagctcaagattcaaacaaagatcatgattctcaattaatttctgtgtctctgagtctgtctgtctgtctcccccctccttacctcttctttgctccatctttcctgcttctcttcttctctctccatctatctgcttaggcatgtaagtgccctctacctcaggccttttaatgtctgtgtttggagaagttcagttcttgtgcactctacaaaattcctgcatcctaatcaatgatgctcctgcttcctttactcctcgtcccctccctccctcccttcctttctttctttcaattttttttaaatagtcacatttatattttattgtttatattttattgaacactataaatatagagaaacgctaacatatgtaggaggatgtaaattagtagcatgcaaacatgccacttcatataaaggcttgagttgccaaggattttagcagccaaccagctttaggggtagcttcagagatcccccatgagccgggcagtggtggtgcacgcctttaatcccagcacttgggaggcagagacaggcagatttctgagttcgaggccagcctggtctacaaagtgagttccaggacagccaagactatacagagaaaccctgtctcgaaaaaccaaa

SEQ ID NO: 17454 - DNA, 1234 bp, Mus musculus
gaaaagacccaggcacagtgaagcttggctgccatgtcaccttgttgcttttgttttttgagacaggattttttttttttcatataaccctgactgtcttggaactcactctgtaaattaggcttagccttgaactcacagaggtccacatgcctctgcctcccaagtgttgggcttaaaagtgtgtaccacagatgtctgtcaaaattagagtttctcaatcaaaacaataaaagctgatgtgtccattacaatgaaaattaacccctttgctgagttgcagcccatggaagttggctttttctgctttctgccctctgcagaagttcactgcctccagcatactccgaacacacatcagacagcactcaggagagaagcccttcaagtgcaagcattgtggtaaagcctttgcatctcatgctgcccacgacagccacgtccggcgctcacacaaggacaatggccgtagctcctgcgatatttgtgggaaaggcttcctggatcaagaggctttctatgcccacatgaggcttcataaaacctgctaggtctttgaaagcaaagccagttacaaaccaagaacgctgactctcattcctgctttgtctgtgtcgcgtgggcatggttgaagtgttcagtgagaatctggagaatggagtagttgatctgaagctccaaaccttatggaatccattcagaccaggagtgagaataaagtcctgggtcttgtgattaaagaagaaaaggttccccctctcctgtctgccttgaacaccccgttatacggtgtctgtagccagcgactatgtgcatgagtgttcgccgcgggcatgtttctgtgctgcatgcgtgtggaggcccaaggaagacatcagatcctctggggctgtatttacggatagttgtaagccactgtgtgggtaccgggaattgaacccaggtcctctgctagtgctgctaggacttaactgctaaaccatctcaccagctcctgctttctatttggttttggtggtggtgttttggtctctctctctttctctcccacccccaagctggctttaaatttgtcctatagctgaaaatgaccttgaattacaggattaagttaccacagccaagcaatttgcactacctagagatttggtatgttataactaagtcttctgccgtgtattagtgttccatcttaatttgagctcatttctctcctcactgagcaatgaaaatg

SEQ ID NO: 17455 - DNA, 1193 bp, Mus musculus
cagaccgtaaggtctctggttctagtatccaggaacatcttgagtggggacgttcttttacctgtcccgaatatagtcacacatcttgttgacttggggtccgagctgtcttcttgagctatggatttgttataccttgtctgacctgtaaacctgaccctcctgcctctgtcttttcagtagtgggattactcttggcacagacacctggatctgacacctctttgtctctagtttctctcttccttctttgtccgttggaaaaaaaaaaaaccagacttacctttctgtgcttgctttctgacactcagtgacttatcactcctgggtcagagtcagtaagtgttagaatcaacgtctgtgaattactgaaggcacgatgcattcagtatatgtagtccaggctgacctcaaatcccctttggagccaaagatggccttgcactcctgatttttctgcccaggttcacaggtgtgttccaccacacccggttatggtgtgtgtctgtctatagctgttttgaatcctctttgaggtggggaagaggagggacagaggttaacacaccttccgacacttccacccctgtgtttgacagagtctgcagaaggttacagatgtgaacgctgtggaaaggtgtttacctacaaatactacagagataagcacctgaagtacacgccctgtgtggacaagggggacaggaagtttccgtgttctctctgccaaagatcctttgaaaagcgcgaccgcctccggatccatattcttcacgtccatgagaggcaccggccctacctggtgagcagttgctggtttgatgtcttcctagtgtgtttttacactcccttgtcgtgaacacacagagaggggttcatgggactgactagaacattcaatgcttgccgtgccggggtagtgtggaagacgccaatgtgtgagcgtgagcgaatgtgcccaggaagaagcagggaacagacgtaggagtgggcgaggacagttcagccttggggcgaacacagccgtgagctgtactggaagctgggaagagattaggtgactgtactttgttccacacccggtcaggctctagatagtcactggtgcagaagaaacactgacatggtccaaagaatggaaggctacatcacagtctgtgttctttctttttttttttttaagatttatttat

SEQ ID NO: 17456 - DNA, 1184 bp, Mus musculus
aattcctgagattgcttttagtgagctctgaggactaagagccaagtggtttccctcggtggctttaggaatgtacaaagtatctacatgatggtctccagaaattcacacctggcagctctttacctcagaaagcattgtctctgactctcaagtttgcaaaatggagttcattacccaccaaacctcccccaaagggtttttttgaggctcaaatgagcaacagtgtacaaaaagcctgtgtcaatgatacagcagcagtaaagggtagaggataaatgtccaatgtaaatcctctctagggactgagggaaccctgtcgggaaggcaactcactgtctttttctagggtctaatcatcttcataaaaccctggacaaagactccctccagcttccggaaggtaggctgcactccttgcctggatttatttcccacaactaatgttgactcactgcccaggctcattctcctttcctctcctgcctcgggttcacctaggtctctgcctcatgcagacctcatttggtgatgtgccacactttggcgtgttctgcagcgacttcattgccaaaggagtgagatttggaccctttcgaggtagagtggtcaatgccagcgaagtgaaggcacacagggacaactctcggatgtgggaagtaagtgtgtttctgggggtggggggtgctgaatttggggaggacgacctgaggttgggggaggcggtacccttgaaggcctttattgagaaagacattggtgttcgctccagcaggacctcactctgcatgaaatccacgttgtagtgggtgaagcaactttaatctgtacagatcagacatggaaagtacatttaaagaattaccactgtgtgttttatttacaggcaaaccaagtgttttaaatatgatagagtgttaaaagcatgctacaggaaagaaagacaagttttagactttcatgttactttcttgtaaaattagccaaggattaacaaaacaaataaagcaagttagtgcctgtctaagggaggctgctgagacagcagcttctcgtttacaggacccacttgtcagaataaccaggtaacttaaaatctgaaagccctgaccctggacttctagcaatatactttaggatgataacctgtgattttggcaatgtggaagagctgaattaaacag

SEQ ID NO: 17457 - DNA, 1099 bp, Mus musculus
tgtggcgggaaggggcgctgggcgtgggtctctagagggaggacgaataccgctccgctcccctcggtgctgttgggaccgccggggtcgctgacgtttcgctaaactccttggggtgccgagtcgactcagaaccccttctgcactgtcccaccgagagcgcacacttctcctatctcggctgcatactcaagagcgcctgaagccactgcctgctccgaaaccggtgcagggtcgtgccctagtagcttggctaaaaaaattatattaaaaaaaaaaaaaaaaagacgctcgtagagacctaggcgggtggttcgttttgttgggctgataattaagagagacggaattgaaacccgttttgtaggagccgggttgagggcttgggagcgggggtcaccggcattccttagtcaaggtggtttagggagcaaaagagaaggcgacctgagccagcacctttcagtcgggtgacaccaaggcagattttcgttagaggtttgagacgtttggctttttagttcggtttggtgtgggagtttgtgccttttgtgttacttttttcgagctaggattggcgggatcgaattgggaactttgttcattgactttgatggggtggagggaagtagttaagatcacctaggacccctcactcagccagctcggtttcccacagatccgcaaaactcagcttgcgatggccttaccgccctctggtgagacccagtcccaggacaaggcgaactacctgccccagagcaaccctcaccacctgactacctactacgcgcatgccccaggctacagtcactttaggaacctcgccaccaccgaggaggagtttcaaccttggaaactggcagctgcagtgcttgagtcccaggcgatggcccctcttgatgcttttcggatgactgctcccttgttgaacccgggtctggctgttcagagcgagccgctctacaatctgccctggtacaaattgtcaccatggaaccgaattcctcaattcactcccgaagtaccacgatttctagacagcactgagcataggagcagcggttccagcaaccaaaatttggtcctcggcggcggc

SEQ ID NO: 17458 - DNA, 1221 bp, Mus musculus
gtgtgtgtgtgtgtgtatctgtgtgtgtctgtgtgtgtgtgtctgtgtgtgtatctgtgtgtgtctgtgtgtctgtgtgtgtgtgtccttgtgtgtgttggagaccttgcttaggcaacaattgttccgtgtgagagtgggggctgtgtgtaggtgtcattattcatcgctctcagcttcctacacccatccttttagggtgtagtgtgtgtgagggcacagaagaatttattgggtccccagggtaacacttgtttagttctcacgccgacacttctgggtttgtgtgcgtgtgtggtgtgtgcatgtgtgcacgtgtgcgtttacacacagaaggtgaacactggttagcatttgctacgctctggccttgggcaacatttgccacactatgatttcctgacgttgctagactgaatcaacaacaacaacaacaacacctgcctgtgcaagatgggcaatcgcacttcacaggattccagggaacggtcaagagaactgttaggttaagtgggtgatctctggggacctggggaggaatccaagcgctcgccaatgagtgtggtgggcggggagaagactatcaggggacctccacaggcctgatctcttctactgcctccctctccaagtaccctgaggccggatctgcaccctccctcttaaagcctgcacagccttcgggggtttcagaagtctagggtcccgagacccagcgggtgccgccctagccttggcctgaggtaggtaggtctttggcccgctggagggacctaccccgaaggctacaggcttccagcacggctgggaacagtgctctgtaatcgctttcaaaattcgttttgcagttgtttggttgtttttgttttttctttgttttacttagttagttgtttttggctttgtttttgttttaaacttcgtaattggattttggctttccacctccggagtcgcttgtcttgggagttagagcctgcgctgttcggggctcagggggagatagacggagaggcctgtgtggtggctgacctcgccccctgaccctatgttctttaacatctgagtcacgacccgggttgttttccttattggacacattgatccctgatcttaaaatcctcggaccctacgggtcttcactccttagccctgctgtgtggctactgagaaagaagcatttcgggggccagggccgccgcggccaggtcggcgacaacc

SEQ ID NO: 17459 - DNA, 2644 bp, Mus musculus
ttgttttcatttcaaacaaaaacaaacaaacaaaaaaactcttgatattgccagtgtggtggcgcacgcatttgaaagactagtgtatgggggcacagaatctgccaataggccagggtggcagcagaaaaaactatgcaaacataaagagccccttgtcttcacacaacctttctgtctgtttcccctcagaaatactgctgaccctggagaaactgtctgcatctttcttcaacccactgggcttacaaacatttaccagtctggagagctgcgtctctttgtgttgccacctgacatgccgccagttctcccaggacatagcagcagacagtcgggccctgggcccgcagcatagagcgtgctggcttggctgccaccggaagagttgcctctcccgacagcctgcagctcgcctccagaccaacccgcagtctgttcactgcattcaccgtagtgcaacttagatctcctgcagagtaactgtccccaggccgacttcatccccatcagattgaatgtatttaaatgtgtgtgtttgaggagagccatgcccttggcctgttcctgctcggctccagacactggtttcttgctttgttctctgtggctcttctgtgtaaaagatgagaatcttatctacaggaaagaaaggaacttttaacacagtacaacccaaggtgttctaagcttaaagcctgcatttgactgggatggagacagggcagacactgtgcacagcgctgtgtatgccggcacacctagtcagcaacacgtaaccgaggcagagttctgtctccaggaaggagtgtcccgtcactgaacagatggaaggctcttgagagaggctgttagcattaacaagtatctgttcccacttctctctgttaaaaccaaactagtttcccctaaatcatgaatcaaaaagaaatacttgtttctaaattgtttttagatcagatagtttgattggcatctcttcccttcctctccccaccttctctcgtccctccctctttcattcctttaaagtaaaaacatcaacagcagcatacaccatagagaccagggaagcccttaggatctctcagtgctgtgccagccacttacagcagcttcccagtgaccatgcatttcctatcagagaggaacaaagtcaggctgtgacatctgcttaggtagcctgggctgccccatcagctcaggcctccaaaatgagagaacttactaatgaaatcaacagcagacgtcacgacagatctaacctctgccatatggggttgttttttatttttggtttttagcagtgctgacgaagccgaagttttgtaaggtacataaagatccaatttatatgtaaacaagcaataatttaagttctgaacttaagtgttttaactgtataattttgtgaggtatacatattgtgggattgactcaaaatgaggtacttcagtattaaattagatatcttcatagcaatgtctcctaaaggtgttttgtaacggctgccaatgccttggttagacctgacttgtagacgtaagaccttttgttttctaacccttgagactctcctcatgaatcctgtatctaatctatatgatatgcagccgctgtcagaaccaagtcttgattttatatgtttatattctttcttaataaaccttagaaagacaacattactaagcagcccactttgatggttgttttcttgcccactgtcggggataacctctattaactggtgtcagtttcagacagctgcagtacccagaaccgagaccttttcaattctccccaaccttgatacacacactttcgtacctaaatttcagaatgatgtctttttgatgtctaaaaacaaagcattttataatatctcattatccaagctttctaggaacagagaagattttccttgaagtttgtttattcctggcagggttaaaaacatataaactaccctatttatatttatgtctccctatatatctacagattgtagaaatatagaaagagatgtgacccaaagacaaatggtcagtcatctgaaagtgttgctgcgtgctaaggaactctggaaatttgcatttccatacctttttccacttagagaagaatctcagtgagggaggtggcccaggaacagcgcttccccgttggccaccagttcctgtgtctgctcgagactccaccaaaccattggcttgcacatctgtcctgcaaagggagcagatagaacccagaactccaggccctgccccaggagtgaggctcaggtgcactactgagctcgacctgttctcagataagtcagaaatgtgaggtaggtaaaaatgacttcacacagcacaagagaaaaaggaatttaaaacatacttgttttgtattaaatcccatctcactgtaacatcaagccacaatatcttacctttcagccttcatccaatctcccactgctttctaatgttgacccggctgttagcgtagcccatggtcatggcaaatcctctcacaggtcagagcagccatgaactgtgtgccatctcatcaggaggatcaatcgcatcagcaaaggcatcctgatcatgttctcagagccagggccagcccagcctcccctgccatcagtattgctcac

SEQ ID NO: 17460 - DNA, 2479 bp, Mus musculus
actgttgcatgttttaaagaaataacttatagggctttgccatgcagtggaggacagctccatgtctgtcgtgtgagggctgcggtgcagtctgtatggtctgtaagccctgtaagttggccacagttcctgccctgccccgtgctctctttttaatagtacttacttccctgtaatttgctgcttaagtcctcgttcacattacagatcacaaattttgcctgagaatttggggcttggttcgtacctgcagatatgttgtacgtaacagttagtactcccatttgcttatgccacggacaacaggacaacacctgccttatcttctcattgcagagaacggtgtgaacggcacagtcacatcaaacggagcagactcccctcggaacaggaaagagaagtcttcgtaatggatcggaagctgactgattattgtccccaaagaatctgctttctgctctatctttcagcactagcaatttttcttttctaaaaatacagtttatgctctttgatttctgctgttgtcctgttcctgcatcgtaaagggcattgaggggaggataatcactctgagtgagaacattgtagcttagactcagctacctgccttcagaatagtttagggaccacctttcttttctcttcttttctcctcttttctacccttttctttttttttttctttttctttttgggttgggtttggtttggttggttttgttttgttttgttttgctttgctttttgtccttaatggtttttttttttttttcctaatggtttggggagaaaccatttacaaacccctgcataaccagtgaacatttttcttgctctcaccaatttttttataatattatagcaaggtgacctgttctaagaaggtcatattttttaagttgtcttcagggtaaaatggaaatactataaagtcagatgtcaaacttttaatgttttcagtgttctctaatttttaggaattttttgtagcctttacacctgaaaaaaaaatttgtaaaaatcaccaaaatacttgtgtgctttattttctaagttgtggctgtacatgttacatcccattcaaaagtactgatggctactgcaagatttattgccatccattggagtaggtgtcttattaacataaggaagtgaagtacttaggaagtgaagtgaactttttgtgcattttcaacatttatcaactggcaatcagaaaatgtttattgtgaagaggaatattcaacttacatagccctttttgatatgttaagtaatgattcttaatgggcttgttgtaagtttgatatgcatagcatcttaatgagattctatttaacctgcaagcccttttgaaaagtaatgcctacttgatttctattaaaaagaaaaaggtaccaggtaattctatttgggaaacgaatgcactaactttaaagaaattgaaaatccaggtggatagtcttaacagaggcatgctttatgttatgttagagctttggacccatctttaattgagaaacgtttatctgtataaaacatatttttggataaatatatatatatatatttgtatctacagaaaggctctgaaaagcatttgagtaaaatcttggtccccttttctatgcttgtcctcgcaccctgcgcttggtctgtccactgttgttcagcacatacatgctccatcgtttctcactctgtcaccagctaaaaaatgtccgtgccatgttgactatagaagccacaagcctcaggcctgtggttaagttgccatgctgctagaaagtcatgctttctcttctccagccgcttacctgcttcctgggaaagtagtcgctccctggagcagtaccgactttcagtggaaccaaatttccgcccttaagactggcattatattgaacgatacattgagaaatcaatcgaaataaaaaatttttactttcacaagctgtttcctgaacaattccttcactgtaatgtttaagctattttgaacgtatattctcattaaagtgtactattaaaagatgagtctattttttgtaagcaaatatacttcctggtacccaagcagtgggagcagtcagggtttagtaagcgttggtccctcctttgactggaacctttgagttatttccagcacttgtgttttgtactttagactgtatttcagggtgaggggaaagaaatcacaaagatgacacaggctagttgcttcccaggaccctgtagaaagtgccccttactgccttccagtcctgctgagactggccctataaactggacagagaaaactgtaaagcctcatgggaaacagcctgtgaactaggggtgccactgttagctctactctcaaatggccttgaactacccgctctgggatttgctctttctccctaagataggttcttgcctgaaattggaagagagttggaaagaacctggctggaatattcaagaatgaagattt

SEQ ID NO: 17461 - DNA, 1236 bp, Mus musculus
tcaaatcaggcattgttataaaagtctagtccttaaaatcaagaagtgagcccaaggttgaattttgtgtagaagcctcagccatattgcttacctagtcatcaacaagattcgcctaaggaaggtgcacttttccttactataaaaaaatgtggaatccagtgatgtacttatctcttgtttttactttctgttttttttttctagtctacacaacaactcctgtcaagaaatggaaagccgtcctttagttacagatcagtgaagttctgtcttgttttgcttttagaagatggtattttcttttagctatagattatatatttatagaaaatattaaatgcacaactttgaaaataacccttgatacttgtaatccgtgataattgtaaaatatgtaaattacattttatatctggaggacaggttactgatctaaccttggtcttggaaggttttaccagaaattcagaatctagcactttttcaattttctatggattaagtaaagtggttattaagaataatagattttgaacaattcaaaccagttaatactttagagtttgattgttagggtttctattgctgtaaaaaacaaaaatgactaaggcagctcttataaaggaagacatttaattagggctggcttacagttcagagattcagtccagtatcatcatggtgggaagtatggcagcctgcagacagacatggtgctggaaaaggagctgagagttctacatcttgatctgaaggcagccagaacaagactgtcttctgcaggcagcctggaggaggctctcccaagcccacagcgacacacttcctccaacaaggccatacctcctaatagtgccactccctatgggccaagcattcaaacacatgagtctatgggggccgtttctattcaaaccaccacagttatttgttagcatttgccagtaatactgctttctttagctacttcaatcaacagcacacatatctgcatacgcattccttttcttcagccctgtcaatgccttttacataccaagtttatttcacttttctatcaattatatcatttaagtattgtttctacagttctatgctatgtttattttcttgtaacggtatcccataagcaattcataagttgatcattaacaaatactaaatatactaatttaaaatattatgtgattaataataagtaattcttaaaattttattttatgtgtatgaata

SEQ ID NO: 17462 - DNA, 1350 bp, Mus musculus
tgctttttcagagaacccagattcaattcccagcaaccacatggcagctcacacctgtctaacttcagttccagggcatctgacatcctcatacatcattctgacaaaacacaaatgaacacaaaataaaaataaattataaaagaaaattagaataatgttagctttgcaggactgttaaaaaacatgccacattcattatttccagcatataaccttaacttcaaaaaaaagaaaaaatgtcttcaaatctataaagtaagggcgctaacattagataaagaaattttgaaaatttttctgtagaaaatgatttagaagccacagaaaaaaagaaaaataaatgtatgtggtttggaaaactgatacaatcttcatctctaagtagataagctgtagaaagataaaacaaatggaaatttcacaatagaattattaaacattaacatgggtcactaaggagagcaataagagagacgggccagtgtagcagattctgtagcaaagatgaagacagttcccactgtcccttcactagtctccagagtcagtcacaagctctcgtgtttcatctaggtctcacaagaacgccttatcgcagttaaaacacagacgtgctccatcagatttcagtaggaacgaagcaagaacaggaactcttcagtgtgagtactgttactggagctgtccgcccttccactgcagcacaaaaggctgccttagaaagctagctggtttccatagtccactctaatttgttgtcatgtctttggcactgtttttctgctcagctgtattcagcaactttagactttggagtgataagtgtaatcaaagctcattattcacattgactaagtgaattctgagttagtacttgaagggaaaatacaaaaggttaggtttttatcaactaatcaatacagagtctgattttatgtttgtttctgtttaaagatactgtggtgttggctcattaatattgtcttgttgccagcaccagtataatatgtgtctgaataaaataatatgtaactctttaatattgccctctgatctccacaggtacacatgcatatgcccacacataaataaatgaatataatttttaaaatttgaataaagaatatgaagtgctttgaaaattggctatacttgtgtctgcaaatatacatttaaactttagagatgacttaggcaaaaaaatctgtcctcaaaagccagtcttctgtttctcctagttacctgttaatggcttaccaacataaattagaataattttgttcagtttgaaatctagcagtgtagtctagtcttttatcattattattatttatttttgtttttttg

SEQ ID NO: 17463 - DNA, 1133 bp, Mus musculus
ccatataatctataggatatgtgggtatgatgatgccattgtttccttaccaaaaaaagttaatatggacactttcaacatttggttttatgttttcaactgtccactattgactctgagaagaaaatttgtctcagaaggtggctgacacatttaattttatgttgtattggaactttcagtttaatttttttttttaattactcagtgcctacttggatagctttcttttctttttttctttttttttttctttttttatatatcttaaacaaaagtatttgagcctgtctcattcaaatttgtagagccttttataaacttactccattgagggaaaaagtaaatgcctttcagaagtaaacccttcacatacacaaagattacaaatgtgaacaagcttttctccttcacacacacaaagattacaaatgtgaacaagcttttctcttactataaattaggtcattttgaaggtataaagcagaagaaacaggctaatgatagctcatacaaacctccaaagattgcagctatggtcaatgctggtttctctggcatttagtcatctgtaaaacaatatcctatttatcttcatgctgctctgagttcttttttaacactaggattttctaacatgagtcttactttttttttcaattgtattaaaatatacataatgtgaactgtgggaactaaaaggggtggggaagggaggatagcccacatccagccagagttcctcctatgctctgggcaggcagatatgggagggctgccagacgctttccacttggcctctgggtgggcatctaagccactgaccccatgtccacttgatgggggggggggtggacaacgggcagcccttgcccaggacccctgaggcgacaccctatagccccagggttatgggagagaggttcccatgcaggtgagagtaagcccagtgggccttgatgacagtctatggttttagagctttattatagaaaggcagggggaaagagaaaaggtagaaagagaaagagaggccagccatggccaagaggagagaaggaggaaaggagagagagaagaaaggttgaagagagagagagagaggagaaaggctagagagtaagagggagaga

SEQ ID NO: 17464 - DNA, 1671 bp, Mus musculus
acagttttaacgtagttctgagcacctagtgtgtgtgatacatcaccaggaagttttttgacctactagtaattctctacaaacaacagagagaagaaaaagaaggttgccactgtgccaggaacccttaagaaaaaggttcctgctgggccaaaaactctcaagaaaaaggttcccgctgtgccagaaaccctcaagaaaaagcgaaggaatttcgcagagttgaaggtgaagcgcctgaggaagaagtttgccctgaagacagtaagtaaactttggaggtctttagtgggccagggagcttattgggactgagcgtggggtgagattgaagagagatcttcctggtttgatattctcaagtcatccttgtataaaactgatgctgtgctctgtttcagagccaagaattatgactgactggccattggtttttcagcttcgaaaggcaaggaggaagctcatctatgagaaggcaaagcactatcacaaggagtacaggcagatgtaccgcactgagattcggatggccaggatggcaaggaaagctggcaacttctatgtgcccgcagaaccaaagctggcctttgtcatcagaattcgagggtgagttcactttgcatcgtgttctggcagcaatggctgtattgtgcctgcccttaggaagggggccgagaattacggggggcgggaagttgtttgtgaaacctgtgcctaagctgcttgctctgactgcatttcagtgtcctgtagttgtctaagagcttaaaaacagtttacttagtatcattcagtcatcttttatgataaaacaggaatcaagagaaggcaagctagtagtgatagcgtgttgagattacacacacatactatgtggtgactaagttttgtattacttaaaattacaataaaagctgtatggatctattttttttctctggcagtatcaatggagtaagcccaaaggttcgtaaggttctgcagctccttcgtcttcgacagatcttcaatggcacctttgttaagctcaacaaggcttcaattaacatgctgcggattgtggagccatacattgcatgggggtgagttttctgtctagtcggttggcttttatgatgagatgaatgttagacacttgggctgtattctaacttacctggttttcctggtgcaggtaccccaacctgaagtcagtaaacgagctcatctacaagcgaggctacggcaaaatcaacaagaagcggattgccttgacagataattccttgattgctcggtctcttggtaggtaatgatttttcagggagggattgatactagtccaaggtcatgttttctggccagactttaaatttatttttttacttttattttgtatacgtgtgggtggtggcccaaatgtcatgtgtcttccttaatgaccccaccacacggtggctaggttctccccagaacccagagttgcattccagcctagctgactgtcccttctgtttatatgctgggattacaaacaagcctttaggttggagcttgggtcattggatctgaactcctgtcattcttaagcagcaagcacttccctctcctgagccatttctcccagcctggcttcacttcggacaaatcttgacatacatccttaaaggctctgcatccttaattttgaga

SEQ ID NO: 17465 - DNA, 1103 bp, Mus musculus
acaaaactaagctgtgagcactgtcgttgaatttctttggtagtgacatggggggatttgtacttgttttccattagatagggcctcctccagaatctgttacttctcaagtgaattaacttgtctttacatttaaatgtggtaaaatcatttgtgaatgacttttcctcaacataaattgttcattaactcagacaggatttcaggcatcattatctttagaggcacatagactctgaacatttcaggcttagctcgctgtatagttctgtgatctgctaagtaaggtattagttgacatcttggttctcagatttattatttggtgatgagtctgattacatgatgaggttgtgctgggcttttctgctgtgagcaggcgtccctcgctcgggtgtgcctcgggaaggagaagcagattttcagcaccagttcatgcagcctgtcatttttttttttcttatcctcaaagacaaaacgtactgaaaacattttctgaactctctgtgagacataacttgtcatagtctctggtctatagaaagactgaaaaaattctactgtctgaaagcctgaagcagaactgtgaaggcattctgagattatcagataccacaaaggtgcacgtctcttcataataacaaaacactcagaggccgattgtcagcatacagaacgatttgggtagattattgaattatctagtacatgttccggtcagagtaaatgtgttcctattgctgccaccattcttttggtgatctcagtagagtgtgctcgggatggcaagctcaggcctgagggtttgaacagggggtatatatattttctaactacaaattacaaaaatatgtaaagtaactactatttaactagaatgtataagacagacaaatctgtgttatatatttttcaatacatgtaccaacctttcttagttgaacacaggttactttgtgcgctttatggatcttgagtaacttttaataataaagcagttgtcatttgctctcccataccatatacttgaatactaactggataagtatgagagttctttgcagtttatagtactgtaagctttaatttgtatagtgcgtctt

SEQ ID NO: 17466 - DNA, 1186 bp, Mus musculus
tttactgcatttttactcgtgtgcattctgggcgcatgttgatcgctggttcagtccagtcaaccgacatgcttttattagtcatacagtattaatgcaggtgtcaggaaatgtcaactataattccattttttatttttatttttttaagcttttggaaaagttccaggtcctcgtgtattgtgcaataacagtgacttcctcagtggtttggggacgttcattgccggcaatggacgttgtaaaaggaagagttttcttaactcctgccacttggtgattaatgcatgatagggcctatgaaatgaatttatcagttgttgtgggattataaggaaagtgagggatccaacattacattgaaagccaccccaattgtttatatttggattctatgcactgtgatcctaaggccaacagcatgaaattacatgcatctttaaaggaccgaaagaaagatcattgcatatttatttaattgtttatatctgctgtcaaattgttttgacatggaaagttttcgaggaacattggcagagaggtacaatatgttatccctatggtgaaaataaattcatttgttgtatatactcctcagtctctgaagtgaaggtgtgaataatagagtgtggatggttaaccaaggtgttgtttggaagtaaaagaaaaaatggcagtgatgattaaattactgccatccatcatttgggcctgttattatttttccaagtatattatactctgttacttcctgctagccatcagcatgagccctattgcctaaacactatttcatttatttatgtttggaaaaaatccataaacatttttgtttgtaatcttgtttcttttgttatgttttcagttgtttaaatgttataatactttaattgaaagaattttgtcaagtttttttttcttgtaaattttctttacttgtatcatcttgtccttcaatactgtaccctaaaataagaaatacatttttgacagaggcttaatgttttaacaaaagagtgtggacatttttattttaagattttggtaaaaggatactataaaaacaatgtttgcttatttgtctcacttacccattgtgtagggtttcttggaagaacttgttttgtttgttgagaagattttgcctacagttagatgaagtttttctgtctgcctgtctgtctgt

SEQ ID NO: 17467 - DNA, 1195 bp, Mus musculus
ctgggtaacctcagtatttgttcatgctaagttacttgtaaatggctgcttaattcagtgtgtctagagcatttatgttatgccaaacacttgtctttatatgaagaagtagaagagtacggagagactaaaaaggcagtgggttgcctttaaaggacgttatctgctacagcttgagtatataacgtggaatcagatctgtttcgctcagactgtagagtttcaatggggcgctgtttaccttagcaccagcactcagaacgttgaatattacttgagcagagagttctagactaatctggacaacaaaacaagatcatgtctcaaaaaggcaaaacaaaaggctgggagaatggtttctgaagtagagttttgctctacagttaggaagaattgattttaaccccaagcaacagctcaaagccaggtttgcagtgcccctgttattctagaactggggaggcagaggcagggtgctctctgggattgctgaccacacagtttatttgaatcatggaatactagatcccctcctcctcatatctacacagactgatcctctcctgcccatgtctgcacacactgatcccctccacatgtctgcacacactgatcccctcctcctcatatctgcacacactgatcccctcctcatgtctgcacacactgatcccctcctcatgtctgcacacactgatcccctcctcatgtctgcacacactgacccccttctcctcatgtctgcacacactgatcccctcctcctcatgtctgcacacactgatccccttctcatgtctgcacacactgatcccctcctcatgtctgcacacactgatcccctcctcatgtctgcacacactgatcccctcctcctcatgtctacacacagtgatcccctcctcatgtctgcacacactgatcccctcctcatgtctgcacacactgatcccctcctcctcatgtctgcacacactgatcccctcctcctcatgtccacacacactgatcccctcctcctcatgtctacacacagtgatcccctcctcatgtctgtacacactgatcccctcctcctcatgtctgcacacactgatcccctcctcctcatgtccacacacactgatcccctcctcatgtctacacacactgatcccctcctcctcatgtctacacacagtgatcccctcctcat

SEQ ID NO: 17468 - DNA, 1194 bp, Mus musculus
gttgaggttacaggcgtgtgccactatacctagctgctgttttagttttaaagatttgggtagataatcaattgtccttttaacattagctttctgcctcacaaagtgccatcctgtatgtactgcatagcttaagagtggagaacttttcctacatctaaagtgtcaaactttagatatttggcagtgttggtttgtctcctttgaataatggtctctttctttgtcttttcacatcctcttctctccgctctgtctagtcttctgatgaggatgccagttgtattgtactactgtcctagatagagactttgttttaacataatttaaatgaaatatcccaccttcaagtacaatcacattctgagggagttggacttatgttgaccttgaataataaaaggcactgtgcagccctaacatatataaaactcttctgttttgcaggtcagtttgctgagaatgaaaccaacgaggtcaattttagagagatcccctcacatgtgctatcaaaagtgtgcatgtattttacctacaaggtccgctatactaacagctccactgaaattcctgaattcccaattgcacctgaaattgcactggaactgctgatggctgcaaacttcctagattgttaaataaaataaattataataaactgttaatttttttcagtatttaatacctgtagttcagttagtaattttttcacatatagcatgttgcctgtatgaaattgagctgtaaagctaattgccgagcagattccttctgtcatttgcatagcagagttgaaatttgtttgctacatcaacaaattaaggacatttcacaagtcaaaaaataaataaataatgccagtttatagatggtttgctttctcctggatatgacctttaaaattataactgatagagcaaatcctggaatataaacgtaaatgaatatattctacaggtaaatacaggggctttttatgtttctagtgtttttttaagaaccagttctgatcttatgccactgagcattactagagttatgcaaataattacatggaaaacatgtttataacttagccaaaccttgatttttgtaactcaaagaataagagttgaaatttcttatgtgtttttttataaactgcagtattgtttaagtgcatcttgtgttttgtttattgccacaactcaagtt

SEQ ID NO: 17469 - DNA, 1173 bp, Mus musculus
aagtcttattttacggagtcatgggaagcttcacagtgatcactcccacgctgcttcaccttcttacaaaaggctatgtcattcggttgtatcatgaagccacaagtgacacttacagagctgtcacttacaatgttatgctttcggaaaccagcacagtgtttcaccaagacgacgtgacaattccagagagcgcacatatattcaccagcttttatgctaaaacaaaatcgctattagttaatccagcactctttttaaaccctgaagactataaccatctaatgggttatgacaaaccgttcacttttgatatggaagaagtcgatgaaaagaaactgcatgagggtgaaaaatgaacctgttcttcatttgtgcttaaatgtcatgtattttcagggtataataagattgcctttattttgttattgttagttaatgattgtagaaacaaaacaaaacaaacaaaaaagtgtaagggctgaggacacagcaattggcactgtgtttgctgatgtgaggccctagaattggccttcatagaagcaggatgcttttgtacacttagaatcccagcacatgggacagcgaggtaggaagattagaaatctgaggtcatccttggtaatgtagtaggtttgaggttagcctggaccttgtcttaaaaacagaagttgaaactatcaagcagaatttctgaaaaatttttacatgacaatgttcctatgtaataaaatatgtttaaattaaatatgtaaaatgtggatggtcatgaatattctggtatatgtatggctacatttatttacttatattttgtttttagacagaatcttactatgtagaccagtctgaccttgaattcatagaaatctatctgcttctgtgtgtgccaccacatctgagccatgtatggcggtacatcagaaccggagcggtggctcagtggttaagagcactggctgttcttccagaggtcctgagttcagttcccagcaaccacatggtggctcacaaccatgaggggatctgatgccctcttctcgtgtgtggatgtatatgcaggagagcactcatacattaaataaataaaggattaaggccttaaataaattaaggcatgccaccattacccagtatgtgtttgtttggttttgggtttttgtttgtttt

SEQ ID NO: 17470 - DNA, 2270 bp, Mus musculus
aggagggctggtgtgatggctcagtgtttgagatcacagactgttcttccagaggttctgagtacaattcccagcaacaaaatggtggctcacaaccatctgtaatgggatctgatgccctcttctggtgtgtctggagacagctacagtgtatttcaaggaaaggcatatgaaaggtttggagagatggaaggtaacaaggaaataatgtgacttaattagaatctcgagtataaagtagatatttttaaatgtttgtttcattttcatgaagatgtagtaagaaattttagtcctaataagcctgtataaaagacacgcaatcagcgtgtctctgaggtatttgctggttcgagagtggaactatgctctatgcccaggtccattatccgttcgagagcaagcgcgagtttgaggatgcctttcccgcagacttcattgctgaaggcatcgatcaaaccagaggatggttttacaccctgctggtactagcaacagtgctctttggacagccacctttcaagaatgtgattgtgaatggcctcatcttggcgagtgatggccaaaaaatgagcaagtggaaaaagaactacccagatccagtttccattatcggtaagtatggtgcggatgccctcaggttatatctgatcaattcccctgtggtaagagcagaaaacctgcgcttcaaggaggaaggtgtgtgggatgtcctcaaagatgtgctgctcccgtggttcaacgcttaccgtttcttcatccagaacgtctttaggatccacaaggaagaagtgaagttcctatacaacgagcatacagtcaaagaaagccctaacatcaccgaccggtgggtgggttctgtccttcatgcagtcgctccttggcttctttgaggccgaaatggcagcttacaggctgtacactgtggtacctcgcctggtcaagtttgtagatattctaaccaactggtatgtccgaatgaacaggagaaggttaaagggtgagagtggggtggaagactgtgtcatggctctggagacagtgttcagtgtcctgctttctctgtgcagactgatggccctttacacaccctttcttactgaactgatgtatcagaatctaaagctgccgattgaccctgcttctatccgggacaaggacacactcagcatccactacctcatgctgcctcgagttcgagaggagctgattgacaagaaaactgagaacgccgtgtctaggatgcagtctgtaatcgagcttggaagagcgatatgagaccgcaaaactattccaataaagtatcttttgaaggaaattgtggtcatccaccaagacccagaagctctaaaggatatcaggtccttggagaagtatatcattgaggaattaaatgtttgaaaagtcacgctgtatactgataaaaacaagtacggtatccgactaagggctgaaccagatcacatggtccttgggacgcgtctgaaggaggccttcaaagcagtgatgatggccataaagtggctgagcaatgaggagccaagagtggtttcagacgagcgggagcattgctgtggaaggccacgaactgcatgaggaagacattcgcctcatatacacctttgaccaggccacgggagggaccgcgcagtttgaagcacactctgatgctcaggctctagttctcttagatgtcacacctgaccagtcaatggtggataagggcatggctcgggaagtcatcaatcgcatccagaagcttcgcaagaagtgcaatctggttccaacggatgaaataacagtttactataatgcaaaatctgaaggaagatacctgaattaatatcattgaaagccacactgatttcatatttgccactatcaaagctcccttgaagccatatcaagttccaacatcagataatatccttattcaagagcaaacacagttaaaggggtcccagctggaaatcacgctcaccaaaggatcatgtgtgtgtgtgtgtgtgtgtgtgtgtgtgtgtgtgtgtgtgcctggccctgcttgtgcttatgtgaaccttaacatttgtgcaaatggcacggagcaaggtggagtgttgctcctggagaatacgaaaggtgataatcagctgaacctggtgaagctgaagactgttgttaccagcgtatttggtgttaaaaatgcaaagctgtcagtcttccatggtgaaacagaaatacagaaccaaactgacttgctgagcctcagtgggaggatgctgtgtgtg

SEQ ID NO: 17471 - DNA, 1187 bp, Mus musculus
cactttttatatcagatatatcagagcccagatagcacattagtgtttgtagataagagtgtcatatttcattttttgttagtgaaattttacggtgtaaagtacagatctggtgtgtgggctaatgattacattccattcaaatatctacttattccgataccccaaagcagaggcctttggtattttgtgggaaatatgaaagaacctgacctgaatatatctgttttcctttgcaggtgttcttcaacttctcaatgtagaaattcagaacatggggttgccattgtattcatctattgaattcactggtgtatcagctggatcctgggtaatatcttctactgtgcatcaaagttgcagtgtgggcatccatgcatcttccagccatggcgtgattttaactgataatgtagtgtttggcacaaatggccatggcatcgatgtggagggtcagaactattctctcaccaataaccttgtcattctgacaatgcagtcagcaaactcatctccttgggtggcaggaatcaaagtgaactatgcagaggacatcattctccatggcaatgtggtggcaggatctgagagacttggctttcatgtcggtggtcatgggtgctcctctgaagtgctttggtctgataatgtggtccactcaagcctccatggccttcacctctacaagaaacatgaatccaataactgtactggtgtctctggatttatggcttttaagaactttgactatggtgccatggttcagacagagaatagtgtggacatacagaatatcactctggtagacaatactgttggtcttttggctatcacatatgtatcttctgctctcctgagctctgtcagtactgtacagattacacttaggaattcagtcattgtggccactagctcctcttttgactgcatccacgacagaaaggctcctcagtcagccaactggacatcaacagatagagcaccttccaatcccagaggaggccgaatcggtattctgtggcctgtttctgcctcagaaccaaatgcatggccccaggagccatggcacaaagtaaggagccgtcattcagtcccaggaattatgaagcttcaaggtaggattcttgactttgccctaaatatatggatccatccacccaaacacacaatgttcagtagtattctga

SEQ ID NO: 17472 - DNA, 1115 bp, Mus musculus
ataacactaagatattatgggaggaaatacaaataaaaggttgattgttgtaatcattatgtggtgaggttctgggcaattattgtcttttctttattaaaatattcaaaataatacataataagcatatataatattataatgaagcagaatgcaaatgtttaataagcttggaatatattttctcaaaagtgtaagggcttggaagtaactttcttgcttgccataaatattttctagatttctaatattcaagccagctaatttgagaggtgaagataccagtcttaaaataaaaagagaatcttgaacttgtcacaatgtctttggttttcatagttttaactctatatatttcctgtgtattccagcttctacatcagtacctgaatcagcttcaagatggtctcttcctgaaacatggcaagatgttgaaaaaggctggggaggatacaaccacaccatcccaggacccggtgatgatgtcttgattttacccagtgagtgaaaccagccaggaaaagaaatggatggatcgaactgaaccaagtctgatgggggataagattgaatgatgtaatgcaagataggaaagcagatagaaataagtagctacttacttttatgacccattgggggagggtagcctgggagaggaatcattgtgagttttttgaggaacctctatatcatatatatcgtggctggatcagtttttgttcctactaatagtaagtgagctttctctccctctaatatccttgccagcatttactgtcatttgttttcatactagtagccattctgcttagctgtgatggaatcttcagtgtagttttgatttttatttcctttatagctgaggatattgagtcctttttgtgtatgcattggagttataatttcttctttgagaactttcaatcaaatttatttatttgttgattagattatttgttcttctggtgttgaattaaattattaatttttgttctagggattggattaaggactttttatatactagccaagccctcaaccatgaagctacatctccaactcttgaactccctgtatattctacatattaatccctagtcatgtgaatgcttggc

SEQ ID NO: 17473 - DNA, 2337 bp, Mus musculus
caggactcccagaaagtggaactcagtgagcccaggtgagttcttccggggatgccaccagccgccgccgatgaccttagagctagagctccaccgtgattaccccaggctcgcccagggtgttgcaaaccagtgtctaaaggctgtggcgatttggcagaactgcttgcttctatctttgtgcaaatttaaattgttacttttaagtcaggaggaactggcttgacttaccaaggtcaaattttgatttgtagcttactgtagccttggattcttctcattggaatatttctttttttttcccccctcataaattgtggccactttttttgaaaaccatattttcagtagagtttcagaaaatactctttttcctgaaatttatgtttaccagacaccaaagaaataacatggctaaggttaatttttaaagatagaaagtacagcccagccaaatgtagaaaaatacttaaagaaaaaaacactaaaattggctgtaattgtactccagaaacagccattgaggtttgctttctgaaccaactcagaattcactgtcaatagctgctgtctttctaggggccgcagtgtgtagaatctttggtctcgatgtgtaaacagaatggtctcacacgctgagattgccccttccctcgcatccatctcgagtgctccgattaaaggcatgtgtccccgtcccccagattgagatgtaaattcctaatcaagtccttgagtggcactgaggtggctccatgtcactgccgtccattcacaatgagacattcttaggtttgccgcctggcacagtcataaggcgcagtaaggtctctagactggagaagagtcatgggcttccattaaatcctgtgtgtaaactgtctcctagctgtcgtgctggccagtttgctgtgccgtgtgtaggattaccagtctcttgacagcctccaggtttcagaggctcctcgtgcctgaactacaggaagctctgcttgcagtgtaggttggtttagaaggatgctcagaatattggaaagacactttcccgtgtcaggcttgtcttagctgcaggtgggtttgctgccattttgttggtttaagacaaggtgatgttgggggcttcctcagtgctggtatcagacgtgtgctccaccagactggcctcctacttcctcacgcttttcctgtcttgtgcaggctgaaggcttttaaggcggccctcttagaagtgttccaggaagctcatgagcagtctgtgggcatgctccacctcacagaatccatcaaccggaatagagaagagccgttctcctcagaggaaatccaggcttgcctgagccggatgcaggatgataaccaggtcatggtgtctgagggcatcgtcttccttatctgaagttgttgctaccaagtactgccctgtccccagcctttgtctcccatcctccagtaacttttttaagggatggaagctgatggtgagacgatcaggacttggtggaagctttgtgtatgacttctgccttggggcaagagctggagggagggccaggactcaggcagaaggcctgcctcacaagccccagtcctaaacatggggagtcttcatgatttgagctgtgtttctgggcacagctgtgtcctgcgtttgttacttgtgtttttacccccacccccaggcactttagtccaggaagctttgaggtctgttgggccaagagtggctcaggcagatgacaaggttggattggagaaagctttctttgcaattagactagtatgtattgttgacctaaatatccaagacattcatactgagtaaatataactattttgtacatgtggacttcatgctttgtgctttaaaaaaaatacatttatttatttgtctgtgtgtatgtgtgtgagggttggggctgagacctcctgggacacacttttggaggtcagtggacatctcatgggagttgtcccctactaccatgtgggtcctggggatccaactcaaggagtcaggcctggcagagggttcctttaccttctgagctgccgttcaggcccgggcccactcgaagatttcttttactttcattacaaaaacattgtcgttaaaatcacactagagaattcaatgaacttgtcaaattttagagtagccatggtacaagaggctaccatcacacggattttatactttccactcttgtagatacatttatgtacttatctacccaccaccaaaggggacaacttgatgacagagttagaataaaatgaggcttgctatccttcataacccaagtccctttgtccttcctcatgccctagggtttagcc

SEQ ID NO: 17474 - DNA, 1099 bp, Mus musculus
agaacgattgattttctgctgggtgtggtggcggcaagcttttaatcccagcacttgggaggcagaggcagaggcaggcagacttctgagcattcaaggccaccctcctctgtctctagcaagttccaggatggccaggtcagtcagagatcttctctgaagacaggacagacatttacttttacgtgcatgtatgtgtgtagcgtgcatctgagggtaagagacgacttgggagaggtcatatctctcctcctgtattgatacccagtgatgtactagaggagcactcgaccactgagctatatcctggtccaaattgtcggctctcctgctatattttgtgtggtctagccttacagtctcaccccaggattgatttggcttcgatgtttgttcttcttactgatgtcccttctccttggttgtcctcttgttctccagtatgatcagtataagacgcccatggagaacattgggctgcaggactcactgctgtctagatttgacctgctcttcatcatgctggatcagatggatcctgaacaggatcgggagatctcagaccacgtcctgaggatgcaccaatacagggccccgggggagcaggacggtgatggtgagtatagagaatactacgattggctgctggaggggtcctaacggatactgctatcattgacaacatcctgggttaatgtttccagtacccccaccttcttgtccttctccccttacttgactgctcactggaggttgagtgtccattttggggtattgctgtatctcttttgagcagttctaagtttcacatttgtgaggtccatgtgtctcttccttcctcctgggttcctgctttcagctcttggtttcgtctctttccatgctggaaaagaggcagtttttcttggctttaactccttgatgttttttgtctcaacttgtgtttgctagctttgccattgggtagttcagtggatatcctggccacagacgatcctgactttacccaggatgaccagcaagatacccgcatttatgagaagcatgacagccttctacatgggaccaagaagaaaaagtgagcctcttcttgcttctt

SEQ ID NO: 17475 - DNA, 4946 bp, Mus musculus
cctgagccgccagatggcctcacctctgtcctatcttgagttttctcagaggcctgcattctcctgattgtcttcctgctccttccctcctcctcctcctcctcctcctccttctctctctctccctccctccctccatccgtccctccccctgtcctcctcccctctccctctcccccctctcctccctcttcccctctctttctctctcccccttcccccttttctcaccttcctcccctctctctttctctctctctcatggctgcttctcatcctcctttcttcctaactttaatgtgcaatttctctgatttgtacaaccggggggagctaagatggcagccctgcccttgggtctcagggcttgccaatctggaagcctctggccaaggagcctcccctagagctggtggcagatcctcggtggcccttgtggacagattggattacaatattcttggtgctgaccgacagacagtcaagatgtaggattctggttctacgcatccttcgctttggggacatagtgacttaatccagaaagacagtgttaattaactattgagtcccaggactccagagagcttccagtgtgtcatttgaattggaaagcagcctgccttcactctctgaggggacatgctaaggaggatgtgccttcccacttgtcccacaagagcaaagcacatcaaacatctgcctcttctagaaaggtggctcgacaaacagaagagtcgatctggaccattctccacccaccagcatctgaaaccaaaccaaaaggcagttacaaacccgcccaagacacgctgttcccaagtccagagatggcctgccccagccggccaaacttgcaacctcaacttcatctctctgcagaaacaggaagccccaaggactccatcgcccgccatgtgttcctttggccaccttccctctggcctcacctgagtgttcttttaaagttgttaatgttgtttgttgagcacacccagagcctgacaccaggatgcctcagggttactcttctggttgcatgagctgacacagccatgtccacaggagtctgtgacccccttcccttcggtgttctttcctctctcttctacctgaagacggggtcatcaggtccttatggtaccttgtgaggacttttagaatggatttaggctttaaagggtccccaaactctgagctagagtataggggagcagttcttggtaacacaagacattaatgttacctaatattctgcctggccttcctttgacaccatatctgagaccagagcttgagtgtttacccataaagagggagctgggtcttcagcaagagctcccttccaagccactgacgatggatgtaaaatctagtttacccacaactgaggaatttggttccaaacaccaacgtggcattctttttctctgtgtccagcttacacatagacatgctggatgtgttgagcatacagaatagagatgagatccccttggcttcttgtgtgtgagcttaggaaacaagacagaattttgaaaactcattcctctattctctccctcttctttcctggcccttctctgggcatccccaaagaattgatctggcacctttcagccagtgtagcccacctatccgggtagggattttaattgagtttatgctttgaaatgccttctgttgctgtgtggaagctcagccggtggctcccaagctcaccttaccccatcagtctaggtgacctcctggaccatctccaagctaagagcctgcctccctaagttgctggcaggcccttgccagctcactgcaggaacttcgtctctaggctgaactacttagttactccttaagtaaatacttgtgacaagcatgagacatgtgaaggtcttggaggaacaggggtataaagagcagctgtcttggatccaggggtcctgtccctctggaggggtttgttattcccggtacacttagatgcctgagatgatatggattcattccttagaagtcttgcaagcgtcctctgttgctggtttgttgggattgatctaggctcttctagaacataaggtcagtagtaggagtttggggtgttcatttccagaaaagcctgagaccaagggcagcagctcgccagccttgacttctgggctgttagcaggcttgggagaactatggggtgctttctcacccacccagcctctctggcattgatgttataggaaagccaagactttgtgaagttggcacaaaccttgttgccagaattacagaaactaagttccacaccatccttcaaacatgcaggctagcatgtaatctgggtgctctggccccattctttgtttttatgcaggctctcctgtccccaaagtaccacacccttagtgaaggacctgccatactccgccaagtttgagatgttcagtaccatctaccaggaccagaagattctaatcactacctcagcagccactgcctgtctctcaacatccctggaattccagtaggtgccagtggcaggactggtggaccgagaaccccctgttgctagttgccctccccagaggtgtggtgactcaggggacagttacttctacaagctcctcaggcttgggtgcctacactatgaattagctccttgtcttcctcctatggtcagaggtggtcctggggaagaagaagcaggctaaagccagggaaggaggctttctgctattctggtcagtcctagccctgtgtccctaactggttcacagcagcggcagcagcagcagcatgtggctagcctaagggtgaactttagtcacttctatttagatgactatgctctggctactcacacagtacttttgaagagtgcctgggactgtaagagcccctgaaggtttattcccctgtttagtcccctccggcattttttttttaaagtaggaacagaaagagtgcattttccaaaagtctacaaagctcacttagattccacacatcctcaaagaaacttgctgacttcttgcagcgagggaaggccttcatttgcatttgtctttaatggctttcagccttcctggttgggtttgctgaagtctggagtgggaggaggtatagggtccgggcttagggaactttctctgcttgagggcctctgtgtctacagcacattcttctctctggctctgttctggtgcggcatggaccgacaggcagtgagtcagaacagtgagctgctcttccacctccctcggcgtcctgagtgcagcctcttccctcagaacaggatgctagggagaacatcaatgccaggcttttgaaaacatccgtagaacccttctccagcccgtggtgagcgtgaggaggatgctggcaccgacttctcgccctttccctgccttttaatacaagtgttagctccattacatctgctttcaaagctttgcagatgagaagaaaagtcacgccgagtggcctctgtgaaacttttgttcttgtcctaagcaggtccttgtcctgtcactctaaaaagtgccttatattgccttgtggccttcactggtactgtatggcctggccccccaactgccaaggctctagggctgactggcatacaaagccaatgacagcatacctcagtacagctccaggggaaagggacatgggttgacagtatgtgtcatttgttatgaccctcttctccctcacacatagcgtgagaccttgcttgttctcttttttttttttttttttttttctagtctcccattgtctgtaccttctggctgtggaagcttgtgaggtaacccagctgcagacacccatgcctcctgtctaataagggaagcttgggggttgggaaaaaggtcacctctgtgtacctctggccctgtgtggcgagccctgctcttccagtttcctcattcccaccccaggttagaaacagcaccctcttcctatctgttttagttccatgtagcccagagtctgtatgaggaatgtgtttacttgtgctcccttgttccaagtcttagctcattggtaacctgtttggcagtgcctgtgatctggtagctgcaaagctcctggattcctgtcagggttatcttgtgttcctagtaccacaccaatcccctccctgaccctagcctgcttgcctgcctgttcccgcctgccattccgggttgtgcaataaccctcccagccggtggtcttgtcccttactgcatccatcctgcaatatctggagagaggggacccacaggagaggtcgtcatcatcccttacagaagtgtcagtcccttcctattgctgtcattcgcacggccctgcgtgggtttctgtggcaatcttacagaatgtgttgtgacgtcttcgagatctttacgttgttttaaaaaataaaataaatgtgttgaagaaaacaaaaacaaaagcatcctcagaccgggacattgtcagtgtctggggataagatcagtctggagtcgctgacatcactatcatcaccaaaggcattccagggtttcttgttcctgtgcaaacaatgggccatgtttccaagaatcagccacagtggtgagccctgtccgccccgctactgctcgcccacccccatgatggggcctggctgtggtggtgagtgctgcattctttggggtacagattcatgtgtgattaaacctcacttttcagttactctgtttaacacacacttgaaggatgagcggaggagctggtgcccctgcgcaactcacaatgcaaatgtggacactttgactgtttttctacattagcctgttcatgttatggaccaaattcaacaaggaactcaaggaaaatgtgtacctgccatatttatgctttcttattaaagggttgggggaggggcgtcttacttttggtgaagtcttttttttttttttttccagagtcctttttccactgtt

SEQ ID NO: 17476 - DNA, 1195 bp, Mus musculus
ttggggtgagtgggttggtgagtggatgggcacgggtggggggatggctttcctgtagctcagctgtcttcttctcgtgtgcctgtacaagagccgaggatgagcacgggacctaaattgccaggaaggaaggggaaggggatagaaggaggaacctgcctgcctccgcccacacagattgtgacatgtaacttgggcacccttgtcttctcttttgatttcatttgtgatttgagttagaatcggttcagacgtttgggcttagcatctaattatcagtgtagagaactgaagtagggaaggaagaaaagcccatattctgacggaatcagagtcaggtccctggtgtcctctgcagggttgacccgggaagaggacagagcagatcgcataggccctgcctggcctcactgtcctatgtactttgctctgccagatcagattttgtcaccccagctctctgtgggcagtttgggaccttagacttaaaaaaccctatttttcacatttagtcatagatggatgtctctgtgtgtgtgactctgcccctcacccctgttgtgttcttctgcccgacccccaaatcaacctggtgacctatccgaccttacttccccttcttctcttctttcctactctgaccaagaaagcggcttgctttcttcctcacaatgttgggaatggatcccacacggagaggttttctttgttttcagataggctcttactctgtctacactggcctgaaatccacttctgagaactgaattgcaaatggacagcatcagtacttaatgatcttctaatgcctaatttcaagtaagaagagtaagttacagggcaccctaagctacacagagaaaccctatcttgagctccttctcctcaccccccccccaaaaaaaagaatagaattagtcattacagctaacatttgaaacattacaggttggggaccaatgagacagcttgcgggtaaaggacccttggtactatactgagcctgatgacttgagctcagtctctgaaacacatattagtagagagaagtttttctctgactctctctctctctctctctctctctctctcacacacacacacacacacacacacacacacacacacagtaagtaaataaataaatgataaaatgaaataccacttttttttttttttactgactccaaagcag

SEQ ID NO: 17477 - DNA, 1129 bp, Mus musculus
catctgttcagggaatattttcaagttgcatctgggaagttgggacacaggaaaaatgagtcccccttgcttcctctgagaagggcggtgacagagccctcagagcccacagcacagggacatgacagggcagtacacagcaggcctgtccatcagcgtgactgtccctctgtcttcctcttcctgtgactcagcctcatgatgatcctgagacttgtgctgctgctgctgtagcgtctggacaagctgagagccaaatgcccagcatgctaagtgcctggcacggcaggttcctgcattgaagtggtcattttaaatacatgggaaatgtcttatattgaaatgaaaataatgtcactataatatttaaaaatcattggcaatgtttatttacccccaatgcctttttatttaatgcacaaatttatttagatgtttctgtttgctaatcctgctctttaatgcattgttactgctcattccctttgtctctttatatctggaaattggggacttgcaattttctgcttttgacaattccaaacactatgagtgaaataagttaaataagttaactgcatcctgtcagacaatgggattcctgtcgtgggccacagggagtgttaatgaattataagtcactttgtacttaggggttttatttgtattattgggggtggggcaggtttgcatagaaggaattctattctcagcacatcagcatcctgacacaatgcactcagtgttgaaataaaatgcatcttagtctaagccttctcattcatttctatgtcttttctagaaactcaatcactcaatcgtttaggctgtaacatgttctttagtagtgaaaaggatgtcagggagggttgtttacaccagatctccatacttctcaggagcatctctctgtcccccacacgcctgtgagaccacacgccatgtgaagaccagttataacttgtaatgtccaaggcagtttaggaaccagatgaaccatctggagacccctgcctatttccaatgtctgctatggtctctgggaaacctgaccctctctgggcgactcagtttctcatccctatgggggtggatattaatgggtagcttgccctccaaggtagcaggc

SEQ ID NO: 17478 - DNA, 1176 bp, Mus musculus
tgcagttaaccctttgatgcttcagcagtactgaggatcccataacataaatagcccgagccaacgttgcagagatgacagttcaagcttattgtagatgccatagacatgagaacactgggaaacagagaggaagaaggtggtcaacgaaacggtctgtgcgtgtgtgaagggtgcagtgaagccacttcccaaaagagactacagagtatggcgaggggcacccccacatgtcagggcttcatccttttaggatgggtaggaagaaatagtgcagctggagctaggagcttggcagggctctaagatgtagggaaggacagatgacacaatgatggtcagagatctgcttcttgattttatcatgagccagggcctagagacaagcatgggctccatatgcacccgacaaggaagcaaagggacattcaaggggccccactctgatgccagttgtcttcaagctttaactaacaacttgaattcctcaggtgttgaagagccatggacaagattatctcgttggcaacaggctgagcagggctgatattgccctggttgaactcctctaccatgtggaagagctggacccgggcgttgtggacaacttccctctcctgaaagtactctacatatcttacctcatgggaaccaatatgttgaccataagggtgatcctgatgcaacttccagctactgcctgcctccatagctagccctctcatttaacctatgagattcgactttagatgctagttctgagacataaaaagaatcctgttacatgaggaaatctgaggaggatgctatctcaggacatatgactttgtcttgtataatggaaagaacccaggacccccccctctctccccacactctatcctaccttggatttgattctgatttcatgggatcctctctatcaaaggtgcagtcttgtccttccacactgaatgtatctggagaggtctttttcaagcttctatattaatgaacattgtatttctgtagcagtgaatagctaatctgttaactagttaacagttaatctgtcgtggaaatatgtttgtaaaggaggtgtgtagagagaaatatgttgtagtggtgaatagtagtgaagagttaatctccactgagctttcagcggctgattgcacttctagccacctgccagag

SEQ ID NO: 17479 - DNA, 1968 bp, Mus musculus
ttcttgacctcaacactattgacatttggggggtaaatcattcaatgttcattgaaatgtaattttcaattgggaccaaaatggcacttaaaatatactctgttcctaactaaagagatatctcaataggtaaagttgccattcctgacagcctgattgtgattctccagaacctacatagtagtatagaactggctgctacaagttttcctctggcctccacatgtgcagtaggtaacatagtggaagagcctatcacacattgtcctctgacattaacacacatgctgcggtgagtcatcccaataagttataaataaagcaattaaaaaaaaaaaaggtaaccctgtacggcaccgctcccttttccggtcggcgtgtttctgcatcggatcgtcttccgcagcccggccttcaccatgagcgtcccggccttcatcatatcagcgaggaagaccaggccgctgaacttcgagcttatctgaaatcaaaaggagctgagctctcacaagaaaactcggaaggtggacttcatgtagatttagctcagattattgaagcctgtgatgtgtgtctgaaagaagatgataaagatgttgaaagtgtgatgaacagtgtggtgtccctcctgttgattctggaaccagacaagcaagaagcattgattgaaagtctgtgtgaaaagctggtcaagtttcgggaaggcgaacgcccatctctgagactacagttgctcagcatccttttccatgggatggacaagaatactcctgtgaggtacacagtgtactgcagcctcatcaaagtggcggcatcatgtggagccatccagtacatcccaacggagctggatcaagtgagaaagtggatctctgactggaagctcaccactgaaaagaaacacaccctcctaagactgctctacgaggcgtttgtggattgtaagaaaagtgatgctgcatcaaaggtcatggtggaattgctcgggagttacacagaggacaatgcttcccaggctcgagttgatgcccacaggtgtattgtgcgggcactaaaggatccaaatgcctttctttttgaccatcttcttattctaaagccagtcaaatttttggaaggcgagcttatccatgatttattaaccatttttgtgagtgctaaattggcatcgtatgtcaagttctatcagaataacaaagacatcatagattcacttggcttgttacatgagcaaaatatgtcgaaaatgagactcctcacctttatgggaatggcagtggaaaacaaagagatttcttttgacacaatgcagcaagagctacagattggagctgatgatattaaagcatttgttattgatgctgtaagaactaaaatggtctactgcaaaatcgatcagacccaaagaaaagtagttgtcagtcacagcacacatcggacatttggaaaacagcagtggcaacaactgtatgacactcttaatgcctggaaacagaacttgaacaaagtgaaaaatagccttttgagtctttcagatacctgaatttttatgaaaatgattttgttcgttgagaaaaaaaagttctaagtaaaacattatcaactgaaatttgaaaaaaaaaaaaacaagtgaaactttactaattcgtaggcttgtacatgggatatgttcaagctgagctgcttgtctggccacagtaggagaggaagcacctaaactcacagagacttgaagtgccagggtaggaggatacttagggctcccccacctgttcagagaagaagaggagggaagatgagggaagaattgtgggaggagggcagagagctgggtgtaaagtaaataagtaaaaaataagtggtcttttaaaaatactgcttctaaccactagatatcaataacaacttcctcccatctgtgacaatcaaatatttatcttaaaatctacaaatgagcccttgggaaga

SEQ ID NO: 17480 - DNA, 1171 bp, Mus musculus
agtatttacaagggaggcttttggctctttgctcaaaatcacataaagttgattttcaaaaaaaaaaatcaaaaatcacagaaaatgtgtataaacataaaattcatctttatgtttttatacgttttattgcaatttacatttaatacttttaatgtgtatttgtatacaattagttcatatgtgttaatataagtgatatataaattttatattttgtacagtatatgagttttgattacataagtacttactctcatagaatactttaacttttaattatattaaatattaaaatcatccctacaacattacctaagattaaagtagaataactttgaagagtacggtatttttatattagaagaatagtacaaacaagggggatactaaatagtaaatctaggtacccgtcacgcttaatgctttctgctaatcaaatataactcgaaacaaaatttcaaggaattaagaaaagaaatgaatgtgatcagaatacagctcagcggaatccaagatgccatccccagggaatgacagggttgagggaaggggtcaacgtgggctataggcttggaagtggcaggatctgggaatgaatgagtggaggacaaagaggaatagcaaggagggtacaagcttgaagagaagctgaagtgaggaggggctgacaggggaccccaggatttaggaactgagacatttcctctgacttccttttacacagacaattgggggtaaggatagaggatatccccagtgtggaacacgcttatgcacaaatggatgctcaccccaccctccttcttatccacaaacatcacctcacatccacttccagtctagaatcaggatggccatctcagggataatggaggcaggatagaagatgctgtgtggaggaatagtccaaagtatggggctagagtgaacgtcgtggaggtgatacatggccatccccaccacctctgaagtttacgcatctggacaggttcacggatagaaaagtaagcaactaggagtaattggaatgaatttctcttgtaaaagttgagcatcgagcagtaaagatcagctgtggcaagtcctcattccttccagtacatcatcactttctagagcatttttaataaactgctctttgtaactgaggaaggccttgcatgctcct

SEQ ID NO: 17481 - DNA, 1148 bp, Mus musculus
tttgtataggcagcagatattcatcgaaagctacgagacagaattcatggcataggatgaatacctataaaaagcagagggttgtcaattaagtagtttccaggtgacttgtcagtttccaaggctgccaagtgagtgtgcatgcatgcaagcatgcccatatgtgtgtggtgtgctcagtatgctgatttagctatagctaaccagcagcagtcagttgtatgcagtgaaaacacagtttcatggtaaagttgctttcacatcctcaccaaagagagttgagaacacttcatgtcagatgaagatagagagtgcctctttctcattcctaacacgcttgctgcccgttcgtgtgatctgaatcatgttcaccttcagcttagcagttgttagctgctgtccactctgcactgtgaatgttcaatcgattaaccatggcctacttctaaagtttgttgagtttgagtcatttcaaaagtgttgaaagcttaaccagttccctgaaaggtgcttcgtgtattttaatgagctttctgttgtgtgtttttgcagcgagcttagtagtggaggaacgaacgagacagatgaaaatgaaggtacaccgatttaagcagacaacagggtctgggtctagtcaagaacttgaccacgagcaatactccaaggtaaaattagtagtatccagccaatagtgtcccctttagaaaaaatggaaataagtactaggtatgtgtgtgtgtgtgtgtgtgtgtgtgtgtgtgtgtgtgtgtctagcacagaattagagagcgctgagctgtgtaactgaaattttctgtaactggtagtctttatcatagttgttcctgatgcttgacacgcattttccacacctttataatttaagaagttacattacattacggagatattatttattacatttcccagtcattccaatgaggaaacaatgttcttagctacatttgcaaaagtgagcagtgtctatgaacccacttgttgatgaaatagtagtattttaatttagagtattaaatatattttatgtgatatggactattgaattaatgacaacagccatataatgtgatagttttgcttatttgtctttggttaaaaaatacatgatgttttaatctttaataaga

SEQ ID NO: 17482 - DNA, 1635 bp, Mus musculus
aggtcatttaggatgttaatagagaggtatgagtattttgtaaatgttagggtaattttagatgttttactttctaaaatgtctcagtcttggagtcacagaagagtgatggtctcagatataaactcaaagattactttgatgtgttttcagttgtggttaatctagaaagtgaactaattatggattactttataagtaacacctaactcagaaaaaagtaagaaaaaagtaactgatttcagtagaaagacttcagtgtagtccacatccagtgtctggactaattttcacatctgatgaagtgtctggctgtagctaaggagtcaggagtgaaaagagggtcctccttgtaaaccaagccttttgtgtttcgcagatgaatcagcagatggctgccatgaacctcagtagtgctaacgctagtgcaggttttggccagcctcccagcacgacagcagggtggtctggaagctcatcggggcagacgctgagcacacagctgtggaagtaagaagctgtcacagagttccatccagaaccgaccccaacattcctcgctgcaaaggcatctagttcccatttattcatgtacataacgtattttttctttcccccatttgctcacattaagaatgacctgattgaccgtgttggtctgtgctgattaaattggatgtgaaagcaggttgagaaaccatctgtgtggagggcagctttgctcatactccccatgatgtcctaagccacattgggaagctgctcagttaacttgcataatcagttttatttgcaaaattatagctctaacgtttgcatataagggaagtagttatcatgttagtaatacctctaacagtataaaccccacccccaaattagccagtaatcctgtagaaaggtactgtatgatcaaatgtttaatcatataaatagaatgtaaatgtatcactgagcactgttttctagtgtatcaaattcttttattcatcactcactccactgtgctgttgttatgatgtgcttaacagggaacgtggttagtgaacggagataaacctggatgctactgtaaaactcaatgaaggtttcagaattcaaatttccattgcctcttgtaatgtgggcctcttctcatgtacatagtgctaatatgaagacctttttctgcactatatgcacacagggtaactaaaacaaagccacttttaatccttgaaggtatatccaggtttatgacagtaattgtgtttacattttatggtgcctagtattgacaaaatgttatttccctatattaaacagatgaatccacacacctttttatttgtgggttttatttcctacagtgtacactgccatcagctttccaaatagttcatgttgtgaagccaagaatttaactgggaatatttaattgacagagtactcctcatcagcttctaaaacctgtcattctagcagtattgagatggcttgtgggagggagggatggagggagggagggagggagggagggagcagtgtgagatacttcgttgtccttttcagtgacatgtggcttcactctacaaaactcttccagttcagaaaacacatgcagacaaatgaagacaacacattttgtagcatcca

SEQ ID NO: 17483 - DNA, 4454 bp, Mus musculus
tcatgatctttataatttgagaggcctttgcttcaaaacgagaagtaatatcagtatcgtatgcttcaacaaatttagaatgacttcatggctgccctccaccatatcacacattcgaggaaccaacctatgtaaaagtaaaataagaaaggaaggaatcgaaccccctaaaattggtttcaagccaatctcatatcctatatgtctttctcaataagatattagtaaaatcaattacataactttgtcaaagttaaattatagatcaataatctatatatcttatatggcctacccattccaacttggtctacaagacgccacatcccctattatagaagagctaataaatttccatgatcacacactaataattgttttcctaattagctccttagtcctctatatcatctcgctaatattaacaacaaaactaacacatacaagcacaatagatgcacaagaagttgaaaccatttgaactattctaccagctgtaatccttatcataattgctctcccctctctacgcattctatatataatagacgaaatcaacaaccccgtattaaccgttaaaaccatagggcaccaatgatactgaagctacgaatatactgactatgaagacctatgctttgattcatatataatcccaacaaacgacctaaaacctggtgaactacgactgctagaagttgataaccgagtcgttctgccaatagaacttccaatccgtatattaatttcatctgaagacgtcctccactcatgagcagtcccctccctaggacttaaaactgatgccatcccaggccgactaaatcaagcaacagtaacatcaaaccgaccagggttattctatggccaatgctctgaaatttgtggatctaaccatagctttatgcccattgtcctagaaatggttccactaaaatatttcgaaaactgatctgcttcaataatttaatttcactatgaagctaagagcgttaaccttttaagttaaagttagagaccttaaaatctccatagtgatatgccacaactagatacatcaacatgatttatcacaattatctcatcaataattaccctatttatcttatttcaactaaaagtctcatcacaaacattcccactggcaccttcaccaaaatcactaacaaccataaaagtaaaaaccccttgagaattaaaatgaacgaaaatctatttgcctcattcattaccccaacaataataggattcccaatcgttgtagccatcattatatttccttcaatcctattcccatcctcaaaacgcctaatcaacaaccgtctccattctttccaacactgactagttaaacttattatcaaacaaataatgctaatccacacaccaaaaggacgaacatgaaccctaataattgtttccctaatcatatttattggatcaacaaatctcctaggccttttaccacatacatttacacctactacccaactatccataaatctaagtatagccattccactatgagctggagccgtaattacaggcttccgacacaaactaaaaagctcacttgcccacttccttccacaaggaactccaatttcactaattccaatacttattattattgaaacaattagcctatttattcaaccaatggcattagcagtccggcttacagctaacattactgcaggacacttattaatacacctaatcggaggagctactctagtattaataaatattagcccaccaacagctaccattacatttattattttacttctactcacaattctagaatttgcagtagcattaattcaagcctacgtattcaccctcctagtaagcctatatctacatgataatacataatgacccaccaaactcatgcatatcacatagttaatccaagtccatgaccattaactggagccttttcagccctccttctaacatcaggtctagtaatatgatttcactataattcaattacactattaacccttggcctactcaccaatatcctcacaatatatcaatgatgacgagacgtaattcgtgaaggaacctaccaaggccaccacactcctattgtacaaaaaggactacgatatggtataattctattcatcgtctcggaagtatttttctttgcaggattcttctgagcgttctatcattctagcctcgtaccaacacatgatctaggaggctgctgacctccaacaggaatttcaccacttaaccctctagaagtcccactacttaatacttcagtacttctagcatcaggtgtttcaattacatgagctcatcatagccttatagaaggtaaacgaaaccacataaatcaagccctactaattaccattatactaggactttacttcaccatcctccaagcttcagaatactttgaaacatcattctccatttcagatggtatctatggttctacattcttcatggctactggattccatggactccatgtaattattggatcaacattccttattgtttgcctactacgacaactaaaatttcacttcacatcaaaacatcacttcggatttgaagccgcagcatgatactgacattttgtagacgtagtctgacttttcctatacgtctccatttattgatgaggatcttactcccttagtataattaatataactgacttccaattagtagattctgaataaacccagaagagagtaatcaacctgtacactgttatcttcattaatattttattatccctaacgctaattctagttgcattctgactcccccaaataaatctgtactcagaaaaagcaaatccatatgaatgcggattcgaccctacaagctctgcacgtctaccattctcaataaaatttttcttggtagcaattacatttctattatttgacctagaaattgctcttctacttccactaccatgagcaattcaaacaattaaaacctctactataataattatagcctttattctagtcacaattctatctctaggcctagcatatgaatgaacacaaaaaggattagaatgaacagagtaaatggtaattagtttaaaaaaaaattaatgatttcgactcattagattatgatgatgttcataattaccaatatgccatctaccttcttcaacctcaccatagccttctcactatcacttctagggacacttatatttcgctctcacctaatatccacattactatgcctggaaggcatagtattatccttatttattataacttcagtaacttccctaaactccaactccataagctccataccaatccccatcaccatcttagttttcgcagcctgcgaagcagctgtaggactagccctactagtaaaagtttcaaacacgtacggaacagattacgtccaaaatctcaacctactacaatgctaaaaattattcttccctcactaatgctactaccactaacctgactatcaagccctaaaaaaacctgaacaaacgtaacctcatatagttttctaattagtttaaccagcctaacacttctatgacaaaccgacgaaaattataaaaacttttcaaatatattctcctcagaccccctatccacaccattaattattttaacagcctgattactgccactaatattaatagctagccaaaaccacctaaaaaaagataataacgtactacaaaaactctacatctcaatactaatcagcttacaaattctcctaatcataaccttttcagcaactgaactaattatattttatattttatttgaagcaaccttaatcccaacacttattattattacccgatgagggaaccaaactgaacgcctaaacgcagggatttatttcctattttataccctaatcggttctattccactgctaattgccctcatcttaatccaaaaccatgtaggaaccctaaacctcataattttatcattcacaacacacaccttagacgcttcatgatctaacaacttactatggttggcatgcataatagcatttcttattaaaataccattatatggagttcacctatgactaccaaaagcccatgttgaagctccaattgctgggtcaataattctagcagctattcttctaaaattaggtagttacggaataattcgcatctccattattctagacccactaacaaaatatatagcataccccttcatccttctctccctatgaggaataattataactagctcaatctgcttacgccaaacagatttaaaatcactaatcgcctactcctcagttagctagagaaagtagccaaggagctaaagggatctgcaaccctataggtggaacaacattatgagctaaccagtaccccggagctcttgactctagctgcatatatatcaaaagatggcctagtcggccatcactggaaa

SEQ ID NO: 17484 - DNA, 1510 bp, Mus musculus
tatgcgttttcaaaagtttaaagtaacattaaaatgaactgtctagctttcatcaaaaatgagagcatggccattaaaaagtactatattttttatgtttcctgaagtagcattattgtatcatagattaacatttaaaattgctataatactgtgtaaatacagagtttccaggtttgtgagggaatgtttgtggaaattttctttattgtaaaatagtgttaaatttattaaaatcttacacaatatacattccctttgttgcttttaagaaacataagaagtcactttgtcttgtgccttagggtctctggaataatgtgaaacttttaagtagcttccgctgattggctaaacaatgtctcagtattgcttgtgggtaagcataactcatgggcagcttgctttcaattctgcccataacataatgagtctaactcaagtagagttcgtgaaaaagtgttaaactgcctaaaaccacaagactctaagatgtgttccaggtggcagtgttcagatcttaatccatggagtacctctacaagaatatgtagataaaatttgttttatagaaggctttgaaacttggaaggtcataaatggaaatgtcaagaatgaatgctgaagactgagcttactaagcgtggtaggtcacgtgacagcatactcagctgcttctcatgtaaaggatttggaaacctgtgaaagaaaatgaaagttgtgtgacttaacagagttttctgactgcgttctgggcagtgaaaataaaggcttaattcgctaatgtcagctaggacttattcaaaagtatttaccgggatgcttgaagtaaaagatctgtatggctcaggagaagacctaagagttaactcgtctgcccctgaatcttcggcccaagttctgactgtacttgctgctctgattgattccctgcctcacctgagaagcttctagaacctgctaggagacttggcttctgttcccactcttatgtgattcaccgggatgccgatcccttctgctcctagttcacgttttgggggtgtgggtcagtcccttggcctccccctgcatcccgaccctgtactcttgcttgtctgtaagctccgttactgcttcagttgcaacactaagcctctctgctgtttgtttatagcaaaaggcctggcctgtcagtattaggctcccatattgtgcccaccaaaaatcaagaccgccttatatatgaagcccatcatgaagttgtgttggtttttttctgcctatcttttctttactctgtcctctcttctatctacttggtgccacttaccctgttagaatatatccttccaaagtcacatgttgaagtcctcactctagctggagaaatggctcagcagttaagagcactggctgctcttcagaggtcctgaattcaaatgccagcaaccacttgtgatgggatatgatgccattttatggtgtttctaaagtcagggcactcatatatataaaataaataaattta

SEQ ID NO: 17485 - DNA, 1176 bp, Mus musculus
gtaaccttttaggcaggcttttcagagaaatccgcattttaaaagacagcattcacggtccaaaccacgggcctggaatcagagctggtatgaaaatatgaaaagcctctttacactctgagtgtttgaaacgatccgatgagcatagcaagtgtctgccaacgctcggcggctgctggtgccgctgccgccgccgctgtttctcgcagagggctggacagagctagtcctgatttcagcacctccggcgctggacagctctctgcacgccgcaccaccgcctgcttgcttttttcccactctcgctttgcattactggagatgcatctaaattacgtcctgttcaacaacaagtagattttttttttcctgtacgggaattacagtaggcgattctctcaattaaactgcattttcttctttacggacttggctgtcaggcgtatttatcccgatctcccctccaccccctttgcaggaacgagtctttgggaacgtggtccacccagggatgtaaaactgtgcttaccgatgcatcccatacgaaatgcttatgtgatcggctctctaccttcgccattttggctcagcaacctagagaaatagtaagtaacaaagggaaaacacggctttaatgcaaaggcagggacattgtggcgagtgtttctccagggaactgcatttcaaagggggaaatagaaaaggttgcagggtggcaaaatcgggttgttctcctcagctacagtagcttggcgaattgaattctagttggtgtgcgataactaaatcctactcaattttatgtcttataacttggcatttctgtagtatagttttggagatctactctgatatcagtaatattctgcaaactttcaaataaaaataattgccaactcaaggtttattttaaaactggaatgctgttctaggggaaattgtgacaatgctgttaggagtagaaagaagaccccagccactagagctgaacacattgcagatctgcattggatatttccagcacaggttttctgagggtgtccttggatacatgtgtatttttaaatcgaattaagttttcatggagacatggttgtttggaactgtaaaatcattccttaaaagcatgtagatttttgcaaaggaagaaagaaaagaaaaattagtttctgaaag

SEQ ID NO: 17486 - DNA, 1486 bp, Mus musculus
gctcaggtccgcgtgctctccgcaccaccccacttccactttggccaaaccaaccgcacccctgaatttctccgaaaatttcctgcgggcaaggttccagcatttgagggtgctgatggattctgtgtgtttgagagcaatgccattgcctgttatgtaagcaatgaggagcttcgaggaagtacgccagaggcagcagctcaggtggtgcagtgggtcagttttgctgacagtgacatcgttcctccagctagtacctgggtgttccccaccttgggcattatgcaccacaacaaccaggccactgaaaatgcgaaagaggaggtgaagcgaatcctggggctgctggacactcacttgaagactcgaactttactggtgggcgagcgagtgacactggctgatattacagttgtctgtaccctgttgtggctctataaacaggtcttagagccttcttttcgccaggccttccccaataccaactggtggttccttacctgcattaaccagtcccagttcagggctatcttgggggaggtgaagctgtgcgagaagatggctcagtttgatgctaagaagtttgcagagagccagcctaaaaaagataccccaaggaaagataagggttcacgagaggagaaacagaaaccccaggctgagcggaaggaggaaaaaaaggcagctgccccagctcctgaggaagagatggatgagtgtgagcaggcactggctgctgagcccaaggccaaggaccctttcgctcacctgcccaagagtacctttgtgttggatgagtttaagcgtaagtactccaatgaggacagcctctctgtggcgctgccatatttttgggagcacttcggtaaagatggctggtccctgtggtatgctgagtaccgcttccctgaagagcttacccagaccttaatgagttgcaacctcatcactgggatgtttcagcgattggacaaactgaggaaggatgcctttgctagtgttatcctctttggaaccaacaacagcagctccatttctggtgtttgggtcttccgaggccaagagcttgcctttctgctgagtccagattggcaggtggactatgagtcgtatacatggcggaaactggatcctgggaaaaaggaaacccagaccctggttcgagagtacttttcctgggaggggaccttctagcatgtgggcaaagccgtcaatcaaggcaagatcttcaagtgaacaagtcttgccagtcgcctagctgcctgcacctacccttcaagggagatggggatcattaaaggaaactgaacattgaaaaaaaaaataatgacagattgataggaatgcatccaaatggcaggagaggctatgaggaagttagagaatcagagctaggcaatggtgtaatcagaatatattatatgaaaataaaatctccttttataacaaaataaaaatgtacaacaaaaccaacaccaaatggttg

SEQ ID NO: 17487 - DNA, 1106 bp, Mus musculus
ggagagggagcccttgcctatggcccagggacttagatagaaaccaacacaattggacagggtacacacacacacacacacacacacacacacacacacacacaagaaataagtaattatagagtagtattctgggataaatcctataagaaagtgaacttgtagaacactataagagggagtataattaatttgttttacataatatgctttttatataagttcgacacggtagatctcgggaagctgctgtgaatacggaaactccaacgttgggggtttatttaatagacaaagtaagaaacaaactcaagatggcggaggtggacctggagtcggatcagattcgactgaagtggatccgtaaggaaggtttcttcaccgtgcctccagaacacaggctgggaagatgctgaagcgttaaggtgtttgagaagctgaaccggattggcgagggcacctacggcatcgtgtgtcgggccagggatacccagacagatgaaattacctccctgaagaaggtgcggatggacaaagagaaggatggcatccccatcagcagcctgcgtgagatcacactgctcttgcgtctctgccatccaaacattgtggagctgaaggaggtggttgtgggcaaccacctggagagcatcttcctggtcatgggttactgcgaacaagatctggccagcctattggaaactatgccaacacccttctcgatggcccaggttaaatgcatcatgctacaggtgcttcgtggccttcagtacctgcacatccacagggacctgaaggtgtccaacttgctcatgacagacaagggctgtgtaaagacagacagcagcttgtttgtcctcactgagtgatggatcgtcttttctcctctcccccctgctgcagctgattttggcctggcttgggcctatggtgttccagtaaagccaatgactcccaaggttgttaccctctggtaccgagccccagagctgctgcttggaactaccacccagactaccagcattgacatgtggtaggcatggtttctgctcccagggcctcaagtcttctggccctggaggtcagccctggtcagggggagcagg

SEQ ID NO: 17488 - DNA, 1149 bp, Mus musculus
atctcattttgcttattttgatttccatctcttacagaaaagatacttgatgaaaatatttcttaaaattagatgagtttgaaatttctatttctattcatctgacagaattcaagagactctaatcaatgtaaattaatatgttaggctacttatatataatatatttacatatgtatatatattatatattagtatatgtatgatcaagagtagtctcagtaaatttttattgatatgatcaggtaagtttcagatgtcagaataaggaagtaatatactttaaactactgaaataaaagcacatagcaaatagctaagttatttttattttatttttccccctatgatagaacaagtaagaagtttgcgacaaagcactattgccaagcgttcaaatgcagcaactctaagcacaaaaaagccatctgggaagaccttatctacctctaaagtaggggtgaagccagcagaaagatgtcagggtaaagaagaagtttatgcctcactgaaatctgaacaccctaaggagagtagaaggagtggccggcatgctgaacagatggacgtggcgccagaagtctcagcatcttcagttgattcttcagtgtcgtcttgtgctggaatgaaggaggaggctgagtttgatcccaaacatgcatgcaataatcagggtgaagtgaacgtgccatctcctgagttagattgtccacttctctcagagactagtgctagtgtggaagagaagaacattgaggctctgatggaatgtaaagctaagactaacagtagcccgttatttaagtttccagttagagaagatgagcagagtgatcttgtttcgggtgaactgaatgacaccattgaaggaaaggatgcagggggaaaacctgatcaagaatcagaggaggtgaagtttccctgcgaaggtgaccagacggccgaggaacccgaatcttctgatgtgtctagtgactctgcttgtgccaataaaaataaggcagaaaagaatgaaggggcagaatgtcatttggaattgaagaatactgtggatattgttgataaacctgagaactcacctcagagaaatgagttggaaacactgggctatggtgaggacacggagtctaatgatgctcggttacagag

SEQ ID NO: 17489 - DNA, 1228 bp, Mus musculus
tctgtgttatttgtgaataattttaatgctttgtaaataaaacaaggctactctatggtttttaatagttgtggaccataatttaagtaattgaattttagctattttatgtggactcactgtaaaagcattgttttattctttatgaaaatgttatggttaaaacacagtcttatggttgaaacaattctttcagatatgtcaaaacaatgaactatataattctaaaaataaaaaatttagtaagacatttagtaggatttctggtaagatattatcctatatgcatggtaaagaaaggtcattcagtaaaaatttgatccatgtttccaaatgtatgttctaaaaaacagtgagggtttttttgaacaacaaattcagaagtgtgttcttagattcaaaattattaagataatttggtattaggtgattattttcaattgatagctttatttcttatggtattttttttgtctttctatagggttgaaagacacacagaagtcttcatggatatagttgatacatttaatcatttaattcctactgaacacttagatgatgccctatttctaggatccaacctggagaatgaagtctgtgaggattttagtacaagtcaaaatgtcttagaggactcgctgaagaacatgctcagcgataaggatcctatgctaggatctgcaagtaaccagttctgtttgcctgttttggatagcaatgatcccaatttccagatgccttgttcaacaggtaattcttactttttttttttttttaagtctgcaatttaaaataaagacttttcagcagcatcttttttccttttcttttttaagaatgagtgtagtgcatttagggttctttcctttaaatttagagtctcttttctaggcatcagtttagagaatttcaactacattttcttctaaacagtgtacagagttattgtcaaggatgttatagatgtaggtagagtgaccaggtaacttggcacatcagagtgggatatttgtgaggaggaaaggggttgctattaataattatgtctttagaacatgtgaaaattgggactcatgctggaaaaagaggttgtctggcaaatgggacagtgccatacagggcctgctagagtgaggaatgaaagctgaggtgacacgtcttcagctttcatcgttttcttggttctaatcacagagactttgatactttgtatgtctattgcaaa

SEQ ID NO: 17490 - DNA, 1140 bp, Mus musculus
tctgctttttgaccagtgtggttgttaatctacattttgctgagatacatatagctggggggaggaggttgttttgacctagactcaatcatttataggataaaagttaaatcaaaccacttagcataacatttagaaatctcaagtgttctaggtgggccctttggtcttcatttccttactaccagaaatagcatccttctaacttctgtcatgatcaaaaagtcctttgtctttttccttccttccagaaagcggcgtggagcttttaacagcaagcaacttttgtatctggagaagtaccgtccgaaaatgcggctccgcttcaaggattccaatggtcatagaaacaactgttgtattcaataaaactggggtgcctgatgccattgccttggaagtggaacttcagatgggacctgatttgtcatgcatattacccaatgtgtcggcttactgaataagtctactgcagctccacaggaatactgaaaaaccagtcttaccaggccacaagtttgacagaattgcaacctctatatttgggctatgatcaacatgtttggacacttagcaaaagatttttgctggtcagcatttaaaatgtgcttattatttgtaccaattgacctttcctaaaataaggtattgagttatgtcattaaatgtactcctgtgccagaatattattagtctataaggaatttagaaggattaggtgccaaaatacccagcacaatacttgtatatttttagcatcatacagaaccaaaattgcaggaactgagaactctagaccatccatggtgtattccttcagtcatttcaaacactgcagggcttctctcgttatctgcctgctcactctgtttacatctcccacacttatgccagaatacgtcaggtttgcttagccatcctttattttttttatttttttttttaactaagtcttgcgctgattatttaatatgtctgtctcattttgttttgttttgggaaacctctgtttgaaaatcaactttgttacagaagcacatatcttcaacaatgtctccagacaaaaagccttatagttaatttaatgtttgcactcagaagtgcaacctaacagggagggcctgaaaaagaaacgagagg

SEQ ID NO: 17491 - DNA, 1140 bp, Mus musculus; identical to SEQ ID NO: 17490

SEQ ID NO: 17492 - DNA, 1168 bp, Mus musculus
gctcctcgggcagctcactgcatggtcgtctggtgcccccgccgcctgcatccccgccgccgccccgcgacgcccaccgccgcctgccctgccgccgccgcctgcgccgcctcgggaccggctgtatgattaggccacaatcttcaatgagtagacatattcctgtgagtaccgcgggcccggcctttgttagagcgagcgaccgaggagggaaaggagggtggccgggcgaccgaaacgccggcggcggggcccggacccggagcgaccggcagggcagcccagcggctttgtgcgcgtgccaccctgcggcctttgttccgagaagccgcgcgggcgtcgtggacgtggccggggcggggcggggctgcggggggaccgggaccgggcgcccggggcctcccaagatggcctcggtggccgcccgcgctcgccaccgtgaacccgtgattgcggacctcgcgactgtgcgcgccgctcaagcccgggcttgccgatcgccgccgggcttcggtagtggcgacccggtcggcggagggggactctgactcggccccgaggcgggctgcgcgtggggcggtccgctcttgggctggagcaacaggagctgctgggcagaactgcgcggctcctgttgagcgagcagccctgcaccattccaccgctggcgagctgaaatttccacggtgtcggaacggtctgtgcggtgaccagaggtctggattccggagcttaggggtcatgaatcctatcctggcttgctttttttaattattattattattttgctgtttgcttcgtgccggctaaaacggttggaaaaccagaaaatcgcgatctgttcccggaaggaaacagcgcttgcacacgcgctagattgggcgcgttacctgaaacctgagtgtatttggaacagaattggataaagcagatgatcccacagactggtttgattctagagtctgacagactgaagctaatgctacacacatacacacacacaaatgatccttttttttttttttttttttttttgcttatggtgcatgcaattaaaatgggacgatctcgtcgtgtatcttggctgcctatcatgttgaggttttgcctgtgagggagtgggaggatattattaagaaggatttcggtggtctccactgttttaaca

SEQ ID NO: 17493 - DNA, 1168 bp, Mus musculus; identical to SEQ ID NO: 17492

SEQ ID NO: 17494 - DNA, 1219 bp, Mus musculus
atatagatatagatatagatatagatagatatagatatatagatgtgtgtgtgtgtatatgtgtgtgtgtgtgtgtgtggttgtgtgtgtgtgtggttgtatggttgtgtgtatacatatatgcatgcatacgtacatacatacaatacacatatacaccacatatacacacatatattacacacatatacacacggggggggagagaaagagagaaaggggtgcaaatttagaaatctaggtacattactttttaaattaagaaatgcctgatacctttcttgtgtatttttgtttacagcaaacaactctctgaattaagaacaagttaagatttgattcacggctacctgggggttggttgagagggacggtgggatcccggctggagtgtggcactgccactgcgcagagacgaagcgggcagtcagaaaatgggtaagaagagtcgagtgaaaactcagaaatcagatactggggctacagccactgtgtcaccaaaggaaattttgaacctgacaagtgagctgttgcagaaatgtagcagtcctgcacccggccctgggaaagaatgggaagagtacacgcagatccgggctctggttgagaaaatacggaagaagcaaaaaggtctgtctgttacttttgatggaaaaagagacaattacttccctgatgtaatgaaatgggcctctgaaaacggggcttctgtcgagggttttgaaatggttaacttcagagaagagggctttggtttgagagcaacaagagacatcaaagcagaagaattatttttatgggtcccacaaaagttactaatgactgttgaatctgctaagaatttagtattggggcccctgtattcccaagaccgaattctctaagctatgggaaacattgcactggccttttatctgctatgcgagtgagccagccccaactctttctggcagccatacattcagaccctccccagtgaatatgacacccctctctacttcgaagaaaaggaagtacgatgtcttcagtcaacacaagccatccatgatgtcttcagccagtataaaaacacagcacgtcagtacggctatttctataaagtcatccagacccatcctcatgccaacaaactgcccttgaaggagtctttcacttacgaggactacaggtgggccgtctctcagttatgactcggcaaaaccaaattcctacagaggat

SEQ ID NO: 17495 - DNA, 1132 bp, Mus musculus
tcacagcctggttttgtgaatgcagacggcagtttcccagtgaagaggcggtagaaaagcatgttttctcggcaaacacaatgtgttataagtgtgtggtctgtggaaaggtttgtgaagattcgggggtcatgcgtttacacatgagccggtttcatggaggggcgcatttaaataactttctattttggtgtcggacgtgcaaaaaggagttagtaaagaaagatgccatcatggcacacattactgagtttcatagtgggcatagatatttttatgagatggatgaggtagaggaggaagaggaggaggccatgccgtcatcctctgtggagagccatttgaatactgacaaacctccttcacccattgctgttgttgatcactgcccggccaacagtcctcccaggggcaggtggcagtgccgcatctgtgaggacatgtttgaatcccaggagtgtgtgaagcagcactgcatgtccttgacaagccaccggtttcacagatacagctgtgcccactgcagaaagactttccataaagtggaaactctgtaccgacattgccaggacgagcatgacagtgagatcatgatgaagtacttctgtgggctttgtgatctcatttttaacaaggaagaagaatttctgagtcactataaggaacaccacagcatagattatgtgtttgtgtcagaaaaaactaaaacctcaattaaaactgaaggcgattttaaaatagtagagaccagtagtttactaagctgtggctgtcatgagagttacatgtgtaaaatcaacagaaaggaagactatgaccgatgccttccagtcctgctggagaaaggtaggctgtggtttcgctgcagctcgtgctcagccacagcacagaatgtgaccgacattaacactcacgtctgccaagtgcacagaaaagagaaaagtgaggaggagcagcagtatgtgatcaagtgtggcatctgcaccaaggcattccagaacacggagagcgctcagcagcacttccacaggaagcacgcggccctccagaaacccaccgcgaccccagggggagccaacagaagcagcacatgccagctggctgctagtgcctcacatgctgagaaaaacct

SEQ ID NO: 17496 - DNA, 1193 bp, Mus musculus
tatactattaatggaatatagcattgtcttaagggtttatgtggttcctgtttatcatagtggatgaccttttctgtgatgctcacgctttgtaattcattagaaaacccttcctactttcctacacatattcagcagcctacttaacctacatttcttcttttttgtttttgagacaggctcttaccacatatacggagtaggcccggaacatgattagtagaccaggttggccttgaacccatagagatatgcttgtctctgtttggcttctgactgctggaagtaaaggcgtgtgctactaggccaggctgctgcttttcatttgtgccatatatattgaaggcacgaggctcccaccttggaagatgttactttgtcagataattttagggtctgtattagtcctgtttgtcttatttgtagaccaaacaggaactagtttatcaagattgtttagcagatataactgaattgtatctagagttaatatttacttaataagttaatattgtccacagaattttttactttgactttcttaggttcctacaaggggtctctaaaatgtctctcaaactaactcgagataaacagacttttgtagcttgtattcagtgctatacaaaggggtagtagactttagcccatgactggagcagtgcaggtttcctctgagaaagggctaaccacccagactctactggggcaagtttgcacatgtctttgtgcagcattgggcctgcttcagctcgtttgttcttttccatcttgccctgaattagatgctacatatcacatgatttatgagatactcttgttgtttaaaaacaaaacaaaataaataatgcttggagatgtgcttttggaaactgttttggcacgcccacctaatttatttgtatcaatccccgctttatattaaacggcaacaaaaaagcacagaaaatttagcactttaataattttgacattattgtacagctcttaagtattttcaagacagcactactctcgtcttagatgtttatgttgttcattaatgaagtaaaagtaacattgcttgaccactaattgacaaacccaagcaactccaaagaattgcgtttttctcaaagtgaaaaatgccgggaaatcaccaaattggtgatgagtcagacaacctaatagcagtgcttggcggctgagctggt

SEQ ID NO: 17497 - DNA, 1187 bp, Mus musculus
atgggggaaagtgccaagaaacaacgaggaacaaggctgagaattgcagaggcagctgaggtagatgagaagattaaatcaacagaacaccgacctgtgctttctccagagcactattcgcattttctgagtttgctgtctctgtccgtttcctctttctttttctaagaacttggttgtcggtgatgtcatctgtctgcaagatcttctgcattttctcaattagtcagcccaggctttccggaacggcgatggcagaaacgcccatgtaggtgccgctgttctgcatgcggttctcgcttcttaaaaacaaaaacaaaacacagggggcctcagcctgctgccggctcaggtgagcgcctttcacggaaggtgccatgtggaaggggccatgttgttgtctttcttactggccaacttcccgcacatgtttacttgactcaaaaaaatccagcttggtgctggagacgtggctcagtggttaagagcactgactgctcttccagaggtcctgagttcaattcccagcaaccacatggcggctcacagcctgggatctgaagtcctcacagatgtgtcttacgacggctatggtatactcacatacataaaataaataagtcttttttgttttaaagattttatttattttatatatgtaagtacactgtagctgtctttaggcacaccagaagagggcatcagatcccattacagatggttgtgagccaccatgtggttgctgggaattgaactcaggacctctagaagagcagtcagtgctcctaacctcagagccatctccccagccctaaataaataaataaataaataaatcttaaaaggaaaaaaaaatctattgcaaggcaggggattgatacacagtagcaggtcatactttaagaaacaaaagaacccattcagctttgttaccgccctcaagctgctcatgtggtcaggtgcggctagttggctttaaaaacttcaaacagtgtaagaacactttccatctgcccttcttgtcaagtagccatgaagaatctacaggttttaaaaattctaggtgtatgtaaacatcatcacacagaactgaaattatgcacttctaggaaaatgtattaataatagttgacaacatcaggatggagggtaaacatattcccaagagaccaataagagttgcttag

SEQ ID NO: 17498 - DNA, 1138 bp, Mus musculus
cccgaggaaactcagactagaagggacatgtgccatcatagtaacagctccaggtgaaaccgcgtagtctcagcgttacgttgactaggagaaaactccaatcatttccactaaagtcaggaacaagtcgaggatgcctgctcctccactcccccttagtatagccctggagttcttagctagagcagcaagacgagagaagtgaaaaggttacggattgggaaggaagatgtcagagcaccgtccgtattgggaagtgtcatgattctgtacataggagactttgtatcctttgtatcctgccaaacactttcaacaaagttggcaggatacaaagttaactttcagagatcagtagctttcctggtaccaatattcagatataccaagaaagaaattagggcaacaaccccatttaaagtactttcaaaataaaataaaataaaataaaacaaaatactttggaatgcacttaactaaggaagcgaagggcctctacaaggaaaatatagaaacattgaagaaagaagtcgacgaagaggctaggagtagtggctagccttgcactacgtacctacttggagattaatgtgtatagaggtcctgactcctttaaacttatgtcatcaagtttatcaatcttgttcagatggctcctcatggcctgtctttcatgatctgttttttccctcagactgccttgttatcttataatctgttgacatcacaagatctgatgtaacgactcagtgtccacctgaaaggccctggcctttttttttttttttaaattgaagtgatttttatatactgtaagaattttgaaaagaaagtttaatacgtaatgctttcatttaaactgtaatcttcctaaaaaacctgtgttaagtatatatggtattatatactggtttgtgttttaagcagttcctcttttagctgataattgtcattcagttccaatgcctggatttgtgtggtgtttgtagtcacatttgtgcccaggggtattacatggtgaccttatgagaaatgatgagggacagtttttatgcataccatacacatctgtgctaggtgagggcccagtgctgtgctttgctgagtaaaatgttcacatagatttaaacatttgttg

SEQ ID NO: 17499 - DNA, 1191 bp, Mus musculus
gttactaaatcccagtcaaacggcctgaaggggctgctgagatgtctcagtggttaagagcactgcctactcttccgaaagtcctgagttcaaatcccagcaaccacatggtggttcacaaccacccgtaatgagatctgacgccctcttctggtgtgtctgaagtcagctacagtgtacttatgtataatgataaataagtctttaaaaaaaaagtggtctaaagaggcagaattatcttctcttacttcagagctggcagctctttcttctgaatgggaaatgaggttcctggaatataaagtttagggctttgtttcaatgaaataacaaaagtttgttgtgtgtatatgtgtctttaatgaagaagttattcttgacttaataactgcttgaagtgacagccgatgtttgcgaaagccattagcaaaagcgattttctacaattttgtcaaggaacagaggtaatgaaaatggaaccttaaggactgttaaaggcacaactttccttagtgtcagctgggaacaattgagcacctaatgttttaaaaaatgttggtgcttttcatctctggctgttgttttgtaatgaaaacagtgaattttttttttttttaaagggatgtggtggaaagacatgagggtaccaccgagtaccagaacactgcttacaaagttcagaaaggacagagaagagaatcaggcggactttgtctctttagggctgttccgagctggctgtcatacaatctcactgtttccctgtagttagtcttctgtccttggatcaaataagcaaaagggggtgacatcacctaatatctaaaatatcacaaatgcttatttttttccaccaatacagctgtacacattagcactgctatgtttcctgtttctcacaggaactaacagaagcccccaggagccaggcaattttctcaaggtcacatggctgatatccaatatacactctgccaaaccatatgcaatttcagatttctacaagacaacatagatggtagatggagcatgctgtctgcaaagggtctgtttttatgtctcagggtttatacaagatgtggctgtaacccagatcttctttctaacaggaaccatagcacacctggttctgaagtacttagaatcaaggtctctcttatgacattgagtaggtgggtaaatgcaggtaaa

SEQ ID NO: 17500 - DNA, 1195 bp, Mus musculus
accttcctaatgttgtgaccctttaatacagttcctcatattgtggtgaaccccaactttatgttgtggtaaacccaaccataaaattacttttgttgctacttcataactgtaattttgctcctgttatgaatcataacgtaaatgtctgggttttctgatggtcttaggtgacccctgttaaaaggtcgtttgacccccaaaggagtcgagagccactttagggtattagtgaaattgagtgtttttgacatagacttttactgtgtagcctaggctggctggaacgcagtatccagctcattgtggttccagactcacaggtgctgggattttagtgtttaatgtcatgctggtttgaccctgtgcccctaatcatgccgcctctcaagtgtgaaacaggcatggtcaactgaggcacatcacccatggtttagaactgttgggtgacttctctcagttttaactcactggaatgtgtgtctggtatcctcagtgcagggaacgtttacatctgccaggagattgagtgctgtcttcagtgaaaaacagacaagagacctcagtatgcggttcacaggagaaccagcaacagcctgtgagccctgaaggcaggggcagtgttattttgttcattcagacagtaacgtggccgggcgtggtggcgcacgcctttaatcccagcactcgggaggcagaggcaggcggatttctgagttcgaggccagcctggtctacaaagtgagctccaggacagccagggcgacacagagaaaccctgtctcgaaaaaccaaaaaaaaaaaaaaaccaaaaaaaaaaaccaaaaaaaaaaaaaacaaaaacaaaaacaaaaaaaaaaaccaaaaaacagacagtaacgtgatcctcacagctacccagcctgtagcccggatccgtgaccacaagcttactgcctacagcttagtacacacttaccgagcattctataaaggttgtctgtcctcctccttagatgccatctttaaagaattgagtttttaaaaaagatttttttaacgtgtgtcataagagatgttttattaaacagtcgtaagttcaggcaaggatgaaggggtcgagttactttttcttacttgcagtcaagtgtcagtatgtgctgttttatacaattcactatgtgatgtgggcctttgaaaacaggagaccggctct

SEQ ID NO: 17501 - DNA, 2042 bp, Mus musculus
tcttcctattaactccctgctagcaccacagcagatggggtatttcctaatactacctaaatagaccaattagaatttttaataacatggaaaaatgggggaggggtgagtgtggttgataatattctttcacagttcttgaagaaataataatgataatttgtaattcataaaatgagttaggtaacttcctgagaatattttcaagcctatatgtatatttttttaaaaatcattttcgtatcggtaattcatatagcaatattaggatttaactttttaaaattatttttattttttttattttatttttttcggaaaaggcttcaaaggagctgctctaggagaacccagcgtcccatttttcatgttatttatgtgagctataaaggaatcaaagtgttttaattggtagttttcactgaagcagactggccctttttactagttaggtcaaggcagcaaagagctcttgggacaagctgtcttttatcatccctgccttttaaaaggtcgccgatgtgtttgagagttctgtgtcctttaagagaggactgtggctcctttatctggctgcccgttgcctctgggatgtgtgcgcgttacccaggctctctgaaggtcctttctagcctgttttttcctgagggcccctttctcctcagacagattaggccactggctattgtgagttggcttcactgaaaatcacagtttacaggtaggtaccgaggcgtggtgtagggaggagtaactctcagcccttcttagaaggaacaaccatcgtaacaaaagactaagaagaaataggatgaacgcatgaacagattccacggttgcacgcgtgatgagagccgtctgggagtgggcagttctgggcaggagctttgattccagttgatctaggtattcaaaagagaagcgtacattttttaaatgacaggacaaacataaaccactgagtctcaaggggcgggacctcagaaacagcacctgaggggcagacagaggctcattattgaagtttgttcttgtttatcctcagttaccatcccaagggcagacgtcttctctctggttgaatcaggaaggagggtacttctatcttataactccatgttctgctcttagggatttaaataaaggaaggctgagattctttatggttttgcttcccactgatcctaattttgtgtaatggtgaaagtataacaacgtaaaaacagaattctaggcctttaggcccaggcttgggaatgtggcctttgtaaaggtatgctaatcataaaagagatagcgacattcctctacccacccgcttcctgggttcaaagagtgctcattcaaagaaagtcaccctggccattaccagaacctgcaatgcaaatgtgctattgttaggggctcttagaagctgtcttgagagttaacaattaccaggtattccttgtgactcttgtaactttatacttccttgtgactcttaactggtatctttggtatcttccaacaaagccctccccacttccttgagtttcggtttcttcctttaaatacccccttacccagctactcggggcgccacagtcctctacccctgcgtggtgtatgaccgtgggcccgagagcgctcttgaataaaaatcctcttgcaatttgcaacaagaccgttttctcgttggtgattttggggtgtcgcctctcctgagtcagaacgtgggggagtcctcacgttgtgggtctttcaatggccttcagagctgctgctgctgctgctgctgctgctgctgctgctgctgctgctgctgcttcttcttcttcttcttcttcttcttcttcttcttcttcttctccttctcctcctcctcctcctcctcctcctcctcctcctcctcctccttttccttcttcttctccccctcttccttctccttctcctcctccttcttcttctccttcttcttcttcttcttttttttttttttttggttattttgagacagggtttctctgtgcagccctggctgtcctggaactcactct

SEQ ID NO: 17502 - DNA, 1154 bp, Mus musculus
cttcgtcaaacagaagttcagtagtccattacaaatccaaggatgaaagcccaaactgtatcttgtatgttttgtgacttagcacgctgttctgcccatgaagatgtctgtgaatctgggtcctcttgtttctcttatggtaccagcatgacatcattgtgctacctcagtttggggggcctggattctctgcctttggggattttgttgtagttgtttgtttatcttttaaagattgtaaaattggtgtgttctatatttaaaatttctttggaagcttttaacttggacacagataagtcaaatatgaaagcctgcttggaattctattttttctctttaaaaggggatgcatatttagtaatatatttagcacaacaagaagaattacagtatccaggaaaatgggatgtgaggacttagcacatagtagacgtttaccctccgcacttccttccttcctaatggtctgatgcttccgttatatttagatatctgacatccatgtcactggagagtcagaggacatgtctgcgaaagaaaggctgctcctgtggacacagcaggcgacagaaggctatgctggggtgcggtgtgaaaacttcactacctgctggagagatgggaaactattcaatgccatcattcataaatacaggtacagaatgtgtccggccttgtcgcacgcaaacacaagtcattccttcatttctggcgttttcaatcgtatgctcctgttgaaggggcactgcgtgtgcgtaagagaggaaagggccagataaaacgaaagacagcgctggcccacagctgaatcagtactctaaactgtaacacacacacacacacacacacacacacacacacacacacacacacacacagagagagagagagagagagacagacagagacgggcagagcagcagagtggtgttatatctgtatatctggaatatatatatatatatatatatacacatacatatatatgtatgcacacacacacacacacacacacacacacacaccccttagcagaaagtaagctcagatgcctataatctgcaggtcagtgatctagtttatctacaggttacccatgagcagacaggcaaaggttcatagttcacaagcttaacaaggcgtgaaactcc

SEQ ID NO: 17503 - DNA, 1655 bp, Mus musculus
tcccattacagatggttgtgagccaccatgtggttgctgggaattgaactcaggacctctggaagagcagtcagtgatcttaaccactgagccatctctccagcccaattaacaaaaaatttttacctgctttttccctttagattttggtttaatttaatggttaattgatagaatataattcacatttttgtgattattaaacagaataataatacattacttcctttgggcatttcagtgatgatttggtattttaaatgactttagggaaatttgcttggtaatttttaagttttaaaattcacattctaagatttctgttttaaggttacgtccttagggtttgtgctaataggaaccactggtttgtctcagtaagaacaaagctggtgtagtgaagcttgcacgagagcttcctggggagcggaagttacttacacgctgtgtccttccacagaggagcaagaggaatctgtgtataatctttacatctcggaagtgcgaaacattcggctccgcctggagagctgtgaagacaggttgattcggcagatccggactcccctggaaagagatgatttacatgaaagcatgctcaggatcacggagcaggaggtaagagttacacacgtgttagcaaagccagagtcatttcctcttagagaccctgaatgtcaccttctgatttccccgcatgagactgtgacttcagttcagttgtgcatttcttactggatgtgaactaagatcccatgactgaggtctgcctctgaggtagtaaacagagaggcaccctggtgggcttcaggcagaagtcattatacacccgctggttacagagttagagatttaggtcaaaggacaatgcagtaacgtcattactggttatcaagctgaattggtgtgcttctgtttacttggtagaggaaaaggttagacaggtgcttatattggtaataaactacaaaatgtgtttttaagctgctctaagaaccatgcccattgcagagacaaagataacctccgtttgttttctgtactagaaactgaagaaagagctggatcggcttaaagatgacttgggaacgatcacaaataagtgtgaagagtttttcagccaagcggctgactcgccgtctgtccccgctctccgatcagagctcagcgtggtcattcagagcttgagtcagatctactctatgtcttccacgtacatagagaagtatggcagcaatcagtccttaccccgtcccctctctcagtgcttctgcgggcgatccatttatcttaagaaactagattgatgatgtttctccatgttttgggggggaggggctacctggaaactccctttttgtagtttgatgatatttctccatgggtgagggggctacctgtaaactccctttttggggtttccgctcatgcttggcataacctattggaacctaggaacctattggcatctgtgtaacagcctcctaggggtggggtattgggtggtgtctattaggaaaagaatcagctgactgccacatggacaggaggccagtcagtgtcccatgtcatgagttttaatgaccctgtaagtctacagtgtgtgtcgggggaagacattgaacagcatgaactagtatttatttctccttaaa

SEQ ID NO: 17504 - DNA, 2195 bp, Mus musculus
gatctattgccatgaggagacatcaggaccaaggtaatttataaaggaaatcttttagttgggggcttgcttacagtgtcagatggtgactccatgatcatcatggtgaggggtatggcagcaggcaggcaggcatggcactggagagatagctgagagcttacatttaatccacaagcccaagacagagagagagcaacccgacctgggctgttgaaacctcaaagcccaaaccccagtgacacatttgcttcaacaaagccaccctctaatccttcccaaacagtcccaccaactggaaccaagcatttaaatatatgtcatacaatgatgaacaaattgtaaccgtgggtaaacagtgtgtttctgtatgacttgttgatacattatatcatgatgtccattgattcatgtatttcagcaatggcgatcagaagtagatgagaagagagaggtgttccatgcattggaagacgagttgcagaaagcaaaagccatcagcgatgagatgttcaagacacacaaagaacgggaccttgactttgactggcacaaagaaaaggcagaccagcttgtcgaaaggtggcagagcgttcacgtccagatcgacaacaggtgggtcacctttctgttcagtgcacatgtaggtgggagtccctttgtgtacagagggcaaattccaaacttaccaggtgttaagtgaccttccatagctaatgtgtgagctgtaggattattccctaattccatttctttcttacagactctcttttgcaaaacacgtaacatgaaagaaacattctcctttctttttaagatttattttattttatgtgcgtgggtgtcttgcctgcacgtgtgcatgcttgtgttccgcatgcataccaggtactcgaagaggcaggaagaaggcattggatcttctggaactggagttacagtcagtagtgagcttctatatggatgctgggaaccaaacttaagtcctatggagagcagccagtgctcctaattgctgagatgtcactacctccagaaaaatgaccttttcaactgtgcacaactaaaaattctgatttatcctgatatttgtataatctgtcttttaaaaagatagtagtatactgctctaaaagttattaccaacttacaatgttcaaataaccatgagtttatgaaataaatcataagcttatttcttgggctctacatagcaataagctactcaggatccgttgattgactgtaatgaaggtcacttgccctgcgttttcagctttagccttagagccatagtaaaacagcaccaacaaacttcatagctcctgggacaggctatctctgttcacctggacaccacatggggcaggtgctgctggaattgtgttttaggctgctgccaggtatctgccctgttgtgcttggtggctcttccctgcccttcccctctcctgctggaatgtgactattccattgctgttcttgtaggctccgggacttagaaggaatcgggaagtccctgaagcactacagggactcctaccaccctctcgatgactggatccagcacattgaaacgacccagagaaaaattcaggaaaatcagccagaaaacagcaaagccctggccctgcagctgaaccaacagaaggtacttgaaactgagagtctgtctgaatttggtcggcctcaagcctcacctttctctcctgtcttggaatcaaaggcagttgcttagaccaatgtgaggaatgatgatgcatgtgagaattctataccttaaacctgcctgcatttacttttactttccagaagtcatttataaaagcatagatattgaaaagtgtgttagggtagtttccacagacttcattttctgggtttcataggctgggtctaatttttcttgataatatgctggcagcatagttttatacttgctaaattaataaacatggccagaggtaatagatagaatcccggctagtggcgattggtgggaagttggatggtttaaggttttatcattagcagccagtaatgtctaagagtttgcatctggagtgggtataagggacagcaccacgtctgctctgcaaacttctcatttctgccctgaaagcctcccaagggtagatcgtttattaatcttccctggaagtttgttatttatctataagtcaaggcacgtgtaa

SEQ ID NO: 17505 - DNA, 1901 bp, Mus musculus
ggctgagtgccctgttaagccacgatgagttgaggcagagtcaggggcgttttagtgatacaagtaccccacagaacacaggatatttatgcgaagcctctactttgtcacccagtgaccagagagtgttggctgatcagagcacaagagaaaagtttcaagaccagttcctaggaatcgcagctatcagcgtcagcctccagggggcgccctgtggacagaagcctgtagatactgagtgtagcagttctcaagtacactatcacagtgaggaatccatgtcagatgcttctgctgagagtggagccactcggcagacagatgagtcagagaaaactgggtctaaggtggaagacaactcctgtaccatggtccctgggggtggttcccgcaatgacaacacatcagattgtggcccactgtcacataaaggagccattgatgctggtgactatgagacgtcactgctggccggccagcagagcgacacggcaacagacagtgacagtgatgactatttctatgacacccccttgtttgaagatgaggaccatgactctctaatccttcaaggtgacgaccgtgactgtttgcaacccgaggactatgacacctccttgcaggaggaaaatgacaggacccctcctcctgatgacattttttatgatgttatgaaagagaaggaaaatcccgagtttcctcatggaggaatggatgagagcttaggtgtggagaacaaagtatgttgccctcagggctttcctgtaggtattgagaaacctgagttgtacttagctggcgagaaagagtttaattctggtggctcagaacagttagtggagtctgtgtctgaaagtgagaacccgcctggcctttgggatagtgagtctgactcgttgactgagggtgagattataggaaggaaagagaggttaggagcttcgttaacacctgatggtcattggagaggggacagagaagagtgtgacaccagccgagaaagccagtctgataccgatggggtaggctccatacaaagtagcgaaagctacaggccttatatgagcgatggtagcgacttggatgaggaagacaacgggggccgcagcagtgaggacagtggagacgggcgaggaggacaaggagtagcagatgagggtggagagccccagtaccaagctgaccctacccagttgtacactgctatcaggaaagaacacgggggtgaaacccaaaatgtcagtgacatgatccccctggacaaaacgcacagttatagtccgttagaaacgcagcatggtgcaggtgttttccagccagagtcagctggtaggggaggttgggacacagaaagaagcagccatccagaacttaccactgaagctgatgaggaagacgaagcaagtctgtccactcacatggcaactaaaggtgtgtcgctgtctaatgccgaaggcactgcctcagaagaaatcaggttggttcaagggccagactctacaggcattctaaaagctgaagacctcgagaatgtatcgccagaaatcagcccatcttctgacaacattgtccgttctgaagctgagttaggaggaggagcttctgaggatggccatttgtcatttacaggaagtgacagggatcagcagggacctggaagaggtctggttaaaggtagagatggccaaagcgataagctggtagatgagacgtccattcgggaaatgggctttcagaaagaaggggtgttgatgagcagcccagaggaaggaggagaagaagaaagggatctcgaacccttcccgaatggaagtgcgacagagagcctcaacatgggtaagagtcaggttccccctctactgacacacaccgaggaacttagccacagaggggctccgcac

SEQ ID NO: 17506 - DNA, 1282 bp, Mus musculus
tccctagactctgtgtaaagttgggtctggtaacacatatctgtagttactgatgcttctgtgggggaaatagggggtggagacaggagttggcagttaccatggtaccttgtggctgactggctaggaggaagcagtgaacaatgaaagagaagggcccagtctcaaataaagcagaaggcaagaaacaacacctgaggtggtcctctgatctccacactggtgccctggcacacacatgcgcgcacgcgcacacaaacccacaccacatacacagatgcaaaatgtgaaaatcacctattaccaaatgatgaataagtagattttttttatgtatacataaaaagtatactcttatagtgctgatagaagaatcatatttaagtagtgagtatacttcagtatttccagtgctgatgaacttcatcctcacctacctttcatgccaccttctgattcttcacagaatgtgctagcagacctttcacataccaaaatgcagctggaaacgacggcctttgacgtacagtccttcatctctgattatgcacaagatctgtctcccagccaaagcagacaactgctgagactcttaaatacaacccagaagggttttcttgacctgcaggagctggtaaccactgaggcggaccggttagaggctctcctgcagctggagcaggagctgggtcatcagaaggtttgcctctcttgcggagttgtgctcgctgttttacttatcagtgtgaaatcgtaacttaggtaaccaggaatactgaccagttagggcggtgcactggacaggcctgagcgggtgctgagcagaatccctgccatgtattgtggcagagtctgtcaccttgatgctgtcgggtagttgaggtttttcactgtcctcttaacagtattttgtgaggtgaacgtcttcatccttgccctgaaaatgagaaccagaaagccttcaggggtgtccaagagcaactgatgaaggtttagctctgaaccttcagggaactattccctctagtgaggcacagggctcagcttgtgctccagagaatgcactgtagagctgacttgcctaaatttacaccctgaatgctctactttatctgcttcctgtgacttagagaagtttcgtgccttcactttgtttgttaataaattgggaatggtaatgtttatctggtaatattatgagcgctgataaaataattcatatgatacccttagccctgtgcctggcctctgctgagcttttagtaagcatgagctgtgtgct

SEQ ID NO: 17507 - DNA, 1176 bp, Mus musculus
tgtgtgtatcaggtagtggtagccggggttagcaccagggacaaaaatacgggactctgggtacataattactcaatacaaagataggaagaactggctttccttagtctttccgtaactagaagctggttgagagattccggatgtgagaaatgcatgggaagttcagtcaactacagctaaaatgtcaaagtgcacgcttgaaggcagcgtagacctagagtaactgcttgtggctgtaagatttaattcttaattcccatatgttttactatgtgttaattattataaatttaggaatatgtatatttctaaatatataattaagtataattatatatgatatatactatataattttatttatttagatagacagacagatgataggtaggtagatagatagatagatagatagtgtgtgctataccgaggctgcatctataatacttatgaaccttccctacccaggttgcagctgtgaggcagctggaagagagcaaaaccaagatagaaaatcttttgaactggctgtcaaatgttgaggaagactccgaaggggtgtggacgaagcacacacaacccatggagcagaacggaacctatttgcatgaaggtgatagcaagttaggagctggcgaagaggatgaagtcaatggtaacctgctggagacagatgctgaagggcacagtgaggccacgaaggggaatctgaaccagcagtatgagaaagtcaaggtgagctatttaaacggtgaagccggtgaagccatcagattccgtgtggaggcatgggaaagagttcgactgctttattatacaagactatacaaagactttccctatcccagcgttacgccaaatataaactaccaactatgttcttagcaaataaaaacagtaagaagtaagtcattaggttcagcttttgtgcagagctgaagccctgttttagaaacaaaagagggctggagagccagctcagtggtttaagcaagcttgctgctttcgaagaggacccaagtgcactctcaagtgcatcacgatgtggctcacagctgcctgtaactcaggctggcctccaaggtcacccagaatagacatatatgcatacatttttaaaaaagaaagaaatgaagggggctgatcattgagctctccagagcaggggtcatg

SEQ ID NO: 17508 - DNA, 1163 bp, Mus musculus
gtgaacttgtaagtaagtcctgaccatagcttttagttaccatcccgtttccctggtacatttgcatcttcttacttctgtgcattggaggtctctctctgattatgacagaagctgaccatgaccgtcatgtgacggaattgtctctgagactgtcactccccacccctggcagttatcaataagtgttgacagatcaggctgagacacggtagtgactgcagtgacccaccatttagacctttctttcatctctctggggcactccaaatgtgtgtgcatctaaaaatctttaccgatgcagatcacaggcctgcgaatttttttttaactattttattatccacccaattcctgtctttatatataaacgttatgcctgacctaattattcattggaaatatgtcatctaggctttttttctgtggagactgaatttgttcattgtaaagtgcatttgaaaaaagaactgggcaagtagaactctgtgcttcctgtccccctctctgtgtggagcagatgacattgtcgggagatacgatgatctgtccaagtgtgtgaacgaacggaatgaaaagctccagatcactctgacccgctccctgagtgtgcaggacgctttggatgagatgctggactggatgggaagtgtggaaagctccctggtcaagccaggtcaagtgccactaaactccacagcgctccaggatctcatcagtaaagacaccgtgagtgacctttgctaaaggggggacagttctgcttgcacttgagagcaagttgttcatcttcaggaataggtagtcttagagacagagggcagcttctgaatgcacttgagagcaagttgttcatcttcaggaataggtagtcttagagacttagggcagcttctgaatgcacttgagagcaagttgttcatcttcaggaataggtggtcttagagacttagggcagcttctgaatgcacttgagagcaagttgttcatcttcaggaataggtggtcttagagacttagggcagcttctgaatgcacttgagagcaagttgttcatcttcaggaataggtggtcttagagacagagggcagcttctgaatgcagcagaggagccagcagtgcttggacaaatgaatatgtaaattttttgacagtgcctgga

SEQ ID NO: 17509 - DNA, 1159 bp, Mus musculus
tgtttatcactgcttcggccagctgctcatggggttcatcagatcaatcttgctgttgccaagccttttaaaaattaagaacatggctaatccccaggctgccttagatcccaagggattgccgggtggcgataagcccctgcccttttcaacctgccagctatccagctgttctccaaactcccatgaagagctttgggattggcttcctcaagagaaaaaccacacatgtcactcatttccaactgttaaccatttcagtcatgggttgtccaagcttgcggtgctgtgaagaatcaaaactcggcggctttatttgtagtcgtcattaggaaacatatgccgcaattgctgtatttcagatgctggagcaggatattacgggtcgtcaaagcagcataaatgccatgaacgaaaaggtgaagacatttatagagacgacagacccgtccacagcctcctccctgcaagcgaaaatgaaggatctgtctgctcgcttttccgaagcaagtcagaaacacaaggaaaagctagccaagatggtggagctaaaggccaaagtagagcagtttgagaagctctcagacaagctccagacgtttctagagacacagagccaggcgctcaccgaggtggccatgccaggaaaggatgttccggagctgtctcagcatatgcaggtgtgtattcctcagtggttacaatgccaagtgcgtgtggactggttaagacaagctcatgcgttttatcaacagtcttagctactgttatttgtctctctgtgaatcatttccctgctgagtagaaacaaaccatttaccacatgtatcatagctgttacaaccatccttgaacatgctaaatccacagagataatgaaagcacagagtgttaagtccctgcatcctgctgtacattcgcagtctgtgaagtgccaggtagtagatgcctgagctcttctccttgcatgcagaacatgctggtgggtttgtggttctaagatctggcaatgtttatactgactgatgtcattgctttgcaggaatcaactgctaaattcttagaacacaggaaagatctcgaagctttgcacagcctcctgaaagagatatccagccatggcttaccaggggacaaagctctggtgtttgagaaaact

SEQ ID NO: 17510 - DNA, 1114 bp, Mus musculus
agtaaccctgtctggcgagtgattaatggagtttgatgttttagagggcagtagttttgttgagatcttaaactcgagttgaaatggtcaccatgtccatgaatatgttgatatacctgtccatctgagataaatgaacctttggtgtttcactttgggacttggttttatttccttcctgttcatttgctgtttggtacccaagaaatctgttatgtttaagcttacaattccatcatgctacctcttacgttttacagttacacaatgctcctgagttgtttgttattaacttgcagtatgacctcttctttctatcctaaaaagtctgtggttcatcgtagcaggcttaacagtgtcaaaatagaagaaaacgctgtgtacaatcagtctaatgctatcgctcctctccaaaagcctcagcatgcattcgtgtacttttcttcctgctcgtaggtttaacatctattaagaaggacatgactgacataagccacagttacgaagacctgggcctcttactcaaggataaaatagttgaactgaacactaagctctccaaattgcaaaaggctcaggaagagtccagtgcaatgatgcagtggttagagaagatgaacaagacggccagcaggtggcgccagacacctacacctgcagacactgagtctgtgaagttgcaggtggagcagaacaaggtaggctgggtacagggcaggaaggcgcactgagtggacttagccagagcagccctgggggccatgagctcggttctgttttctccctagaccttcatcaaataatgactgttttgttaaaatcagtcacattggggcaacaaattgtcacttttccagccctctgacattataaaaaggaataaactgtagggtatgagtaactttgccgtctttaaatcagcttaaatctgcgatattaagtaatcaacttttgggaaagatttagttatggactaaatgtatcaagtgtctggcctgtctactataaaacgggacggctaataccgtcctctttaacagcatttctgtactgccaagattaggaaagtagtttctcaccaccatgacaaaaatttgggcaaattaccaacccg

SEQ ID NO: 17511 - DNA, 1232 bp, Mus musculus
aatgtctgtttgctggggctggagagttggcccagtggttaagagcactggctgctcttccagaggacctggttcaattcccaacaatcacatggtgactcaaaaccatctgtaatgagatctgatgacttcttccggtgtgtctgaagagagcaacagtgtgctcatttacagtgaatgaatgaatgaatttatgttttctgtaattcattattcaaccctttgtttattttccacggttaacctagattctgctgcaagagttcgacacccggaaacctcagtatgaacagctcacagcggctggccagggcattctgagcaggcctggggaagacccttctttacatgggattgtgaacgagcaactggaagctgtgacccagaagtgggacaacctaacaggacaactgagggacagatgcgactggattgaccaggctatcgtcaaaagcacacagtaccagagcctgctgagaagtctctcgggtaccctgactgagctggatgacaagctcagcagcggcctcacctcaggcgcactgccagatgccgtgaaccaacaactggaggcagcccagaggctgaagcaggaaatcgagcagcaggcaccgaagatcaaggaggcccaggaggtctgtgaggacctgtcggcactggtcaaagaggagtacttgaaagcagaactgagcagacaactagaaggcatcttaaagtcgtttaaggatattgagcaaaagacaggttggcctctctttttacatacctatttcctggtcagaagtcagcgccccgtcctgctgtttccgagctcttggtgataatttgtgactgcacagagcacagaaagcagttctgtggcagtctagacggtctacacagatgagacagagatgctctgcacatggtccatacagggcaaatgctttaactctgttcccagctgtttttttttcttttcaaatgcgaaaacacctttgctgtgttacattgtctttttttcgtcagaaaaacagacacatagttattttaaaggctttctgtcctttcctcctactattgctttgtatgatgtgtcacagaaaggttttgtagagaaacgtgtagatatctgtgtccctctctcacatgtagtgataattctgtgacaaacgggccggcactttttaaatgcaaagggatggatgaagggaattgtggaggaaggacagggctcgctggtctgttctgtt

SEQ ID NO: 17512 - DNA, 1990 bp, Mus musculus
ccacctcttgggagctaggatcaaaggcatgccccaccaccttccagctgcttattttaatttttactgttttactatttttattttagagagagaaagagaagaactcgagttatatgggtagaaatgtgaagaggatctggcaggagttgggggaggggaaaatataattccagtgtatttatgattaaaagaagaagtgagtgggtgattgatagtccagagctgtactagtattgactggtcattctgatgtagagaagacagtctgagaacaggcctggtatgttgtgtccacaccttgtaccttcatctttacctgtttccatggccctcatagctgtcttcttgccccagctccctttaatggtatttatgtctcctttttccctctgtcaatagctcaagtttgcttacagttcttttagtcagtgctaaaggtctgctttaggataatgtataccaccttctggaggtttttgttgttgttgttgttttaatagataatgttaaaaatcttaatacacttttggtctcactttcagagaatcatgttcagcacctccagtcagcctgtgcgagctcacaccagtttcagcaaatgtctaaggatttccaagcatggcttgacgccaagaaagaagagcagagggactctcccccgatttccgcaaagctggatgtcttggagtcgttacttaactcgcagaaagactttggcaaaactttcactgagcagtctaacatttacgagaaaaccatttcagaaggcgaaaacctgttattgaagacacagggggcagagaaggcagctctacagttgcagctgaacaccatgaaaacagactgggaccgatttagaaaacaggtgaaagaaagggaagagaaattgaaagactcgttggaaaaagccctcaagtacagagagcaagtggagactctgcggccgtggatagacagatgtcagcacagcctggacggcgtgacgttctccctggatcccactgaatcagagagttccatcgccgagttaaagtccctgcagaaggaaatggaccaccactttggtatgctggaactactgaacaacacagccaatagcctgctcagcgtctgcgaggtagataaagaagcggtcacggaggagaatcagtcattgatggaaaaggtaaacagggtcactgagcagctccaaagtaagacagtctccctggagaacatggcccagaagtttaaagaatttcaggaagtctccagagacacccaaaggcagcttcaggatacaaaagaacagctagaggtccatcactccctaggaccccaggcgtacagtaacaagcacctgtccgtgctgcaggctcaacagaagtcactgcagaccctgaaacagcaggtagacgaggcaaaaaggcttgctcaggacctcgtggtagaagccgcagactcaaagggaacctctgatgtgttgttgcaagcggagacgttagctgaagagcacagcgaactgagccaacaggtggacgagaagtgttctttcttagaaaccaagctccagggtctcggccacttccagaataccatccgagagatgttctctcagtttacagagtgtgatgatgagctggacggcatggccccggtggggagagatgcagaaaccctgagaaagcaaaaggcgtgcatgcagacctttttgaagaaactggaagccctcatggcgagcaacgacagcgccaacagaacctgcaagatgatgctggccaccgaggagacctctcctgacctcatcggagtcaagagggacttagaagccttgagcaagcagtgcaacaagctgctggaccgggcgaaaaccagggaggagcaggtggatggagccaccgagaagctggaagagttccaccgtaagctggaggagttctccactctgctccagaaggctgaagaacacgaagagtcccagggccccgtaggtacagaaaccgagaca

SEQ ID NO: 17513 - DNA, 1182 bp, Mus musculus
tacagtgaccttatcagtaggggttgtctgttgtcaaagccacatctcagtgtctgacacagcagttactcagccaaacgctctttctgtttattctttggaggcttttttaaaaaatgacatttatttatttatttatttatttatttatttatttatttatgtgccctgcgtgcgccttgtcgtgcatgtggaggtcaaaggacaagttgcaggagctatttctccccttccacgttgcaggtcatgagggttggtggcaagccaccttgacctaaggcactctctcactgcccccaaatgaattatttttaaaaccccactcctcatttttcccatgtctatccatgcgtatgtatgtatgtatgtatgtatgcatgcatgcatgagttctatcttatatttatttaaacattcttctgccttttaaaaacacggcatgttttgtctgaagcttctgcaaagacttctggaagaccggaagtctacggtggaggtgatcaaaagagaaggagagaaaatcgctgcttcggcagagcctgcggacagagtgaagctcacgaggcagctgagcctcttggacagtagatgggaagcgctcctgagcagagctgaagcaaggtacctagcggtgacatgctcagggctgtaggctgggataacgcttgcctttacgtccatgtcctccgtgtctgttcgtcacggggctgtggtgcaccagtccccgttcttctgatgtcctgtggccaccagccgcatccctgctcattaagaaagcattttccttcactggtaattcattcatttgtgcgagacacagtcattcgctacttaccctgcgtcaggtacagagctaggtgttagcttacgaggatgagctacaccggtgacctctgtccccagacaggtgcagactaacagactcaaagccgatgggaaatgaggacaagagtgatgctttgaagtaaagatgcagggtatgatgggaacacataacaggaagaagtttggagacagggaagcaatggccatgttttaagggaggagttggttagaaaggagtgaagcagctggcggtcctctccctctgggaaggagggagggctagactgtggcttttccaggctcttgctctcagttctgttattacagagtcacagccagtgtagcacctcctgtctg

SEQ ID NO: 17514 - DNA, 2206 bp, Mus musculus
ctgcaaaggaagtagaggtagataaagagccccggaagtgtgagtaatgatgagtcagcacaggaaggttaaatatcctcctgacgtaacctccttgtgagccatgacatcagcggcccgggtgctggcaggtttagccctcatcgttcttcaaagacagaaagctttgtacgggagataaaacgtctgcgcacaactgaagtttctgtaggcctttctattggagtttctcttttcagcaatcctggggaagaagtgaggatatcttttgggtcagattatctttagaaaagtgtcccctcatccccccaaagcataccatcagtagtgtctgaagagacctctgcccctcactttctcctcttccacaagaaataatacatcttcttggaattttaggtgatgaagtcttaatcattcaagataagttggaagccattaaagccaggtacaaagacatcaccaagttgagtgccgatgtagcgaagaccctagaacatgctctgcagctcgccggccagctgcagtccatgcacaaggagctgtgtaactggctggacaaggtggaggtggagctgctgtcctacgagactcagggcctgaaaggagaagctgccagtcaagtgcaagagagacagaaagtaggcacttgtgcatctcccacacgtgtgtcacctacaggggttgtatctgtgaggattccaagtacagtggccggtgggggggcggggcctgctggaaaccagctgtaaggtgacccttcagacacatgtgtcacctaagggggtgatctgtgaggattccaaatgcagtggccatggggggcggggtctggtggaagccagcagtaaggtgaccattcacacagggcatactgttccctttaagacaggtgactagaatgtagtttcctgcccaaggtagaataacaaagaagggaaaggggaaaaggaagatgaccactgtatcagaggcaggtaatttggctggaaaaacatttctgtcagagataggtagtgtggggactttcctggcaatacctaaaaagcacactgcctctcagagcattcatcccaacgtgtcggccgctgatcccatgagttggggaggctgtagtctctcacaacaccagcatgtcctcaccgcaggccgtgttcctgttggcgtgtgacaggccttgttgcttgacttctgttagccgatgacttaacatgttagctggtttgagtttgtttctccaaagagcaaatatttattttctatttcaaagagaaactcctgccatgttgacaaatgaactgtctcctaaacttctctggaaacacttttgatttttttttttcaaaacatcttttaataatggacattcgtttagctcagatgtaactaaccaggccaagcacagccttgtcaaccagcaaagaacccccaccccctccccctctcccaccctgagaacagagcagagggagaccctgccccggcgtttacccatgcgtttatatgttctcaaggaactgaaaaacgaagtcaggagcaacaaagccttagtggattctctcaatgaagtgagcagtgccttgttggaactggtgccctggagggccagggaagggctcgagaagacgattgccgaggacaatgaacgctaccgactggtgagcgacacaatcacgcagaaagtggaggagatcgacgctgccattctgaggtctcagcaggtaggaccggcgccttgttgccgaggtgcactcaagctgcccagggtctttacctgaacaaacgtgtcttgctgctggattcccactccagttgctgtgcttctgaaacgaacgtgggggtttcagtagactttcgccgggctatgtctgagcaccagggctctactaatctacacacggttagcaggcacctgcacccattacgtcacaggcagcacctgccacacagggaaagcctcgttttccaaacagaatgctctgtgtctacgtacatgcgtgccgctcacactagtcttatgcctagactgatgtatctgtgagcagtctgaattcgtatacaggttggtatctactgtcccatggtcatacttctgtatgcaaagagaaagtctctgtttttaaaaaggagttttcttggttgatgtagagttttttccaaagatgactaaagggggaaaaaattatagtttctgacctgcctgtgg

SEQ ID NO: 17515 - DNA, 1272 bp, Mus musculus
attctatgagttgttgttttgttttgttttcctcaattgaggaaatatataactcaaggaatccctttggacctaatctaaccacttaatcaaaactatgagttttacatgcactcatactttttaggatctcaaagtggttgtctgaaatgaataatcagtttgggcagccaaatgtgcagcttatcaaaagaaaaaaataagtttaattgtgataaaattaaatataggttaggattcatattgctacaaaggagcagagactgcttcttagtgaaaacattgagctattgatgggaaactcacgtgttctccccccaagggtgtctgtcacacggagtgcacagaggtcatggcttgaggcatggtttcatgcacagccgaatgtaaccttttggatggaaatgttgggagaggatcttcagcttttagtcagggggaagttttacatgcgaggtgacaacagcccatcgtttctactcgcagtttcatgacaagatcgaccagatccttgagagcctggaacgcattgcggagcgtctgcggcagccgccatccatctccgccgaggtggagaagatcaaggagcagattggtgaaaataagagcgtgtccgtggacatggagaagctgcagccgctatacgagactctgaggcagaggggagaggagatgatcgccagatccgagggcactgaaaaagacgtatctgccagaggtgacgagatgggctcagcctgcttgtttgtttgcttgttcagtttggtcttttgttttgtttttgagacggggccccaccctctctcatgtgtgtgtgtgtgtgtgtgtgtgtattacacacacatagagagagacatatagacatatagatatagtgttatataatatatatgtatatgtaatctccctggctagcctggagctagccatgtagaccaggctagcctcaaacttagaaaccaatctgcccctccctcccaagtgctgggattgcatgcacatcactacacctggcctcaggcttacttttaaaacatctctagattcgtatgctgttcactgacaggctggctgcataagaggaacaccaggtctttgacatgttaacactgggatgtgttgcttcccaaaagtcctgtggtgccttcctcggtttgcaaaatctactggttggaaacaaaatatggtcatgtaaagactgtgttctctgagcctcttaggctaataaggacaaagctggggatacagtcttggtatcttatctagtatgcc

SEQ ID NO: 17516 - DNA, 2243 bp, Mus musculus
agtggcaataagaccattccaggaacaaatcagaactacaaatccttctgtgactgaacaagcaatttcattgttggaggacataagaaaacacatcttgggttagttactttggggttaaggccagcctttgtgaacttaaagcttggtaaatttgagtctactctgagctcatgtagctttacgcatctactcttatgagaaggtgtctcggcacagctggagtggacccagagatcctgcgttgtgtggtggtccagtctgtatttaacaggttgagtaactgcttgctgtatgagctgaagttctgcttttgcttacgtgagggtaaccggtgtcttcactgacgctgttttgctgtgtagctgtacaggataagttggaccaaatggttttcatctggggaagcatccacacgctggtcgaagaacgggaagccaaactgctggatgtgatggagctagcggagaaattctggtgcgatcacatgtcgctggtcgttaccatcaaagacactcaagatttcatccgggacctggaggatcccggaatcgacccctcggtcgtaaagcagcagcaggaagctgcagaggtaagtaacagacctgggtgaactacggaagagaagagcaaagttcagcgagacaacccccccagtcctgttaaaatccgcatctagttctgaacgcagaatgcttagtgagtaccaaggtaccgtggactcacaggtgctgcttccagattgtccctaagatcatcgctctgcgcccaccctgctcgtgtctgtgtcagatagaagacagacagaccccgtccactgggtaaagcctgactttgcagggcaggatatgcagcttcgtgcacacgagccggtggccatgctgccgcaggcgttcctctgtcccttttccctccgcgctcttccatagccttgctcctcgaagcagtgatcatccctgccgcccctgtgataagcctcaaggtttgactggattattacccatgctctatactttctttctcgtgtacttggctgacgtgctttcaaggccgtagggcctggaagaagactaggtgaatgtctcctcctcagatgtttggtctggggctttgcccgtgcctgttaaatactcactgcctagtgagtgtgttcaacagtgaccatgaaaagcaaggtaggattgacagatcctacctagggtaatacatcaaagcgagcttatcatgggtttcccaacagatacgttgctttgcataaaatctttgtgctcttattttactggggtctctttggaacacataacaagcaaagtatttgagaaaagcaaaatgtcctttggtgcttgacagtatttgggttattttttaaattgctctggtattttgccacaaagttattttcgtctttgcactaaagagttggcgttagagaatattattttctataaaatatttttgttgttggtggtggtgtttttgtgttccaagaacggcaatgtgaggagcttgggaagtaaaaagaaaacaaaaccctgataactgacctcacgtgggaacccccacgggcggccctgcgcagccccgtgtcttggctttggtgttctgagcctctgctttggattccaggcaatcagagaggagattgacggcctgcaggaggagctggacatggtcatcacgctaggctcagagctcatcgctgcatgtggggagcctgacaaacccattgtcaagaagagcattgacgaggtacccgaggctcgtttgtgacttagctgagcgacacccatttttaccagaagtcaaaagtacaaacttgacactgaaaggactttaacatttgtttcgtagctaaattcagcatgggattctctaaataaagcttggaaggaccgggtggacagactggaagaggccatgcaagctgccgttcagtaccaggacggattgcaggtgaggtggccgccgtgtcctctggtctcagccggaaacaagaatcactctcattgatgtccggatggctgacactctggtcccagcccaaaaactgtgactatgtacacagctacagacaaatctattcccatagtcacaactactctgactcagcctttctagaagatatttcttaccctccagtcacacggatttatacatacgtttaaccatggattagcccacgtagccaatacatctactttgaaaagaagtggtctaatgttttttttaagcgaaagtaaata

SEQ ID NO: 17517 - DNA, 1143 bp, Mus musculus
gcccaccagtccacggtagaagccgtcaacaaagcaggaaatgatctcatcgagtcgagtgaaggcgaagaagcaagcaacctccagtacaagctcagaattctcaatcagcgctggcaggatattttggaaaagacagatcaaagaaagcagcagctggacagcgccttgcgccaggtgactagagaggcggagagagtccccaagtgatgcgggtgtgccttgctagcccttgtgcaggtccaatggtgatgctttaaagagaggagtaaaaataatcgggataaagagcagagctgataaggaggcggagctccagttcttagcctaatagcctaatacccttatgcccgagcttcctcggcgtgctcaggtagtgagcacagctcctggcacctggcattctgatgagatgcagagacggcttagcaggctggggccattttgaccttgctggagagtgatagcatttgtgacacaaacttaaaaaccacctgtcactgcaggccaaagggttccacggtgaaatcgaagatttgcaacagtggctgacggacacagagcgtcatctcttggcatctaaacctctgggaggtctcccagagacagccaaggagcagcttaacgcacatatggtacgtatggtattttctacacccctcgccctggtcttacatagataataatggaagatgatatagttaaaaaattaagttttgtggcaaaaatcactatgtgtacatgctagaaacagcaccatttagcaattaaatttttcaagtaagaatctgtctcagaggctaaaaaaagttttaaagaagtttagcagttctgtgtctgtctgtctgtctctctcacatacacacactctctttctctctctctctctctctctctctctctctctcacacacacacacacacacacaccaagcattgtatcagttataaactggtatcccctgaagtataaagacacttctctaaaatactctgatagtttaatatgattataattaagacagtactcatgagcgagtaattcatgtagtcctgtggtttgggtttaccgttcacagctaggccaggcccatttgcttgaagagcaaagtaagtagtcttgccaacgactgcgtgacctca

SEQ ID NO: 17518 - DNA, 1266 bp, Mus musculus
tggccccagcgggaacattgtcggctagctgaaacacagcaagcaaactgtgagtaccacacactgagtcctcttcctttacagacaaagttggaggaggccctgcacttggccatgaacttccacaactccctccaggacttcatcaactggcttacccaggctgagcaaactctgaacgtggcttctcggccaagtcttatcttggacaccatcttgtttcaaattgatgagcacaaggtacgtcagaacgctttggaaagcctgtgccttcatgttggaagcatcggtttagtaatatggaaactttctttacagtgtatttgcttttattccttatgcagtgtcttcattcccagctgcaccccaccccaattcctcctggatttacccctcaccttacccacccgagacctttcctgtgtcctttaacatgagcgttgccgatggatatgtgtacatttttaaagtcagtccacccctacacacacacacacacacacacacacacacacacacgtttctaattgcattctcttctgttggagaaaggtctttgcgaacgaagtgaattctcaccgcgagcagataatagagttggacaagactggaacccacctgaagtatttcagtcagaaacaagatgtcgtgctcatcaagaacctgctcatcagcgtgcagagtcggtgggaaaaggtggtgcagcgcctggtagagagagggcgatccctggacgaagccaggaagagggccaagcaggtaacaaactcggctgcggttccccagccctggcagccagtgagctggagctgtggagttatgcgatcacaaggttctcactgccggatcggcacgataaggagccatggtgttctcttcctgaaaggcctgtggcctgcctttgcacttctctgtcttggcagccaagtgagggcacggggactcatcttaaaaagctataaatagcccaacttcagagatgaccagggaggcccattaagaccttacttgttttgctgtatatttatttaattgttttttccccttgccgtttcaactcctgttctcctgctcagacggggtcacgtgttggagttatattgctagctctggaagccagacttctttcatgtcagagccgaaggccaggcttgcatcctcccgagtgcttcctgagggacctaactcttcatccatgtccctctcttccccggctgcttgttcgcagccttcatttcttccccaagattccgctcttggtgtgat

SEQ ID NO: 17519 - DNA, 1174 bp, Mus musculus
cagctcttagattctttctgccctctctcacacaatttttgaggacttgaagagggtcacaggcagcctgagtgccacagcacctgtctgccaggcaacgagtgcccactggaacagcagtggcgtgtgaccctaacaggagtaaccagatgagttgagatttgatctgaggtctgttatgggggatccaggcaaagatccagggctggggcgggtcatagacacaaaaagatgagcatgctacttttgtttcattaaaggggcatatccttgatatttatgcttataccaaaggctgatggttccctcagccttgggccaagaagcttctgtttgcagtgagtgacagttaatcgtagctggtcctgatgctgagaacaaatgactgagtacccagcctcgcacaagatcccgctttggatgctgttcaccatttagcaaacaaatagtcccaagcagaaactcagctctttccttgttaaacacgtaggagtttcagaaatcactcggaggcaaacattctgtctacgataccaccaaccgaactggacgttctctgaaggagaaaacctccctggcagatgacaacctgaagctggacaacatgctgagtgaacttagggacaaatgggacaccatctgtggaaagtctgtggaaaggtaggatgtccgcgcattggtgtctctgcagacctgcctcaggtgttcagtagggcggtgtttgcagacatagctcgtgggcctcagaaacttgtttgttttgacgaagtctacttgcttgcttatagatggtctcatactgtagtttagtggcctcttaactcactgtgtagccaaggctagccctgatcctcctctctcagcatcttgagtgccaggattacggggcattggccaccatgcccaggtcccagctctgccatttggctcctttaatttccatgtaactagtagaacagttatgaaaatataaatgagagcctcatcatttctctttctcacccgcattaggaacatggtattgaatatgaaataaaatagactccctaacgtggcataaaggacagcactgatctgacctgcgtcagcattccttcaaacttccaatctccctcctttcccgctggatttttgtgaggccccaaggtttcacattgaaactatcaagtattta

SEQ ID NO: 17520 - DNA, 1180 bp, Mus musculus
agaaatgcgatttttttttttttaaataaaagcatgcatggtataccgttttatagtacgggattctgtggcatcatgctggtgatgaaaactttcatatttgggaaatttttaatcttgaagtatttcggattttcagcctgtatcaagatgcactagaattcagctctaggaagcttcaaacatccaagtagataaatcttttaaaataaaactagcaaatttatttagactcttgaaggaccgggtaaggggattttgctgtaactgataccaggcgtgtatttaaaggcataaaagagaaaagtgtgttctaaggagatgagggaactcaggaggccactcacgcttcctcgttggtactacctaccagccatcactggggaacattagagagctgactctcacacttcctcttcagtacctccagccaccatcgggaccgttagaaggctaattcatctcctttttttccccccagacaaaacaaattggaggaagctctgttattttctggacagttcacagatgccctgcaggccctcattgattggctgtatcgagttgagccccagctggcagaagaccagcctgtccacggggacattgacttggtgatgaacctgatcgataatcacaaggtatagccacccagaacgtccttttattctactgtgtagttgtgcatctgtgtattgagatgaaggcaggcgcttctcgtagccttctaacctggaagagtgagttagaccgcatcaccgtcttcccactgatatgtgatcgagcagattccagaaggcatcttttaaggcatgggagaaaaaccacttaatcgactgaatgttttccttttaattacctgatgtacatctattttagacttgaactgtaatttaattttgtccttgtgggctctccattcagttatgtgataacatttaaaagcattcatttagagacttgaaaggcggacaccctctggatgtacagatcccccaaggggtcacgagtagatcctcttcttgatctagagtaatgcgtgcgctaacagcctgtgctgagagatttatttagtccaagaaagtggatttccttttgatgtcctaatgtgtcttgtaaattgagggtgcatttgaggtttccagctggtagtgagtatgacatctgcatttttaaattc

SEQ ID NO: 17521 - DNA, 1101 bp, Mus musculus
ctatacaaagaactttggaaagtcctctggaactgttgactagtcctgtcacgggtgactatgtagatatcttccattctgtgtgtattgatagtacgtatgttgtctgtctgtagtcacctaccattgaaacacagtcagtctgaaacctgtcacctgttcgccacactctggctggattgttctggataaactccctttgtgggatgatttgtgtataagcttgagtaattctattgtagacagaacactcgttgtctgaatatctagtcttatacacagacacttagattgatgatgaagagccctcggctcaatgccacttgtaagagtggcctgaggaagccattctcttaaatggcacattactcttaaatctgcctaaattgagaagacaaggtcagaggtcccaaaaggtttccaatgagatgactctaaactgtgaagtcacgggttggttcttaaggtgcttcggggaatggcttattatagagaaaaggaccacatgactctcttagattcgttggtctttccggacccagtaacgtgcaccaggcttgttcagtcctggctctgtagcttgtctctcagaatggtaggtaatcagccacactgactgtgagggtctggtattctctactgcatgactcaaaagaaagggaatttaatgtactgtgtgtgtgtctgtgtgtgtgtctgtctgtcaggggtgtgtgtctgtctatctgtcaagggtatgtgtgtgtgtcaggggtgtgtgtaattgaaattgagaaggccgatcactattatttaaatctaatatacttatatatttatattgtaatcttatatatttcattttttaatcctaaattaaatattactgaatataaacaaaatctattcaaaacagtgttaagtccttaaagaggaaccatgagctagactcagtcaaaagtatagtcattcagatctgtggtcctcagatgtatgtatgtggtgtcttatatacatccatctctcatgacaacgcacttggctatttaggttctgtactgaaaagtaacctgtgatgaaggtcagtatggtttctccaggtcttccagaaagagctgggga

SEQ ID NO: 17522 - DNA, 1129 bp, Mus musculus
catgggttttgtcccacctttccactgtgtctggggaataatgcctcgctgaagaatgttccaggagtgggggggccttgtgtgcttgtgggagtgaatggaagaactcgatgggaattgagctcctgtttaagatctttagcactttagattctgccgcttctgaaagctgcctggagtaggcatgctttagagaaggtatacttgaacatgagaaagcccaagggataaacaggagtaaacctggatgctaggtacatggctaacattttcctgaggacagacatcctcgaaaggggactcggtgcttcctcaggctggatctgagagccactggccagatctagactagcagaaagcttcctaggtctagctcagaaggatcctagttgactttttaaatgggtgtggtttacattaatgaaactaagttgcaagaacctgagcgagctgtgtgtccgtgcaacaggtgctggcctgggcgaagcagcaccagcagaggttagcaggggcgctggctgggctcatcgccaagcaggagctgctggagactctgctggcatggctacagtgggcggaaaccacactgaccgagaaagataaggaagttatcccccaggagatcgaagaggtgaaaaccctcattgcagaacaccaggtaaagaaactcaatccatcccctcgggtgtctcctttctcttgttgctaggcttctccaacccgttcccagactagtgagcctcttggcccgcagctgcattacagctggtcttattttaacttgactctccctctgggcggtctgatctcattgctgtggccctggcctgcacttacttccttgtttcctatctgcttttcctctgtcttctcagatgaacaaccatgaatattccaaatgcagcctacttagaaagggggtgccttctcgtcctcagagtgactactcaccctgagcaccccacctgttttaaatgctgaaatgatggctttctatgtgccctgattcatagaatgtttactggagctggagatatggctcaaaggttaagaacacttaggaactaaattcagttcctcaaaaccacatgtaaattcagtttcgggaattgcagctccctcttctgac

SEQ ID NO: 17523 - DNA, 2011 bp, Mus musculus
acagcagtagtgtccgcatgataagccagaatttaactttggtatatcaatctaggtattgttctttaacgtctccttagaatgctgcctgcccttgcatgataatgaaaagccgcaagaccaaggtattttcatgctagcacagagcacaagaagcacaggttgatgtaaaagctggtattgcagatgagtgatacaggttcctcacctctgtcctctgtcctctctctccagagtccaggaagactcccagccgcccagggagcagagccggaagcaaagccggaagcagagccagcagccgccgaggcagcgacgcgtccgactttgacatttcagaaatccagtctgtgtgctcagacgtggagaccgtcccacagacacacagacctgtgccccgagcaggttctcggccatccacagccaagccttctaaaatccccacaccccagaggaggtcacctgccagcaaattagacaagtcttcgaagagatagtgcaattggctccaaccagcccttccccgagcatttactatttaagcgaatgatgtaaaatacgatgtagaaattactgtgaaatattgcaggaggcaagttttaaattctgcagatggccttatttgtgtatttgtctttttatttgatctgtatcacttttttggtcagattttctgggggtaaaagtcacatcatatgtgataaggaagaaagaacttaacatgaactgatgtttctgcactgtcgagtgtagaccatacactaaaagtcagttactgtacctacaggtaagtccacattctctctgacaaccacagcactacatagctgacattaagggatacctcatgacaccttttatggagattctgaacagctgacaaaccaagcagggaattgtatttttatttattttttatttttattttttgcgatgctctaactgtaaattagacagaagacaaaaggaaaaacacaacaagacgcagttcttcgagcagcctccaagagagaatcagagtcacaggaaaacgcctcaagcagccgccggtaccatggcgttcacacacctcccagtgtccttgtgcctctgcttcaggcgcagccagacgcgccctgggcatccgccgtctctaccatagggatgcggtgctccgtgcatccgtgtacacgtgcaaggttttgctctgcttgggtggacagcagcccctgtaccactgaactcattttgtaacagcaatttcgcttgcaaaaaaaaaaaaaaaaaaaaaaaaaaaaaaagctctgaaataaaacacatcccttaactacatcgctatggaattaattttttttccccagggaaaactggtgtatttttttatgaacagtatcaatttggagtgaccaaaagatacttgaaaaaaaaagtgggcttattttgatttctcatctggaataatcatgttctggtattatatctacttatatttaataaatatgcattttaatttattatgtatactcacatactagagaaagatattagtatgcatttaataaaacatattcacttgaacgtatggaatacttggttatttgaaatgagcttttctgtttgttttaaataaagggtaaataatagaaatggtaataatagatgatagtctgacaggaaaggctgggaggtgtgtaaggaggtagagctaatgggaagcacccattctataagtatttgagaaatcctagctggtatcaatgacatttaggctactacagtgctcctgtcctcaaataatcaagggagatgtcttagggttttactgctgtgaagagacaccttgaccaaggcaactcttataaggacaacatttaattggagctggcttacaggttcagaagttcagtccatcatcatcaaggcgggaacagggcagcatccaggcgggcatggtgcaggaggagctgagagttctacagcttcatctgaaggctgctagaagtctggcttccaggcaactaggatgaggatc

SEQ ID NO: 17524 - DNA, 1268 bp, Mus musculus
cgcaagggccccaccaagaccaaagagttaggatctgctgtagttcctcaagatcccttgaactggtttggaattttggttcctcacagtctgcggcaggcccaagccagcttccgggatggtgagttttaggactattgtactggctagggaggcctaacacccctgcagtcttaggggttgggggggcggcactccatggatcttaccatgatgacattcctcttctctcaccaggcctacagctggctgcagatatagccagtctccagactcgcatcaactggggtcagagtcagcttcgaggcctccagaaaaaactgaaggagttggaccctgggcctgcctgacctgcatccacattgggaggcactgagcatagctgccgtggatgctaccaccttacctcaggccttcttctttttataagcagcccctgtctcagctgatgccccacctagaaatgtccttagtctgcgcggtttctagcttttcgaggcatgaagttgagttatgaagtttgatgaagcaaagctgagcagtgtagagagcacctagttctaggccatggtctcagggcatgacagtgacgtgtgaataacctgcggcagccatctgggatagtgaagccctgcagaaatggtgacagagaagaaagggagtctagaaacataaggtagatcaggacaattccagtcaataaaagtacctcaggctgggcgtggcagcgcgtgcctgtagctccagcaactctagaggctgaggcaggaggatcacttaagccctgggaagtttatagacaagacagcacacacacacacacacaaatacacaaataccagaatagctagcaggaaatattacttctgttataaaaggaaaaataactcattcttccggggaatcagggtgaccttcctgattgcacttagcttatagaagtgagacccagctgctttgctgaaggtgcattctctcacctggaaactgtgtcttgcttcacgtttttttcctgagctatccagttgtgttgggaaggggaatgtaattgtttgtggggtgtaaatatttcttcctaatttgttaattttgcttatattggtttttctacttatgaattgtaaaaacagaaatttgtacagaaaaattgaataaagtaaaagctacagtaagtgtcacagagctctcattttattttcagtgtatgggggctttcccagtgtatgtctgtaccatgtggtgtcttctgcccttcggcgagaagaggc

SEQ ID NO: 17525 - DNA, 2011 bp, Mus musculus
catggtgtcatgaaaacctaacgatagtgagagaacagaagccatctggatgatgtgcaaggcccttgaggtccaataagatgaggaaggttaggccagtgctctgggacgggtgggcccacaactgcagctcatgaatccaattctcaacaaggcctctgggatcctcccatggctttgcgtgtggtgtgtgtgtgtgtataaatttcaaaatgcaagtaaaatcatgtgatctatgttttttgtttgttttgagacagggcttgtgtagccctggctatctagctgtcctggaactcactctgtagacctagctagttctgagctcagagatcggcctgtccctgcctcatgagtgctcagactaaaggcgtgcacctccacagcccagctctgtacatttcttatggctaccataagggattcttgtggagctgataatttaacagaaattggttcatggtgcgaggtgagggtgttcactccctaaggctgagtgtgttggggatgggggtgtgtttgctcttcggcttctgatggctgcagtaaccctttgtatcgcctcttgctaccatagcacttcactgtcggccttcatcttcagtgctgagtctgttgacctagtctcttgaatatttcttagaaggacctttgttactgtgcttactgcacatgtctaggtccatctcatttacaattctgaacttgtatcttcagagaccctttcaaatgcactcatatttacagattttaagaattaggatttttttcttgtaatctgtaagagttgcctgcatatatatctgccacctgatgaggccaggagaaggtgtagcatcccctgggtctggagttacagacagttgggagccatcatctggatcctggagattgaacctccatcttctgcgagagcacctcgtgttcttaacccaagcctgcctttgtaaatgagcttgctctctcttgcagctctacactctctgtcctgcctgtttagtgtcttaattatgatgtgatagaaaggtttcttttctggtcttgcccttttggagttctgagggcctcttggatctctttttgcacctcttcatctagagttgggaaatttaaaagtatctcctttctgaattcatttggcatgaaattcccctcgtatgcccataattttggcctttgcataatgccccaaaggtcttgcacgttttattcacacacacttacatgcatcattggccttgactgagtgatgcggttctgccttgctctgaagccccgcctcctctcctgtatgcaatcctctctattctggggcttcttcccactgagcttctacctgacctgcacttttcgctttctaccctcatctcagttcaggttttcctctctgtatgtctttatcaaattctactttcacatcttgaatggactttctgattccatgctgatgtttgtgttctcttggtgactatccatgtcctgtctgggttgatggattgctttggtttttttttttttttttaattgtgtgtctgaagtttatgtaagtcatcttcatcgggggccagtattgtggaattggtaatttttggagaagacagattgtcttggtgtttcctattattcctggtgttgtgttgagacctggtgttttaattattcctaaatctaggttgcctttctgcttttagtgggaatgctttcaatattcaggaaagaccagtaaggttgagttgacattttcttttagacttgttcagactctatccctgacctgcacaggaagtcggagagccactgtccatcaataaacccaccgtgaaagtagtgtcagttaactacgaaacaggcattccttaaatgccaactagtttgggggagtaaagggccacactgtaaagggccacactgtgctgtgctagtgtattggttactgagtggagagaaaaacaccacaacaggactggttattattgctaggtctcagttaaaacagaacccaaaagacgaa

SEQ ID NO: 17526 - DNA, 1203 bp, Mus musculus
attccactccctggctccaagcttcaacttttctcctcacaggagactcctgaagaaaacccagttccttggagattgccacttcagtagtctgatggaagggagggacacagagagcctgtttaaaacatctttctgccaggatgggtacaccctcagccatgactctttagctccttccaactgtgaccatgacctgagccccttgcaaacactgatctacttttggtctcttcaagcctgcctgtcacacttcatatgagtaaaatcatgggatagattatcttttgtgacttgctgctttggcctaccataatgtttctaaaccttgtagcttatgtcaagacttcatttcttattgcccaatagtctgctgtaggcatgagaccatatttatcagtcagttgatgaaaatgtttgcttttcagttatgcacatttgttctaagtatcatttaagtttctctttattttgtctttgtaatttatctatttaggaaatacgcttctctatagtttacagtctgtggtatagtttacacacactgctgtcgtttaacctgtgcgtgtatattgtatttcctttgaatttatatgtctggtggttctttttagacagggtctcatgtagttctgactgtcctggaatttgctgtggagaccagactggccttgaactacctcctgcctttacctcctaagtgctgagattaaaagcctgtgctaccatgcctgatctgattgttcactgctaaataaagtcccagaaaaaaagtgtgctgaggttgggttaatgtcagagggaagctacgggccagccatgctgaccgggttcatcattaagagcctctcgtgctgctagcaacatgtatgaacacttgttgacgtaaccttcctctaagggagtgtgaggcagatgcccaggtctgtctcagagaagattacagtctagggcagtggttctcaacctgtggctagtgaccccttgaatgaccctttttcaggggccatctaagatcattggaaagcacagatatttatattacaatcatagcagtagcaaaattacacctatgaagtagcaatgaaaataattctatagttgggggtcaccacagcatggggaactgtattaaagggttgcagtgttaggaaggttgagacccactgctcttagggaaaggccagcatgggtatttttttt

SEQ ID NO: 17527 - DNA, 1099 bp, Mus musculus
tcctctgtccagctgtgggaaggccaggatacctgacccgccacaagcatccatcattgcctgccagccggccccagcagcaagtgttggtgctagcagagcccaggcggaagccatctaacttctggcacagcatcagcagactggcgcctttccgcaagtgagccagcatccatcagacaacctgacagcactttgtggacccatcctttcctctctgaggcctataccatcaggccctctgcctgttttacaaactggaagtgaacaggcacagcgtcatgctgtatgaagtctgggccctgcctctggccccttccccatggctagtgtgtgagtaccagcctctgactatactctggacctgcgcagagcctccatcaatggtaagcctgcacgccacagctctaaacctctggccaggctgtgcacataggcgcatctgctctggacattctttggaaagctatcatctccattctcctgtttcctctgggtaggagaccaaaatctgtggccatgagccacctgccaaagcaggtgtgtgcccctctgctctttgtctgttcaggcccccagtgcacttgtaacctgagaggtcaggaaccaggaattatgcactaactctacccatacatagctgtccttatgcctcctggtccctgtagacactgctggctgccagataccctctttacttgtgacatgtgtaacgagaaaaccatacagtcaactgtgtccctggttccaggttagtgacagttccctgtagctggggtggctgcgcacacacccacccactcactccctgttcactatgattttggtcgtgttgtttctctaacactggagaattgttaatgacacagaaagattgccttaccctagttaagtgtgagaagccataaggactggactctggcccctcatggccggcctcctcgtgaggcacatggccgggcctgcacatggtgcagagcctacaggactcagaagcatggagtcactcttgcgctgcatcttctctaatccaaaagacacatttaatttcataaagaaacgaatgaaaagtgacctggctgctggtcagctggtggtg

SEQ ID NO: 17528 - DNA, 2879 bp, Mus musculus
tgagctttgtatcttttgtcagccccattgaattcctggggctttggttggaaggggtgcttgtctctggcagctaagtcagggcttccatgttggtgtagaggttgcctcagtagcagtcaacttggctagaggctgggtcacctgaatatggaaccttcggtgaccttatttttatagtaatgctctccatagtttttttttaagcattttattttttgagaagtttaggaaggttgctgcatggatcagtgtgaacagaagattcctcattccttatgtctatgaacatagaaagtttatggatgattatggttaattgcctcatgagcacttaggtgtgtgtgtgtgtgtatgtgtgcgtgcgtgcgtgcgtgtgtgtgtgtgtgcttggatgtgcgcgtgcatggggagaggggtagcaccagcaagcacaccctgcacagagatagacacgcttgctggagcacacagcctgcacccgtacttccatgttgggatcccgtccctgtgctgagtgacttgcagggttgggatttccaagttttctctggactcatcagacagaaggggatttctttagaacaaatgtacctgtgattttcacgtgtttgaaaaagtccccttatccatccccaactaaacatggctatctccctgcctggaaagggtagagttgtttgcctacagcaggaagttaccaagtctttgagcctacttgcagcaacacacagtgtgtgtgtatgcacaggccctgagttctcaagagagagggaggggctgctgccctcctgctgatcacatcagcctcacacacttgccctggaactgttgaaatggagtgactaccaaacacctctgtagtgtacaactcggctgggtggaaatcttgtctgttttgaagctatcaggtcatcactgtgggatctgctggtgagagagcttaccaggtgaaaatctgggtatatggatggtagtgaactgtcacagggggtgactttaacaacattcagtttcagtaaaaataaggaacagaattgggtcagtattctactacatggctgtacaggtatcccaaaacattgaggaacattccaagacagtgtgctttctatgagtgtgacattcctgactagagtccttcagctgaattgacaggcaggcagagagtctgatccctatggacactgacatcgttgttaaggagatatatagatatatctatatatatcaagtttattttctgctgccgtccctgaggctaggggccttccttcctcggctgctgctgcttgcagtttagagttgtggagtattggaaactgtaagctccttgactctggagaagcaaacccaccaccatcaggattgggtcagttaggctacaggcatggaagcggcctctgcaactgttgtctctgtgttgtggtcttccttggaggaactgttgagtggctgttggctaccagttgccatcctgagtagcagcttgtgagtgttttgcattggttgttgagtgtctactgttcctcggccatgcacctggcatggtttgttgtttgatgggacaggaggctggagaagcagactgggtgttttacagtccggtgagaggaaagtcagtctccgggagggggaggcttgagctccctgccttctcattggccctctgagtgtgtctgtggttgggagaggttggcaagcaccagctttacacattggggctgcctcagatttccttagttctccttctgaatattggagtttagtattactgtggggccaccttctctcagcagctggcatctgtacttgtggtatatctggcactgccaagtggtgcaggacctcccagggtgcagtggcaagtgtggcagctactggtcctttcctctggtgctttctgagggttgcagagggcaggtgtgcagtagagcttcctctcgtgtcctgctcacctcccagggttttacattttctgagttgcttactcctgccctgtcttctgtgtttggtggagtgatgatgtggtctcagtaggaacggtaacattgcttcgccgtgtcttaaaggagtcttctcttccctagccctccctgttcatgtgaagaacagaaagcctgcagagtaaatctgactagaatcatggcatgggaggcagcagcttttctgtccaaggactgcagtagctgctcatgagctgtgaggacctggtgggtatacaggcagttcccagggagggcagtgggtacgtctggtgcagaccgtgggcagtgtatagagcagttgggacagactgggggctggctcccagcagggttactgtggcagctggaggccccaaggagcctgctaggctgtgacggaacagaaaaggttcttcgtttttaaacttttgtttttaaatactcttttttacactgttgttggtactttttttatgcttaagtcagcattgtcttccagtgttaaaggcatcccttgcctcttcatggaacttatgtgtcaaaacaaaggaacgggcagactgtccatcccaagccagttcaattagatgtaaattcatactgttttaattttttatgcaatctgatgagtagatgggctcagatttaaaatccttaaaagcacgtttattgtaaccagaattgttatgtaattaatactgcagttttcaataaagattgacttgtgttgcatattctgaccttttcgtgggagtgttttcagagggacggtctcactagcacttgctaccacttcccctggtgaagaagtgcctagaggactgggacaaggctgtgtgttcagccttgatcagctttggtggagcatcctcctacgtactgcaggaggtgtaggcttctgcagctccacat

SEQ ID NO: 17529 - DNA, 1183 bp, Mus musculus
ccagctgacatttgtttttctgtcatctctgatagatgggatatgtgacaacatggtacggacgccgttcagtgtcgctttaataagcatgatgctgattttacatcctgtgctgtatgactgccatttgctcacagtgtcaccattgctaaagctccgtgctttacttacaaaacactaaaaccagtggttagtgtttcacagtgattttaattttagagttagttactggcattcctaaagccatagagtactgagtcacatccctgaagtacttttgaaacagaattgtctcctactgtcccatgggtgtgccctgcctgtctcctggccccaatggggctagctgtaccaggcagccatagttgagcctgatcattcctgtcaccagtttgacttgattatatacccagaatggaatacattcttgggcatctcagttcctcagccctgatcctcatagacgccaccctttcgatggcttttgcggcgtcacttgtacctcagtgagtcctgcgattcttgagttagagggaacgacttgtccagcattgaggaacatgtctcctccactgagacttaaatgatgatgcagggctggaagaggctggctgctgacactgcatcgtggctgatgtcattgctctcctagttctttgatttaagaacctttcatatggaaggcctgaggctccctcagatcgtcccttgccaagaaggcctggcttaggtcattagtgcccacagtagccttctggagtgtagcaagttcctgcgtttgagacagaatggttcagatttattttctacatctgttgttgaccccatgcaccctctcattttgccttccagtctacgtagatgaaagatgaaaggcagaggatgcagacagtcttctttgtgattgcttctgttattctgttgcatctaccgagcccgttttctccctgtctgtgcatacagtatgtttataagtgaacttgttaaaatattaaatgatcactaaccttaaaccgtgtctcattgtgacttctgtcgtatgtttaaattattttgaggtggctggagcagtagttaagttgcctgtcacaaaagcatgaggatccgacatcagacccttggcacccgaatggaagctagatgtggctacagacatctgtagtcgtagaacttggagcttgga

SEQ ID NO: 17530 - DNA, 1175 bp, Mus musculus
agctccaatcctcattcttgattgtcaagcacttcaatgtcagagctatctcccccttaggatacagaggagcaagcaaccacatacatctgtttgtaagcttatcaacaaattaacatagctgccttaaaggtatggaaagaattgccccaaaaagtaaggaaaaccttgtccctaactgagattggtcagggcctggaagaattgtacccagactttgtggctacctccttccagacctaggctattatattcttagatgatatatattgtgatatgtatagtataatataatctaatagattggaagtaatgtatataataatcaagaaatactcaagagaattttctgatctaccttttcaaatagtatttttttagttcattggtgttgacaaactaattataaagctaatagaaagagcaattaatttcctaacctttggtatctgtctctcctgacctgagaggggaaaagaagacatgtaatgaccccctccctttccctcctattggtttatagatcagaacagggatgtgaaggatatactccatgagacctaaacatgactcttcttaaaaaaaaaaaaaaaaaaaaaaaacagataaggtaacaggtaagtacttagtggggattcgacttggaggaaaagacgaaatgaataatccttcaatacttaaatatttattaattaaattgaatgaattataatatgtaatataataaataattaatgcatgattaaaactacaagcacaggaaatgtcttctacatgcacagactgatatgcatgctgaactggactacaagaaacaaccctaactcacagactcaagtgtctttaaggaaactagcagaccttgggccccttaatttctcccactatagaatgaaggacaggaacaaggctatttctttggctatgactttacaattagcagcttcccccaacattcattttgtatttctttgtatttcttccttctcttatgcatcttccagcacaacccctttagtgaactatgcaattggtttgccacccaatgtcaggcaacttttaaaacactaaatgagactttgactggattgcctatcagcccttcatcttgatttgcatcgggagtgttgtctcattgctaagaaaagacagtaaattatagagtactgatgatt

SEQ ID NO: 17531 - DNA, 1137 bp, Mus musculus
caaggcaaattagtccaggcatctccaggaagtcacagagctgcttctctgttgtcttgtctctctctttctaaagtttaaggcgtgacttctacctccctgactcccaagcaaagtgactttgaactcctgaatttcctgcttcttccttcaaagtgctagctagcatcacagatatgagtcactgtttccagcttatgtggtaccagggatgaaacccaaggttttatgcatactagcccagtcctgcactgtctgatgtgtttgtgtgcatgggcacacacattatgtacaaacataggtacactaggtatacaggtatgtgtgtatgtgtgtgctatgtgagaaagcctggggacaacctacgtgttgtttctcaggcagtactcacctgttttgagacagggcctcttattgccttagaacctgcctgcaagctgtcctagctggctagcatgtcccagagatctgcctgtctctgtcttctcagctctgggattgcgaacatctgccactatatttaacattttccacgtggattctgggaacagaactcgggcactcatgtttgcccagtaggtgatgcaccaactgggctatctcctcaggactcttttgttttttttgtcctaagaactgaacccagaatcttggacccagtaagtcagtgcaacaagcgccaggccagaagtcagtctggttaggatgcgctgcttgattctgaggtctggttaccatggagttatagattctctctgatttatgctctcgggtcacatagaagctaaatgctctctgtgtcattttatcctggccacaactgaaaactcaagtcttatgttttaactttgtttatggcaccacataagacattcagattgttgctcaaattaccagcctttcatcttctggcttttaaagacattttatatctgttaaagaatctctgcctatgcaatgtgtctatttaagaaatacgtgtctcataaagtctcctccagtgttataaatatatttacatatttttatttagtagctttatggtacacatgtgcataaaatacatgtaaagtaatttttgatatatatatatatatcctagttttattctcttaaatcttcagaagtgaaaatctt

SEQ ID NO: 17532 - DNA, 1120 bp, Mus musculus
ccggaaaaccactcagagttgagggactgactgtggtcccaagctggtcatcagaagatgtgctagtccggggtctttccagaggcctgcctgtgttaacatctgtttccaaggctgcctctgaggaatactatacttttatggtccatggtagatgcttagttttttacttaccccacatatgatgaagcacctactcttggaacagcagtgggctctgccatgatggcttcatggccctcttccatcatatgcaagaagagatcaagctgttagaagattggtaccctttggggtgaagggcatggccagcagtatccccaaagggtggtgctagttctccagagaaacagaacccataggatataggtagggaggctgagagtggacttatgggaattcgctcacgtgaccatggaagctttgttatttcagggcatattctctgcaagctggaaatccgggaaaaccatggctcagtccaagactgaggacctctgaacttggtagccgttgataacctgaagtgataatgcccaatggcagaaagagggtacctcccagatgctgaagagcacatacccaccccccgcccctgtgccatttccttatgtgtagaccccttagctgtccatgtggtccctatgtacattcagggagacggccttacttggtccactgattccaatgccaggtgcgcttttccagccctctgggagtccttagtaaaggcagatgacatctaaagttggtcatcatagtacactgacacagtacccaaggccaaatgtagtgtcaagtatcccatcaaaatggccgatatttccaagcacctacttgatgttcctaaagaacaagctggacacagactgtatgaggtggtctgtgagcctaggaggcaggatgtgttgtttgagtgatgtgttaatagtgcatactgtggagagcctgcatttggtcagcagacacctctgcggtgcctttcttgaaccagggagggacttagacccctagggagttaccatgcattcctgaggagccacagaggggcctggagaagacagtgttgtgggcgcaggccttctcagctgaaggctcagcaaggaagtaagcacagggc

SEQ ID NO: 17533 - DNA, 3538 bp, Mus musculus
ctgatgtccccaaacctgccatcagaatgtgcacaggagagacatcccattgccctgggtttgtgctgcacagaggaggagaaactgaagttcctccttcacctacatatctgcgctcttgctctgaccattctagatatagagttcagctgcctggtcgtcatgcccccccccccacccacacacacacacaccgcacccccctttgtaaagaattcccttgacaggttccatccctcagacccagggttttctcctcagaaacgagcaacgaatgtcagagctgaggagagcttacttgatgccatgtgcccaagggtccatggtaaagagctgtagtcaccacagtgggtgcagctctctcccctttccaacagtactgatctcttccccgttctcattgtagaaagttctactacatcaccctgctgcgagaccccgtatcccgctacctgagtgaatggcgacatgtacagcgtggggccacgtggaagacctccttgcacatgtgtgacgggcgcacaccgaccccagaggagctgccgccctgctacgagggcacagactggtcgggctgcacgttgcaggagttcatggattgcccctataacctggctaacaaccggcaggtgcgcatgctggccgacctcagcctggtgggctgctacaacctatctttcatccccgagagcaagcgggcccagttgctgctggagagcgccaagaagaacctgcgaggcatggccttcttcggcctcactgagttccagcgcaagacgcagtacctatttgagcggacgttcaacctcaagttcatccggccattcatgcaatacaacagcacgcgggcgggcggtgtggaggtggatgaggacactatccgccacatcgaggagctcaacgacctggacatgcagctgtatgactatgccaaggacctctttcagcagcgttaccagtacaagagacagctggagcgcagggaacagcgcctgcgcaatcgcgaagagcgcctcctgcaccgctccaaggaagcgctgccacgggaggacccagaagagccgggccgtgtgcccaccgaggactacatgagccatatcattgagaagtggtagtagtgtcaggggcagagagtgatgggcacgatttaacagggaaagaaatggggccaacagttcttcctgttcggtgcagcgggtgctagtaggatgccctagtccttgatggggcagggtaggacctctggggcagatggcctccctgctcttctggcccccatgtcatagttaaaactgacaaggatttgaaaaagactggcgagggaacgtgtctgcttagccgagactcccatacctactatgcacgcactggcccccaacgaccagccccctaggaacgtgttactagctcctaatagcttggttgaagctccttggcctctgaggacccctaataacccagaatcttggggagccctttcctttgagaatacaagcatgtctctgaggcatcctcagacctggagtgctccccaacccccacctatcaaagctgctttcaaggtcagggtcagccccagctgtggcagagaagactcaagtctggtgcctggcctctgcactgtctggagcatgatcagaatccacggtgtatcctggctttaggggaaccaggttcaagcaggaaagggatggacaccaagaggtcttccccccacccccagctccccaccaatccctatgctttctgatgcactgcccctcccccatcactgaaacatttatacaagggcttgtgtgccaatgttcctaccataccagcaactctttctatcccgtgaataaaagcatcccttggctgggatatagggccacatcaacctgagttggtactgggtggccaggatggggactttcccattctcagctgaggttggaagaaaccactctgggtgtcctttctgggacctgtctgcataaccctccccatcctggctctcctgcatcttcttaccctttacaaagtctgacccggccatttccagcagacctgtgagccagccagggaccggactagaagccatgttgcatattggggtttttgtttgtttgttttttaagcacttaccaagtgccctatccctggcaggcccctagtgggggtgtcgtggcttttttcagagtctataagcatgcagccatgggttgtgagctgaccttgagacaggacgggtcccacactccctgcctctgtctcactcaacactcaggctaagaaggagcgggtcaccacagacaagagtggggccatatgtagcacagcaatattccagatgctggtgggtattgctgctgccctagagcaatggcttaatcttcacacatgtgtggtgtggcaccaggcacttgaccttggggggtctacaagcaagatgagttctgataggcacagtccagcccagtctagcaccaccttttatggtagttgatcactctgaggaggtgggtagcaagatgaattaggaggtcaaggtcactgagaggaatttgtttagatgcccagtttagagtgaatagatatctgcggggaacctggggcattttggggaaccctggggtcttttacaggtcatgttggttgctgctgcttctgtcaggaagtaccctagctccacgtactccccgccccccgccgcccccttcacaaccttatgtgtacatgacctgaacataggatctgttctatacatactggaatatgttttaacatatgccccaccatcctgactcacacggaagcacgggtctcttctcaatctttgctgcatttggaaaatgttccctcccatctcaggccagcgccatgtcgaggcatcttcagtccacccctgcctaaggctcaggctacctgctttggggcacagcttcctggtactcacagcatctcagaacagggtgcttccctctgcctccagctccaaggactctgcctacaggagtgtgccttggggctgaaaggccatgcaaacacaacaaactaataactcagtcccaaagcaccctgcagccctgcagacaccccccccctccaagagtgggaggcagggaccacagaactgtccagccaacacgtctgaactggaactgttccacttgaacccgggagctttaaagctttatttatttatagcttcttattaaaaatttaaaaaaagcgttgaggaggaatcctttggttattcatacggaattgatgatggaaaagcaactggttgtcttctaattgtctttgtctagatggaaactgaaccttagcagatgaataaaccctgaaaaggtcattgtgtgctgtggtctgtggtgacttagccctcccaggcattgcattggcctgcatcatatttcggcaggggtgacagcaaggctgctccggtgcaggtgcccctccccctgcacaaagtgaggcgctgggtaaggaaaaactcatagaccacaaaaggtagaaacgtacatttattataagacgtgcacaggtgaca

SEQ ID NO: 17534 - DNA, 3998 bp, Mus musculus
gctgctgtgagcacgcatgcacaccatagcatgtgcacacagtcatggtaaagtgcaagtgcattgtgcaagaatgcctctactgaggctgcatcttagataactccaggaaaagcaatacacacggagagatgtactttactgttacgtaccgatcagcaaccttaaaacagtttaaggatcaaagaacagctgccctggctcacagaaagaatgtgtaagtgcagaagatttctgcacacagcagtgtgtggcccagagccagctctgccctgctggagaccccgagagccagcgctgccctggtggaggccgtgtatagcccaagggcgtgtcagttcttagagctaaaaatgtcttcttctcttaggttcgctttcaacccttaatacagaaatagccaacaccaagcttctacagaccatctgaagctacagtgctgtgctgggggcagtgtcacacgctgttttatgacgtaagtctcacggtctgtgttcttcccccaggctctcagaagcatgaggaattatgatctctggaggaagatgggaaacccaccttgacagtttggactaactgctgttttctctgatctttcgatacgactgctgatgaacggattgggcaggtgtaccacacctattgatctgagcattgatttagactactgcaccctagtgggtgctagatccttggggctaaggctctgttggatttgtacctcagaggaagacaagtggctggtcttctgggactcttcttctcaccagagggagaaatgccggcagcaactgcaagaagcccagtccttcggtgcccacagcccagagcacacactgctgtgctggcccagaagctgggcagaaaggtcaccatgttcttccttacctcagtttacctgcagcccttgctgcagtgcagatgcccaccctgtaccaggtcaggccggcagatgcttcatccatgcctcaaggtctacgccaacatgcttctcacgtctcttcccctccccaccccccttcccaagcactaggcttgttgtttaatggagcccaaccaataatcatgtgtcttcagggttggctcagtgcagttgctaagcaaatcagtcttcaggagaaacggggtggtgtggataaggctggaagaaatggcaggtagtggagagtgttggggtgttcgatggaagacaaaaacatgggccgttctcttcagtctagtacccagtgaactgtccaggtaattgttttgtaaacaatttttctatttatgaaaatgtgtgctttttcttcttactttctaaaaagctgttggttatcagtttcctggctgggcacaggcgtcctgagtccctcagtgaccgctctcagcgtgctcagcctccgtctggatgcaccatactgtctgccctttcccttgtagagttttctctcagacccaggggataactttgggtgtttcttcccccaaatgctctcagacctgtgaccaggaatgactctgtctctggaactcggtttcctacactctgtctttcccttgtgctttggctctgagggtcccctttggctttcgagacttgccgaggtctggtccagttctaaggtactgctgctgtctgaagcagcacccttcactgctttgtgttcacagccacagcccagcatcacctcgggagcagcctgggctgaggagccttccacgtgttgttaacctggctggacaggtgtgggtgtgtggtgtcatctctgcccaggactcagggatctacagcagagagttagtgttgctgggcacagggtgtggctcagtggcagacagagtgcttgtctagcaagcccaaggccttctgtctggtactgtatctccccagccccccccccccaaaaaaaaagactgaatatgaggaatgagtactgtgggtaactaagttcttgcctgtccaagctaggtaatatgtgtgttaccatggaagaatggcctacaggagccgtggttagggatttgagtgggcaattgttaagtaataagtagagacagaaaactggattgggaattcagagaaccagcattaacccccttacctcgtcagctggagctcccactgagagtcctgggcagagcacaagtgtcccctcaggtcaggaatccacataagagaacaaagagcagcactaaaaacaacatcatttagttcggtgctcacgacaccccagaaacgagctggggggctgctaccatcggtcggtcagcagggttttctccctctccctctgcaggcgcttgggtagcaaggacaggctgtagcgagccctctgaccttggaaaggtgtctgggaataaattacttcccagctgtttcaagcgatgtattttgactcttggattatcaaagtgttttgtcatttgtcataaagtcagggaaggggcacacatccccagacaaagggccatggaggatacgtttgagacaaacatgttccatagcttcttagcttaactagcccttgacatttattgatacagtgtatattacaacatgaatttcaaaaaataaaaaaattaccacacatatatcaagtaatatctcccccccccccattttcaaatctaaaagttagcttaagagccagcctttgttcaggcttcatgtccaccctggattaagctctcagggctgctgcgcccgactgtgagcggaagctgtcttcccagtgccctgggagcctggagtgttgagcaggaatagtcagtgctctgagatgctggcccggtggccagggtccttctcttaccaaattatgtgtgcctcctctgaggaagaggaaggcatgggtctcctatggccctttagtccctcgtgggtcactacactgacataagtcatattcagagctgatgctggctaggccagaccctaaactaaacccttctaaagctgtccaggccccccctttcctggtccttccttgcatcctgtggattaaatcatctctacaaactaagccactgccacaaatgggctgctgccggcaagtggccctggaagggtgtccctgtcagatttcacctgacattctcactacgaaaaagcatgttgtgactgaaaagagagatgagctattctccaagaagcaggaagtgactgagcagacaggttattgaggctcctggagagctcaccgccattcttggcctgcgaataaatggttctttgacctcctgtcatatagcagtagagtgtttcctttctgaatcactagggtagtgtgacctgtgacaagtcagactgtgccgatgtgaatccatgaaaagcggcccttgactggacctggggctgtggggcacagctctccagagtcctgggttagaagtatcctggatgcacccatgtcgagagtggtaatgtgctggtttcataagatagttggcgttgttacccgggcagaggctacatttctggttgagcatggtcgtctcggggcgtgcatgtgtgcaccgtgcagggcctgtctggtcaggagcagacttcatggcaggtatgttacctggctctcgtctgagttgctgaaagatgagctgagagcccagtgctaaagaaggaagaaaagaacaagcaaacaaacaaacaaaaaacaggaaacaaacttgactggcatagtttaggactggtcagatttggtcaccagtatgaagtcaactcctcttgtccgcgtgtcctccattaaattacccttctaaaattacccttcctagttagacccgcatgcttcaaggaaatgatgcacctgaggcgttgggaaggcgctcactcccatgcacttttctggggagagttcatggaaggctgcctagagggacacgtgctggcagtacggagcacgacttcttaagagagttgttgagtccgtggctttatgggatattgtatgatgatcagagtcaatcaaacggctcctcacgttcttgtttactaagtaggggagcagttttctgtt

SEQ ID NO: 17535 - DNA, 1116 bp, Mus musculus
tatcttcagacactccataagagggcgtcagatctcattacagatggttgtgagccaccatgtggttgcttggaattgaactcaggactttcagaagagcagtcagtgctcttaactgctgagccatctctccagccccagctcccactgttaactgcatgtttatcacacaccgtgttctcagtgctggcatgagggcacaagcatcacttagggctcatattataagacaaaggtttctcctcagaggccagtgctcaggataaagtgcttgtgaccccgatggccatagtgtgaaggggtggtctcctacatgcctccctctcccttcccttgactttacagcagccctgggaggcagcattagaccagcagaaggcttggcttattgtcctgatttggaaggctactgtccaagcctagggttttgttcactgtgtggacgctgagactgcatcaagaaatacctaactaacacttgcgtttcttttcagcttttaccgttacgtcttagagccggagatttctttcactgcagacagcagctttgctaagggaccgatagcaaagtttctggatatgccacagtctccgctgtttactttgaatctgaacacacctgagagttggatggtagaatctgtcagaacaccatatgatctggataatatttatctagaagaggtagggatgtaattgttctcgactatcgcatcatgtataagttaaatctatccatcattcagtcagtggcgattcctgaactgagtggtggagatggcgctcacatcacacatcagtgctcccttacgttgatgctcccttacggcagctgctttattcagatgccttcccgctcagaagttgcggtgtgtgcgtggactgctgctcccacccttgctctctcagcttagtcagctttggttgtcctcagagttggtcggctccacgtcagtgtcagtcactcctctcatcctctcctgattgacaggaagcagtgctagggaggggcattcattagggctcctaagaatgcagcctgtggtgctagggaggaagtggcctgatctgggtgccaaccaggaagcaaagagaggagagtcccaagggcttccg

SEQ ID NO: 17536 - DNA, 1210 bp, Mus musculus
cagtgaaactgaccaggatgcagccagccagccagacagacagacagacagacagtcagtcattgagctgatgccctgtagaaagcttagagctctggcacaagcctttcagaatctcctgtatgctccagcagagatgctgctgcgccttctcctggaaatgcgtccttgcattcagatttcattgatgatttattgaactagaaagcttgactatctcacttgacaaaagagtcccaccaacattaagtggccatttgaatcccaccagtgaaaaatctttgcaggcttccactcttccctgcagctgctgccgtccccacgcacctgacccaggccttcagtccccctgcctgcctcagatccgcctgagactatacagtacagctcctgttccccaagcactccagacggtcagggcacaagaccttccggttgacagttttagtcaaagtggcagcatctttgagggccagcgagacgacctctaggacttgtctggaacctgccgttgttaattatctgtcagtttcagtttttcctgttttcccaccagataatttttatgtggatgactttgccagattttctgccttggactctcggggcaagacggctgctattgccaacagtatgaactatctgacgaaaaaaggtaacccacttgggcttgatttggtccctcatgtttattctttatttagtatttacaaataaactccatctgcaactgtaggaaaaaaaacatttaaaatataattctgtatatgtctctaaaaattcaactattttctttaaattttatgcttatcattaaaattgataggaaaagcccttcatgattcaaaatggagaacattatatcaaaatggttttgcctgacttcagtatcatcctaggtttacttttattgtagaacttagaaactggattctagaaagcctcgtgtgactcgttagagtgattttatgcagttacttagttaagctacccttgtccacagtcactgctttcatctgcagcaggtccttccctagagggtagggggtggttgacaattagtatccgtccagagtggttctagcaaagcttgctgctctccaaagcaccggttgtcattaagagagataattttgtccagctgtggtcttccttcagagcctttggtttcctgaggacttataagcttatgcaattagtccactgtgct

SEQ ID NO: 17537 - DNA, 1733 bp, Mus musculus
tggatagttggcatttctaccccaacactgatgtagtttgaccccagtgtcagtatagaacggctcactgcagtttcatgatgaaggcaggaagaagtgggctgtcagctgccagcccttagctgctctaagatgtggggaatggtggttaccatgtgatggctggccccttcctcttcctcacaacattttgtgcaatcgcctgtagaagagagcctgtaggtccaaaaagaggggtggacggcaaaggaagtagttggcaaggcacacccaagggccctatgctgctggcagctcgggcttggagctctgcatgacacttgagggcctaagaagagctagagaaatggaatttaccaagtcagggaaaccgcaaatccccgagagtcttgtgtgctgcctggcaatgaagcaattgaccagctaccatgctatctctgctgttgtaggaagcttggggcactaggacagggaaggctgtgcttcaaagtttgtctcctttcttagaactctgcctttctgcttagaagtggaaaggttgttgactactgtgtgaggctctggggccagcctgagtcttgtagaccgtggtcctggtgatgtgggcactgacgatggagcagagcctctcattccctgtgacactgcagatggagctgatgttcagagccggctcctttccctttcatacttagaaagtttctgttaagatgagaaataaagcaacgcaagtgtgattttggtcacggggccatatacagctacaccaaagccctctcacctatagtctgagtggacacagtgtggaggagcctcaggcaagtcaggtcagagacgtgtgataggacgagagaggtctccagtctccacacctcgccttggctgtggagttgcactcagtggttcacagagtggagctgtattctgaaattcagaaggcattcagagaatttgagaaggtatgaaatctggatgaggcgcgcctagcgctggggccttgatagcttcataggtcagagcatataaccaccaaaagagaggataagactgggagtgtctgtgaaacctttagggattaagttggcagaggaccctgaacaaccctttgtgacttaggagaacaacttgagcaacactggagggctgctcctgaaagatgctgcccctgtgttctggaaccaaagaaaacctgtatcctgctttggtggtttatctgtgtgcatcccatgggtgacttctgaggcatggcttacataccttgaagaactgcaaaactgaggagggggagctgcagcacactgattgtcacctttgagggactgaccaacgaggaggtgactggagtctgtagaccatgttcctcgggtcccatctcaaaccacagcagttggaatgtggagagacacttcaccccacccacctcgtggcagacttgagggtgtagcctcagaaggtagtactcttatgagtatgtggaagggtcaggaaggctttacattctctttcaggcaacagagggcttgtaaatgcccagtggaagaggtcactgaggagcaaagacagcaacctttggttgtatcactataataatttgggttggatgaattcatagaagtgagccagagcaatgtttctgatcttacgttagcaaaaagaataaaatacaaaacattgaactttgcgttgcttcagcttgttttcatttggttctgcatgctttgggaattgcctcc

SEQ ID NO: 17538 - DNA, 1177 bp, Mus musculus
ttttagccaccagataaataaatagcttttgagcactgaaaaaaaagctccatgatttgttgtgacttgcggtgtatggtaaggtgattcattggcggaattgggaccaaaagctagagttcatgctttagcttagtggccttagactttttgtaatgagaacaaaaatatgacagtatctctttatatggtggacatacatgggaaatgtcctcagggttgcattttaattcctcagagtttctgttataggactggctggacagtggctcagaataagctatttaacaagatcctcaaagccctgcagtctgaccggcttgcacgattggccaatgaaggggtaagacattggaagtctgtctatagttgactctcttagttttggcctcgggggttgttgtgtcctgtgtgctctctcccctcagcccccagcttgctcacggagcgtaactcttgttttattctttttgtgaacacctttcaggcttgcaatgagcctgtgctgcgtcgcgtggctgtggacaagtgtgcaaggagggtgcggcaggcgctggcaagtgtcagctgggacaccaagctgacccagtggctgcacaccaccctcgtggagaccctgagcctgcccatgctggctgcttacttggatgccctgcagacactgaaagggaaggtaagactgtgcttggtttgcccgagtggcagcagccagggtttgctgtgagttcagagggtttgcacaaggccctgtgactaggtcagcacagaagctaacaatttggctattataatggaaaaggggatcattttcccttctatttggtataaatttcttcagtcgtgccatttttttggataaagtgtggtatctgaaaaccaggatacataatttccctctatagccttgtagttcttaccttgagtcatcgctgacttgaactgtggtggaagagacgaggctgagcagaggaggaccaagggtaccttctgagttaactctcctcatgaagagatggactgtaggctgagtatggtgctacacacctttaaccacagaactgtacaggcagaggcaggtggctctccatcacttggagcttggtctacactgcaagttcattgtagggcttgagttagtgaatgaggtggagttcttgacacataagccagcatatgg

SEQ ID NO: 17539 - DNA, 1163 bp, Mus musculus
agggatgaaggatctggctcagagagtccaagtggccattgagctctcacttatggctgggtagggggcgaggaggtcgtgctagatggcctgttggtaggatccatgctggggctgggcctcttgtactcacagcatggaagccctaagtaagaggaaactagataggaaggtcctatgtgttgtgtggccacagcctaaggatattaagccagccacaaagtagttgagagatacagacagacagacagacagacaggcaatatgagaattagtggtgtaaatggtaaaaggaggaagggaaagggtggctgtgatggtttgtaaatgctcggcccagagaatggcactattaggaggtgtggccttgttggagtaggtgtgtcactgtgggagtgggctttaagacccttgtcctagctacctagaagtcagtcttccactagcagccttcagatgaagatgtagaactctcagctcctcctgcactatgcctgcctggatgctgccctgctcccacctggatgataatggactgaacctctgaccctgtaagccagctccaattaaatgttgtcctttataagacttgccttggtcatggtgtctgctcacagcagtaagactctaagacagtgacacccccagccttgggaaacaggtaaataaatatgttctgccggtcaaaccacctgacctttgatttttcgaagttgacccgtttgagaacgtcagtttaacaaggatggttattttaaatttttctcagcagaagacttcatgaatatgaaaaatttatagatgatgaagccatcttgatagttggacagtgagggataattaagatgctcttgaggggaggccctgtgtccccaggttccttgccatagaaaagagagcgtgcagttaagtggccagaactgtggtttgtgtatctgtgccctctgatctatgataccaccttcctacacccaggagagcaaaacagtggcactgttggttttctaggacagccgagggcttcccacaacgttgtgaggcccatccaggtgtgaagttcttaccactggagcatctttcctactaacatgcaaaatgtatttgcctcctgtctgtgtatgtaagtgagccgtttgcctgccctcgcctctcactgtggactg

SEQ ID NO: 17540 - DNA, 1318 bp, Mus musculus
cctagcgagtcggcccattgttcagggactgtgttctgtcactggagatttgaatgctaggagcctgcatcctcatggtcatccacgggaacatctcactggcccaggataccaccacagggccgagcagctgtggcatgcctttccctggagtccttccatttccgagtacagagacatggagaaatacctgctgtgatgcctaaattacacaattgggcagatagcctaagtgtggactggacacagtaggccttccattgcattttagaattcccaaataggaaaccagaaccggtacactctggagacccacttactggtctttgctttgcccatgcctctttctacttcaggagctccttggcaatctggatggagacttctccctcacccgcctgtctccctccactcaccgtcctctttatatgcatccttagctaggaaagaagtttgccgctctcattagctggacctggggcttcctgcagcctctcattgcttcagcctcttctctgctgggtggatcctgtttctgactgtggctgtgtcttctgctttcctcatcaaaggaaaccttcaggcctttggatggtttggctaaaagttgttacaactcaagagaagcttggaggagttgacagatgctgtgaggttaactctggaatcatccaggtccaggtgtgcctcagagagcagtgttggctgcgtctggacctgctggagcctgcttagtcgcatgtgttgtgtttgtcctgattctgctctgagtgttggaagtgataagcagctttcttcttactccctggacttggacatggccccaagatgcttggcctcttactaagaagaaacagttggtaatctgttacacatctctgagagtgaaagcccttcatcctctgtgcctggaaaagttgtggtcctggagcagcagcacagcttgagtgcccttgtgtgtcacctattacactgccttattccacaagggccacatgctgctcacctatcttctctgtggttaaattggtcacaggctagtctccctggagggcctggcacagttctctgtagcccgaggaaaaggcttcataaagtagctgatggaaccactcatgagttctggctcagtggccttcttgtagtgtgggcttggttgggggctccagcctttttcctgagcctcaggtgtgtctgctgtcatcctgcccctcctggatggttgggaaaaccctcacccatcccttaccccatccgtccatagacgaggaggaaggtcaccctagctgcaggtgagagttcatctcagccccctgtc

SEQ ID NO: 17541 - DNA, 1099 bp, Mus musculus
cagtgataagggaaaaaggcatcagacttctagttccttaggaaactcttagttctctgtaggtgcagcatgctcccaggtctctagacgaggtgcctagctgtgttcctgagagacctaagtgccaggtagagcaaaaccatgtggtgggtgtgaggcaaccgtagcaggtgcgcacacttccacagctacctctctatatccagtcaccacctacagacaggctccacccatccccacccctcccctcctcatttagaatcacttcttgcagagggccataattgtttccaaatattactggtctgatgacttcctcctcccggtgcaatttttcacttcctcttccagcctctggttcctgggcagagccataccctggaactggcccagtctgcatgtcttcccagcagaggaggactctgcagacggcatccaagtgggtggccaagtcacagccgccatagcagatgactcctatttattttgcattaagattttaatttgtatatttttgtgatttattttggcattgttatgagtttgactctcggggagttttgttgttatgactcttgtgtcttttgtcacaaaacaatgataatatttgctaaacaatatatggactttatttttgattggtaataaaaaatgaaatgtatataagttttggtgagcatataactttggtattttgtttctggactatttgctgtatattgtagagacaagtgactagctgtcacttgtgacaggacaagggcagttgagtattgtagaaccatttggaagggaaatacaagaagaactgtaatttacaaagtatatataatcaaggcagttgtcacaggagttgttgtggagaggccggtgctggcagacatgcagggcaaataagtccgatgtcataggattctgctagtgagtgttggaatggagcaaccaatgaacaaatagccctccttccgctctgggggctgagggctgtttgggctccatgcaatagtaggatggtgtcgtttcacaacacacagaaacgactttgtctatgtcaatggctttggggggttggagtgtccatctgaaatggcagacctaa

SEQ ID NO: 17542 - DNA, 2553 bp, Mus musculus
ctgagcaagccaagagtgctgagttttgatggaagtgttcaaatccatggccctgccgtgtacttcttggcttcccctacaatgccatattttgattcatgtaccccagtttctcatgtgccaaatctaagagcacagctccccaataatctgtgccccggttccgctccctcctgtggaggaagcccctctggctcctcaagtcatgagcaggctggcccagggtcgccttgcatttctttcccacttgggcacggcgccaccacagtattgtcgatttctgtttgaggtcatttgtggaaggccaaaggtcagtgttgactgacctggggccgtggcgcctgctgtacctgtcttgtgctcttgccctgagcacccaggaaggtgtgcagcagtgcaccgtggagcagcagtcagtgaggcggttgtaagcctgcaacgtccttgtcacttgctgagaagtcagggttttctcgtatctctgaaatactcaaactctgtgtgcttttgtctttccagtgatgttttagagacacgggtggaaagattctttctcttctagtttacctatacttttccacagtttcagctctgggacaatagattggggtgggaagggcggatttctggaaccattcttaaaagaatatgggcccttgtgagacttggaagctaagagaacagtggtacgcttgctgaaaaaaatattataacagaatgtactctgagaacaaacccaggttggaaacaaatactttgaattacctgtctccaaaacagaattctaaatttcggctgaacctcagaatcgagttagaaccttggatgcgtatgctcaccttgaacccccagggctgtggtcctgaagtggttttaacctcctcctagaagagtcccctatgccctttaccatcacctcctaaagttaacgtgttagataaccttgttgcatttaccagaactcaaatgttaacattggagtactcaactgaggccttgatttagatctcacttttttttttttttgatttctggcaattggaatccagatgccaggatgcacttggagctgtcgcttctttagacctaactacagtaattgcaggttcataggaagtggcaaagacgcagagcccttgtaccctttatctggctttccccagtgctcccatgtcactaaccatagtgtgcagggctgtggggctctgcactctgccacctctgtagacccaagtaactgctggagaatactaacccgctggactgtccctcggagccacctgcccccgccctaagccctgggaccatagactgttccatagactgttcctcagctctgtcattttgtcatgtcaagaatgtcgtttgaggggctgtgttgcgtgcagctggactttgggattgacttcatccagcacagtgctctggaggctgttccaggtcagtgtgtcagtggctcgctcctccttgccaaatgatgtcccgtggtgtattcagtgtcctgtcagaggacatctgggttgtttgcagtttttggccttttcaaaataaagctgctatgaacattcacgtacagatacggtgtgaagactggtgtccgcctgggatgtgccagcaacacaggtgccatgacgtttaccttaaaaaagaacctgcctggccttggagcggagctgtgcacaagtttaaattcctacaggaaatgtaggaatgatctggtttctccccaccccgacccatgggccaatgaccatcagtcctttgctgtctgtggttcttgtctgcttttccttggtctcgtccatgagcctgttcgtgttttcagcttggcaactggtctgtattcctttccatgtgtctgtgcatctccaccccacccccatctttttttttttctcttgggaactctcttgggaactcttcagatatttagattccaaaatccttcgttggatttttggtttgcaaagattatctgtgtagtgctgtattctagatctgaattgtgaccccagagcttgtatactaaagattgaatccctgggctgctctgttagtgggttctcctgagttcatcagggctctgacctctgccatgttctccctctgtaaagtgtgtggtctaaaggaccaagcagccacaggctcccatgggcctccatctcagtaacattaactgtgttctcaccgcaaggtcttgtacaggtggagggtttggttgggggggggttgttttttgttgtttgtttgtttgtttgtttttggtgttttaagccaagagtttgtctgtatagcccaggctggcctcaaactcagagattcactgcctctgactctcaagtgctgggtctaaaggcatgctctgccacgcctggctcatcttaaaggtttttgtgattaaagtctctctctctctcttttttttgttttgtttttcgagacatggtttctctgtgtagccctggccgtcctgaaactcactctgtagaccaggctggcattgaactcagaaatccacctgcctctgcctcccaagtgctggaattaaaggcg

SEQ ID NO: 17543 - DNA, 1169 bp, Mus musculus
gaaactgatgagaaactttgggatcctgtcgggtactactattcggatggctctctcaagattgtgcctggtcacgcccggtgccagcctgggggtgggcccccttccccacctcctggcatacctggccagcctctgccttctccaactcggctccacctaggaggtggtcggaactcaaatgccaatggttatgtgcgtttacagttgggcggagaggaccgaggaggatctgggcacccactgcctgagctcgcggatgaattacgacggaaactacaacagcgccagccgctgcctgactccaacccagaggagtcttcagtatgaggggacccccccacctcattggcgggggggggtctcatgggaggtgcactcttaacttttgcacaggcaccagctacctcagggacatggcaggggcacttgctctgcctgggacagacactgcccagcatttgcccggccgtgaggacctgctcagcatgggcactgccacttggtgtggctcaccaggacttcagcctcacaggagacacaccctcctctgtgaatttgagacatgtgggaccccagcagccaaaactttgcaaggaagaggtttcaagatgtgggcgtgtttgtgcatatatgtgttggtatgcatgtggaagaatgtgtgtgtgtgtgtgtgtgtgttgtaactttcctgtctctatcacgtcttcccttggcctggggtcctcctggttgagtctttggagctatgaaggggaagggggtcatagcactttgcttctcctacccccagctgtcccaagctttggggcagtgatgtacatacggggaagggaaggacagggtgttgtaccccttttgggggagtgcgggactcgggggtgggcctagccctgctcctagggctgtgaatgttttcagggcgggggttgggggtggagatggaacctcctgcttcagggggaggggtgggcagggcctcccacttgccctccgggttcggtggtattttatatttgcgctcttctgacagggctgggaagggttgttgggggagggaagggaggaggtgggcatgctatggatactggcctatcctctccctgctctgggaaaagggctaacagtgtaacttattgtgtccccacatatttatttgttgtaaatat

SEQ ID NO: 17544 - DNA, 1153 bp, Mus musculus
ccccctcccacccctgcttctttgtcttgccctccagttcctgaccctgtgtctcctagtccggccagtgtcctacacggatgccagcatcttggatctgatggagctgctgtgccgcgcaggcctggatgtagggttgtgcctgctgcccaagactgacctccagcaactcctgctcctgctgctggagagaatccaagagtggcctggaaaggtacacagcctgggctctgcccctgggaactcccttgcccctggagcaccctaggtggggagagcatcacttacagcttctgcaggggtccctggccctcatgaagggacctttgctcccctaagttagcagggcagaggtgacggcagcttcctccagcagcttactgggtgcctctgccctacagctccagcccctttgctgtgccctgagctgggtgtccgaccaccaccacaacctgctggccctcgtgcagttcttcctggatgtgacgcctcggggcaggtgggtgcttctcaaccacatcccacgggatctttcaaggatctagaatcttccataccaaccccaacaaacaaactgtctgcctggtttctaaagtctcagaggaagaactaaaaatacaattcactaatgagttctttacaaatgaaaaaaaaaaaaaaaacgcctaattttcttaacatgatcttattagtaaaacactgtcttatgcaattagcttctgccggcagtgcctgcctgcccgcctttctttggggctcccccaccttaggtttctgggttcttcttgtcactccttccctctcttccaccacccactcctgctcctagtccatcaccgtttattttctgcgcagcttttttctgccataaattatcttactatttatttccctatttggactcactctccccacctagtcacttccagagcaggtgccttgtcaggatcactgccatagcgccccacatctcagcccccgcctggcgggccagtggtgttttgtaaaattcttgtggaatgatgaagtgaacaacagacagcccagaagataagagctgttggctggactctcctggccttgtctctcctcatctccacctttgttctcctgctcctcactcacagccacagggagggccctacctgggccc

SEQ ID NO: 17545 - DNA, 2419 bp, Mus musculus
agggctcggggagggactggccgggggaagtggatggacgtctttcccaagtaaaggaatgtgagatccgaggacccagggaaggcagttggcccagcccacaggaactcaaaaatgttgtctctctatcctcacagaggctccatcctcgcctcactggataccttcaagaagatgtgggtatccaaaaaggaatatgaagaagatggctcccgcgcgattcatcgcaaaaccttctaatgcccgaggagggtggacatactgggagagagggagaaaaggggagccagagcccttgaccccttttggtctgggttcatgttctaagattagggtcccctgcatgccctgaccccggagcaggtggtgcgatcatggtcacctgtagccctcccctcccctccccctgtgctcaacacacacacagacacacacagagtaatgattggctgcatggctggcagtcccaagctggagcatcggaactgaggaacccagcatcgagctggtgtgagtgaccctcttgcagtgccactgtggcctgtggttccttgctctggccttgaagctctgagaccagactcacatgctccatttgctctgacaggctcccaatggggctagactccctggatctctggagtaggctgaagggagggacagccaggagctcccctcagggtggtgaggcacagtggtgtttgatgctgcctcctctttctggcctggcagggcaaatgtcctgcataggactgactaggggacagtcctccatccactgagggaatgcagccaagagtcagagcatcagagccatgggcagccacagctcgtggtttgccccactctctttcaaagcactacactgatttgctactccctcctcgtgccctccgtgccctggacaggaaggggttaatggtctttatttgctaaaggaaagccatttaatcaggattcagacccaaagggaaggcatgtgcttacctctatcaagaaaggtcttcaccatgaccagggcctcccctccctctccagatctgaacagtaatttaacacagttgcctgaaaaatacttgtttttataaatcattatagtaataattatggacaaggcccggtgtgtggctctgattcttggggctctgtgctcttgtttgctcgcccatcactgggagtgctgagagaaagaacactggcagagctcaggagcttgaggcgacaggacaggtgagagcagcctcgtaccctcccactgtgacctgctagggctgctgtgtgtgcctcgcatgtgtgtaccgcacctccatgggcccaccgaggtgtgcaggtgctggcagtgatgcaggcttagcagcttacagcaggagaagaagaaggagaggcagcctgagaatggaccaggctctacaggaagaaacagaacaatctgcaggagtcctgcaggcagcaagtagagaagcttgcttgttagtgtgtgggtgcatagtgcacaacacatgattgaggctgatggaggaaacaagatacaaagggctcatcataaaggagaaagatgccagccagtttggaacagtgttaggccgttagggttagggctgcaccatgctgccttgtaagagcttggtcagtggttagggagagccctttgacaggctggggagggacagttggcaaggaaggtaaattggtctgtggcacagtgacataaaccaaagaggtcagatggactagcatgtgggggatctgaagaaaggacattaaccgtttgctaggtgacaagttttcactgtggaagagtagtgagcagagccaagtgttgaaagctataggccaaagcactgatcaggaatgtgtgcagcagatgctgtgcggccatgtggtcacagcatcaaagtttacacagacgcctgtgctaaggggccctgcaaaccagctcctgtgcagggtcctgctggcaccatgggctcccagccacccgtgtttggaaccttcctgctgagctcctcgtgcccacacttgtcagtctaagtctatgctctacagtatcctgctacccatcctttcctatcggggccccagcctcgcccacgaccctgctccttcctgcccacccagtgtgtgtgctcataatctactgtgcgggtaaccacctcaaatctgtaatgatttataagccatacaataaaatattcatgagtccttatgagtaaatatagccggggggggggggggcaccagctatctgttgagcagaattccagtttctggggaaataagccagccggtgtgatactggccaagtcatttctaggaaccacaggctgccacatttgggttcttttcagtccctcccttaagcatccccatacccctctggcagggatgtcctggtaaaaggcagcctgttgtaatagaa

SEQ ID NO: 17546 - DNA, 1221 bp, Mus musculus
acacacagcagctgtgtgagtaacatatcttctgttgttactcctccttccagtttgagtgccgatgtgacactgaaatattgtaaagttttaaagcagctctgtagatgtttacagtcccaggaatcctgagagccacagccgcaccttcagcacccgggcctgagacaaggaaccttgctggactgagggcagtcagcctgcgcacttcatctgctgcaggtttaccctggaaggaggcatagctccctctggtcctcagtggcctcagctgctcatggggtggcagtgaagagactgactgccctgccctgcatttggggagcaagtgcttgtattccctgaagcccacaggcaccaagagatgcacatttcccccttctccttagaacctttaagtggaatgcataagtcttcatgtgtctgctttatagaagcatttgaatttcacatcaaaaataactaactttgaaaagtccagatgaaactgtcacattaatgggaccttttgttaatttccagctactgacagtctttataaactgtctctgcaaaccctcaatgcagacattttcttaaaacaacgccagacctcgccaacacctgcctctccttctctgcccaccgctccctgcccgttcacatctcgtggcagctacagcagcgttgtcaacagctccggcaggtaggctgctcacctctggtcatcacagtgacacatagaccccacgctcttgtgcctgctggtgtgaacccattttcattattaaaccccttacctgggacaagctcttcctgtgttccaggtacctgaccccagcactgaccttatcctgtctgtgaacaagtctgttactgtgttcttgagctgtgtggcaagcatcccacgacggagcgcttcacctaaagtgttgagtggagtgcatgagcaggctgtgacatctgtgtcactgccatgttacatgttgtagagtgacacactcctccctcggtgccagcaggcttagtatcacacaggcaccatgtcctccagacaggctcctgtagagaagtcaggaagctatgaccgactgggtgaagggggtttactgactggggacccccactgtaaccatgtctaggggacggagccctgatgaatggacttgtcccaccagccccaccattggctgatattctcacaggtttctttgccaagggggcaccttcaggttcttcaaa

SEQ ID NO: 17547 - DNA, 1141 bp, Mus musculus
cataggtcaagtaaagtaggctctactttgccagcccctgccaagatttccatgcccaggtgaggagttagcaaggcattgtttgagataaattcagaagtctggatcgaagtcaagtctgaagtccctcttttcactcgtgtgttgaaaagggagccacacacacacacacacacacttttcaagtgtgacctctgcaggtctgggtgctgctgctgaaggctcagttggaggtggtagaatcggagctttccaggcctgtgtacagtgtcagctccatgccgcaaggattgacttgttcagtattgtattcctggctcttggaacatggctaaggctatgctgtggttggctctgggagcatctggatctcttaagtcactaagctttctgttttatgctgtccttagtgacactgtgtggccactactgtcctaagggctttttgtaattccttactttagccctgcagatgatctgccaggattgggcccagctggggtgttagcaaccccaggtgatgcaccgccaacactccatctcccaacacatgaggctttgcctttctctgttgcgactctttaaagctccatcaccttttggcaaacattttcaggccagtttgccagatctgcggacaaacttgccaaactgtattgtaagagtatagtccattgcacaccagttgtgtctcaacaaagttgactttttaaacaacctcctcacaaagacaagcctgacaggcagctgtaagtcaagaaggaaaaattggagacagagtctagccgctcctaatagaactaagaacagctctatgtttgaagctgtttgatcaagctctgtttttactccaattttcatccccagggaaaggaaagtctctccaacaacgtaaggccaagcctccgaagaagcaggaggagaaggagaagagggggaaggggaagccgcaggaggatgagctgaaggacgctctggccgacgacgacagctcctccaccaccacagagacctccaaccccgacacagagccactcctcagggaggtatgtgggcgttcacagtggggcctcagactgcctagctcagtacacattaatgtctcctgtgtcatgtctctcctctgagcatgtgtcctgtg

SEQ ID NO: 17548 - DNA, 1141 bp, Mus musculus
agtttctctttatgatgggtttactaatgaaatttttttcttagtattaggttggaagttactgcttactgatttttcaattgatccatttttcagcttgaacacacttggctgcgaacacagtcatggtaggggtttctatagtaacgcatcatcccggcctggtacaggcagtcacaggcagtgtggcacatcagtccacccacacagcagccatggcagcaaaaactcagctgatgtggacaacgtcagaaccagaaacagttcaagtatgtcaagcaggacttctccacaagcagctgcctcacagtctacaagcaaaaccagccccctagtctcagagacagctgcagcaacccagggtcacacagcaagcaggaagtccagaggggcaaagcagggccagcacagcagccagcaccacagccacagccacagcccactggagcagcactcacagcctccaccaccagtgcctcagcaccaggagccaccacccgaaaggctgtctcctgcccccctcacacacccttcccaccccgagcgagccagcaccacacggcacagctcagaggactccgacatcaccagtctcatagaagccatggacaaagactttgaccaccacgactcctcccccctagacgtgtttacagagcagcctccgtcaccgatgtcaaaaagcaaaggtaaccctgtccaacccccttccaaagaacaaggcgtgtgagggagaaggagcagtcaggatcataggcagtggatacagcaccttgttaggtagctcagacccatctcctgcgggaagcaatggcctctctgtatcacagtgcaaacggaagcaactgcttgtcatgaaacttgttcttcccttgtttctccagacagaatctgatggacggctgccggtgataactgttacagtcatttttaaaaattattttgaggccaggtattgctggcacatacctttaatcctagcactcgggagacagaggcaggaggatctctgagttcaagacctgcctgttctacagagcgagttccaagacagcctgggatacacagaaaaaccttgtctcaaaaaacaaacaaacaaaaatattttgaaaacagggctaaaaccaaaaccatctacctc

SEQ ID NO: 17549 - DNA, 1196 bp, Mus musculus
cacatgctttcagccatcaggattccagaagcaaaaatagtgtttccaaatgtgcatacctgccttctggtcctgagcgtgtgatggatgctaagagtcccaggccttacatcagagctgttccacttggctcttttgcaggtttattctgaatgtgaaaagtaaaacataccctttgaccatggcaggtcagagcctgacagggaaggccctctgtgagcctaggctgtgggaggccaaagcaagggagcattagttctaggccatcctaaactacagaacgagttcggttccagtcaggagtactgacagagaccttactgcccaaaaatacatatatgaaactagttaattatcaatacaatggcagaccccagtggattgttcccggatgaaaccttatgaatggctggtctttttggcatgtggggtggattcataatgtccagcatacagaagctcacaacatgtttacactggaagcacataatagcaagatttatctatatttgtgattttttcccctctttaggtttgaaactaagagaaccaaatttcacattgaaaagaacattcaaagtagagaatacgggacaacttgaaatccgtgtagaaaccattgagatcagtggatatgcgtgtgagggatatggttttaaagtggttaactgtcaagagtttgccctgagtgccaacgcctccagagacatagtcatattgtaagtacgtccttgtctggctcaccacagagtggagctttccactgctgctagagtcagttcactactgcatggagatgcatttccagacctgaagggtctttacaggggctacagagatgagcactggctgctcttccagaggagctgggtttgattctcagtacccacatggtggccaacagccttctgtaattccagttcctgaaggaatctgtcttcttctggccacttcagggactgaatgtggtgtacagatatacatgcaggcaatattttttaaaagtctatcacaaatgtatttattttattttttcctacctaacatcaactaaaatattccatgtttttgtttccagcattgtaaaacttcctctgcccttaaattggatcagataatcttagcaactactttttttagaatccaatttcagtattacttctacggttgtaaagcctaagatgttagtgtgactt

SEQ ID NO: 17550 - DNA, 1147 bp, Mus musculus
tctagtctgtggctggtatctttactatagtctctagaaaactttattattattattcactttaatcatatctgacttttctttcagtttatggctgtgcaggcttatgttcctgcattacagcttcaaacctcaggctcactaacattttctcctaggttgatttctagttttagaattttagctctcacataagctttagtgttgaagttgatgcctataagtactgagctctggaaatttccttgtctatatggctattcatcttcgtatggttcattgaaaagattattttcccctattgaattgctacatcttcatcaaaaatcacttgacctcatgaggtggggtttgttttctgaagtctgtgttatctgttgtgtttatatcagtgttacaactggtcataatgactatggctttaagaagccatgagaagagttaagacacccactctttttttgacttttttcaaaattcttttaggttctttactttcccacaagatagaatcatcttttagatttctaccccccaaaaagcccgttaagattttgaaaataaattttatgttatttattatgtatgtgactatggaggagtgcgtgtggctcctacatggaggtcagaggacaccttgtggacaggccatcaagccatcaaacaccctaagctctgagcgtctcactgcttcccaaagctctgaagtcagtactgcatttctaggtaacaggtgctcctggcgtttacatactggtgggctgcatttgcatataggattgcacagatgtggcagtgaccccagcttttcttgtgtctttggatgaatcattgattcagaaaggggttggggactttgtattcttctggcttctagtagagttcatttagatgattttttttttcttttgagagagggtctggagagagagctcaacagttacgagtagtactgctcttcaagaggacccaggtttggttcccagcaccctgtggtggttcacagcatctgtatctgatgtttccttctgatctggaaggaaacaaggcatgcacatagtacacacacatagacacacacaggcaaaatacttaagacacaaagtacaacacttaaaattaaaaaatcatatttggagaaattcat

SEQ ID NO: 17551 - DNA, 1168 bp, Mus musculus
cttgttttgagactggatttcgctgggtagccaaggctcacaaccctcttgccttagattcctaagtgctggatctataaaattgttggaatagtaatagagatacagaatagaatccaacttagaggagtcaaaagacaatagttgcttttcggctttcggctcggaggaggctaaggtgcatctttctttggtcgtcccgaatccgggttcatccaacaccggttgcctccatcatgccgcccaagttcgcccccaacgagatcaaaatcgtgtacttgaggtgcatcggagaagaggtgggcgccacatctgccttgacccctaagataggtcctctgggtctgtctccaaaaaaagttggtgaagacattgccaaggctaccggtgactggaaaggtctcagaattacagtgaaactgaccatccagaacagacaggcccagatcgaggtggtgccctctgcctcagccctgatcatcaaagccctcaaagagccaccaagagacaggaagaagcagaagaacattaaacacagtgggaacattacttttgatgagattatcaacattgcccggcagatgagacaccggtctttggctagagaactttctggaactatcaaggagatcctgggtactgcacagtctgtgggctgcaatgtggatggccaccaccctcatgacatcatagatgacatcaacagtggtgcagtggagtgcccagctagttaagaagcaacaagaaaatatttcaataaaagactatctgataaccaaaaaattaaaaattaaaaaaattaaaacatttaaaaagacaatagttacagaagagcaccatgggtagtctttacggtgatgaaacaggttggtgtgttgactgtggtagtggtcacacgaagctctgtgtgacaaattactcagaactaagcacacagaaagaagactaaatcaaggattggagagatggctcagcaggtaaaagtgcttgcccagcaagggtgaggtccagagttcagatccctagtgcccacataaatgcttggtgagtgtagtggcactcctgggattccagtactgagaaggtagaggtgtgaatgcccaaagcaagctcacgggctcgactagtgagctctgggttcaaatgagagacactgcttcgataaata

SEQ ID NO: 17552 - DNA, 1196 bp, Mus musculus
tggaaaatcttttaatgcttttaaaatagatccaacccagaggccatggcgatgcatgcctgtaaacctagtgcttcgagcagacagcgaaatatcagcagcattttgattattgatctgttcaggttttaaacttgtacatatagattagattcagcagcagcactctaactcagctttgtctctttggctctaggcatataggaaacaggcatgctccaaggtcatgcctaggctgtccacgagcacctttcaaatattcaggaatccatcaaacgagtcacccaatggcactggccatctccacagttcaatgtcttctgctatggccgtgttgaccacaaaggctgcacaaggtggaaggaaacggtgactcacaaaagttgtcctctgatcgtccatgggggtttcaatacatatgcaccagcattcacataaacacacaataattaatataatgataataataacaataatacattaaaacatgaatttaaaaataatacatgtctatggccataccaccctgaacatgcctgatctcatctgatctcggaagctaagcagggtcgggccttgttagtacttggatgggagaccgcctgaaaataccaggttctgtaggctttttaaaaacaaacaaacaaacaaacacaaacaaacaaacaaaaagacactctctgtatctttaagggatgacaggtagactttctaagcatctaaggatagaagttcatcaatttagacaggaaaaactatatatatatgtatttttttttttttagtaaacttcaaatgttttgtacatttccaatagattacttttagttttttttcaagttgaaaactggcatttccttcatttaggaacatgatcagccagctacaggggaggatagtggcaggcagctcagagatcattgatcacctgtttgccgcatatgtctcgagatgttgtttatattcattcttactttccaattgttagattttattatttgaaatattaataaagaagtacatatattattttgaggggcctagagagatggcttaacatctaagaacattttctgctgttcttccagaggaccagagttcagttcccagcacctacactgggaggcttataaccacctgcatcatctccaggagatgtgacactcttgcctgacctccatgaatactgtatggac

SEQ ID NO: 17553 - DNA, 1165 bp, Mus musculus
cagattctgatgaaggacaacctaattgatgaggacctagtcgcggccagggtagataccagggacgttgaggagaaggtggagtacctggagtcgtccctggacatcctgcagacgaggtttgcccgactcctggctgagtacagtgcctcccagatgaagctgaaacagcggctcactcggctggagagccagatgaacaggaggtgttgtggcttctcacctgacagggagaattccgaggatgcttcaaagactgactgaaaatgcaggtggctctgcctcctgctccccccccccccccccggggccagctctctgggcgacactatatagcctcggggtaaagggtttggctgtggtttcgcctcagtgctactcatcctttgggagtggtgtgacagcaaggaagagccttagtttcctctcctatgaaatgggactcatggctgtcggccccagaagttccagactatcatgaggtggcgaaggttgtggctttggaaagcgtgaagagttcccaacccagtgtataagcatatgtgcacatgattctaatgttgttagttatgttggcatatgggtatgttcagttgtcggcggaggtcaggagagggcgttgcatcccctgggctggagttacctgctgttgtaagctacccagcatgggtgctgggatcctgtcttcattagggttactattgctgtgatgaaatatcataaccaatgcaagttaggaagaaaaggtttttttttcggcttacactccacatcatagtccatcattgaaggaagtcagggcaggaactcaaactgggcaggaagctggaggcaggagctgatgcagaggccataaaggggagctgcttactggtttgctcttcttagcttgctaagcctgctttcttatagaacccagaaccaccagcccgggagtagtcctacttgcaatgggctaggccctccttcatctatcattagttaaggaaatgctccacggacttgcctacagctggatcttagggaggcattttctcagtcatcctctcagatgactctaacttgtgtcaagttgacataaaaatccgaccagcacaaatccaaacgtgtagtccttcccatatttattgaggtgaaggtcctgctctgttacccagtccagcct

SEQ ID NO: 17554 - DNA, 1145 bp, Mus musculus
gaggatgttcttgatggctgctgctcttctgtttcattttgtgtaccacaaccctgacacccaaggtgcagtgactcagaagacagacagacactcaatgaaaaaaaggcagtatgaggaaggacataagtgtgtgtgctagtcagctgtgcactgtggaccagcccagcgagtgtgtgtgatacacaggcttatgtctgcggccttgatggagtctccacaccgttcttgtccttttctgtaatttttatcagatggttctgcccgttgatgaaagcttgactgaggccttgggaatccgatccaaatatgcttctttgcgaaaagacagcttactgaaagcaggtaagcagcttcctttcatgtgactggccaccctttactcccacccactttgattggcacactcatgccccaattggcacctatctgctgttcttcatcaatatggcattttcggcagtatgcagagccagaaatcccttgaggaaggggctccatttcactcttattagatattgactttagtgactgaccatgttccttgctgttcagagttactaccatcgtctgacagcaaggagtgtcaggcactgcttggaggggcttgctttatgtgggtttggggttttgagttttgttgttgctgtttgcttgcttattagttctcttgggaaaacagggccatagagtcactgagggcccaaggaggagcggtgcagtgggtctgcagccgtttcacccacagcctatcttcttgcattcccacctcagtgtttggtggtgccatctgccgcatgtaccgcttcccaactactgatggtaaccacctacggatcctggagcagatggcagagagcgtcctctccctgcacgtgcctcggcagtttgtgaagctactgctggaagaagatgcagccaggtgaggccaagtggatggacacttaccactcatgagcacgtgcctacgacaggctgagtgcagacccaggctcttcccttgctggccccatggccccagccatctgaagcctgtttgctcctctgacttacagtttggcgggcaagaatttacggggctgagcttgaagccccagaggcttggctaacatcagcctatcttcccttctttctctctcttttcc

SEQ ID NO: 17555 - DNA, 1102 bp, Mus musculus
tacttgatattctcatgttcccaaacccacccaccataaatctagcccttgcattctctccccaagatcccctgatcatacttggaggatttcccctgggctggattcctctaaaagagtaagtaaagtctaagagccgcagaagcagttagtagtgaaaaccagatgccagactgaacctataaattgggctgggtaagcctgtcctttgcagatccgagcactgcaggatcccagggcaggtctcacctctgtgtctccacataagcaggtctccatgtcactcctagtataagcatagtgacagctctgttgcatctttcagtttagtgtctcacccattgccagctgacattagtcaccagacagacagtcaatgattctttgatagatgcccttccacctcaaagcatgtgcttcaagcctctaagaccattttgtttgcttcatttgcataggggagaaagagtccatagcttccttccatctgcattccacggcctcctggttgctaccctcctgatactatggagatgactcaggaaggcatcatttccagggttgtgctgtggccaagcagagagagaccatagacagtgagggcggcctgcagaggaactacagagacagcaccctctgtcccctagagaccaggatgtccatagctctttgcagggactctttctctggaccattgtatagtaaagagaagcaatggctggttaaagaaatcccccctgggcaggggggctcctgtcaggactccatggtctactctgttgtgccagccacccttctgtcctacttggccttggctgaggggataaatgggtcagaaaggcaagaagtggggttccttgttcctcctccagggctgagcagaatgcagcacagcaccccaaaaggcaggctttgagaataaaccccagcactgggaaatttgcatttccttttttccctaacatactaggaagaccgggggaccaatctgcagtgtgttcttctttcatgctgtattttaatgttattaaggctttttgctcatgaaatcaagccaaatatctattcagaatcatgtctacttcagcaagaaatgaggaga

SEQ ID NO: 17556 - DNA, 1192 bp, Mus musculus
gtcggcgagaaaacacaatgaagaatgttggaagtcgcaaatatgcatttaactccctgcagctgaaggccttccccaagcattacaggcctccagaagggacttacggaaaagttgagacatgaacacacggtttcctctaattagctgttacgtaatcaatgtgggtccctgtagtgtcacataagattcttcaagaagacctgaaggattggcttttatttttgtgtttttaaagacacgtcactgaagagtgtatggagcatgattttgtgctggaatctgtagggtcacatgtgggtcaatagcgtggatagtaatggctgctctcaacaccagctttcagctgtcactgtaccgttaatgtcatagttcctagatgccagctaggtctgctaaaactccagcagacttttcaaatatccacttagccctgctcaccccgtttatttttctattcagtaactcacaggtgagcattgacttaaactctgctttaaaaaggactgaatataaaacaggaagtacctacccccttacacttcaggtccttggtagaacagtagatgttaactcagcttgggggaaaagaacctccaagctatgagagaggctggttctagtggccctcaaaggccgccaggttctgtgaaacccaaagtagaaagaaagcttggttggtcatatcaggagctcacacacctggggccacactgttcctgccccttacaagtcatagatgagtgtttgcttgagatgtaaagccagctgtgaggtccctggacgctgcttcccaccccacctccacccctgtatgctccatgtatatttagctctaccccacagggtgtatctccctttgttctctggcaatcaggaccttcaatgtggcttgtcatgggtctgggagacaactctccagatggagatttagagccggagagacagtcgaaacttagatattttcagaataaatgtgcttctgggaactttctaataatcttccagaggctgtatattatgtttgaatgtctagagaaagggtcttagtttctggtttgcaatgatggttaagtctcccttctgtttcacagctattgagaaacagttaaacctgtcccctaccttgagagtctaagaggagattatgggacaggaaatgagggatttcatacactttagtctgttcatc

SEQ ID NO: 17557 - DNA, 4113 bp, Mus musculus
ggctatagagtaaattcaaggccagcctggacagcttcgtgagaccttatcaaaaaagtatatgaaaaggacagaatgtagctcagcggttgagtgcctgcctaacatatgtatggccttggattcaatgtatagtatagtatagaaaaatagataatttatgtatttttacaaaggcttacaggtgctttacctggctgtagcattagccacatgctcagccgagtttcttctttcataaagttactgacgacccttaccagagctgtgcttattattccagatgtggttaaatgcatgcatgcttcttttcagctggatgccagatcaagattcagagggagaaaaggatattgataacatgctgaacgcaagatgaaagtcacccaggattttccatggtccttaacagaaaggaaccaaacgggaagcacagcagctgccgcatctcttccacctctgggccaggtgttcctcccaaggacaccagagaaaatggatcagtgctgtttctgaatgagtctgctggctgaagtcatttatagaagatccatgggactaaacaactatgggctaagaatgtgtctggggaattacctaatgaagagattatgttcaaggatgactcttcgatcagattacacagtgtgtgaattcaggaggccatgatgagattggcatagatagtggctcctccaactcttttttctgtttcttggtttcaattttaggccaaccccctcctcataaaggggtgaaatcagccatagaccacatcctcaagatatgggtgggctccaaaaaggagagcataggctggcccacaagtcacaccctgctgaaggacgctgctccttcctgggtcatatgcttggtgatcttggctagatcctggtcgcatgtactgtgctgacaccatgcacaatcacataagataagttatgggcctcatccctaaacactggaatgcagcaaatggacacaacagatgttcactctagataacaaatgtcaatgacatgaagtggctggaaaagtttagaatccttaacatattattttgaccacttaacacagtagaaagccatcagggcactaaatcttcagtgtgattcttgccattgaacagagtggcaattctatattgttctgtagttcactggggctaaagcagtcaaggactggaagttcacttgctattttaaaagtttttgaagctatgaggattccctagggtgtcactgaggtctgctctatgtactgcccccactgggagtaggaggtactgcacccttgtgctctgtgtactgcccccactgggagtaggaggtactgcacccttgtgctctgtgtactgcccccactgggagtgggagtattgcacccttcagtcctgccacctatgtcccaagcttggtgtctgtgtgcagtgtggaggagtgcacattctgcatgctaggaagctcgaccattgagccacaccttccactagtgcttcagtttcaacagagagtgaaatgtgtttgtatgaaatgcctccatttgagtagatagagctttatttggaaaaagtcacatgtctcataattggactttgacttagacaaccccatggagtttagagtgttcgtggagcatgctgcagtcaccactatctacttccagaacagtctcatcctttccagaaatgtaaccactggtcagcactctgccctctccctctggtccaggtctattagatgagtggaactatgtagtcctgtcttttctgagtcctgttaccaaattcgacaggtttattggcatgtagcatcagtctgcagtgtagttctgctgagtagcatccacagtagacagacactgtgtatttctccatcgagcagatgagctctgagctgtttctactttggggcttttgactaatgctatgaacgtttcatttaatacatgccttagagttgaactccaaggtcgtatcatgacggcctcaattatattttctacagtgattttaccacatttcatgctgtcatgggatctaggctccagcacccctgactttcacaactgctcatattgctgacagccattctgcttgtgataaagaggcatctattgggatcttggttgcatttctctagtgtctaataacctgagcagtttttcgtgtgttcattggctctctatgctgcctttgcagagtgttttctagtctgcagtctggcttccagttgggttatctgtttattttcctataagattttttatttactgttggctcaagtctcttaaagattaattggcatttttttctcaacgtgtttgtccttttcaatctcttgctactctatatagcacagtctttatttttatacattcccttatgtggcttagcccaggctggccgggaatccccaaagcgcgagcattttcagcgctgcacttcccagaaagcacacaccgctgctcttgactagagcagttttcatattggaaaatgacaatgtcttttttctttcactctaagaaaccattcctaacccaaacttccagaagcttataaattttacctcttacctgtaggcctgtgctctcaaaattattttacacacctttattcatgaccatatttgaaattagttaaatagaaataatacattttagtatggctaagtatgtagctccgtatatattgtgttcagcacattcacagtgcagtacagtacagtctgcctgccgcactgttctgcatccacctcaggaaatgcaagtgtgcccatctgaggactcccagccactgccaggtcgcccgccctgccctgtccttggcatactctctcctcatggtaaccaccattctctttcctgtttctgaatttgagtaccctaagtgcctggtatatgtggactctttgttgtgtgcatgcacttgtgtgtgtgtgtgtgtgtgtgtgtgtgagagagagagagagagtgtgtgtgtgtgtgtgtgtgcctccagcgcggaataccatgaaggttcatatcatatatcggtttccttcctttgtaaggacaaatggtattgtagtatatgttgtatgcatattgtatgtatcttgttacctactcatccagccgtgggtacctcggttgttcccaccctggagctcctgactatgctgtgaacgtgtatatacaaatacccctaggacccgctttcagtcttaacatacatgtagcagattgtatgtcatagggtacttctgtttttattagtaggcattgccatagtttccatatcagccacactattctatgttctgtccgcagtgcacagagattagaactgcctatgtccttgtgacttgtatgccattctagaagtcgttaagatccaccagtgcttctgcttcctagttccctgactgctggtgtgttctagatgcttggtggctttctttatatagcgtttgaagaaattgttttaggtctcctctgcccgttaatagttgactctggttgaatttttggtcatcacatctacaaaagcattgattccaagggagctgactgtagcttgccctgggaattttagttttagttcttagctttgccctttgatgcattttgagttaatctttgtgtgtggtggaagctctgactttctactctccacatgtgcatatctagctttgcacaatgccctttggagggaaaacatggcgccatgcatggtggggccggttttgagcccagtctctcctgactctgtctgccttcatgccaacgccactgctttgattactggagaattactatcaaaatttgaaatcagaaagtgtttgttctaaaataaaaatttgaatctgaaaacatctttgttctgtttcaagattatttggggtataactctttgagaatctgtatttcaggatatacattttgtctatctctaaaaacacaaaagtgctgttggcatttgaatagggactgcattaacctcctgagcacctgggtgcattgacatctgaacgtgattaactcctcaatcaataagacacttactggtgtctaatcacagcaaaactgtcaagttttcagtgtagtagatttttctccttttttttcttc

SEQ ID NO: 17558 - DNA, 3643 bp, Mus musculus
ggtttcttaactcgaagtacttttataatcacagcaattctgaacaaaatattttcagaggcatttgtcattcctaaaaatcaagattttaaaagaccaatgttctctcgagggttatattactgtactgtgtatggtgtgtagccacagaaaaccagtgtgactgtcattgtccaggtgggaagcccctgccgtgtctccacagactccttttcccgttcatagttcctttcatgtgggtgatgagactcccttcccttttgctctgtctttaatcagtagttagacaaactgtctcttttctccctggttggtccttttctagatctgtggtaggttttggagttcagatactgttttctgagtaatgctgttgggtgtgtcctgttgggtatgggactcggagaaagacgaccgtagcacttctgtttccatagcatgatttgctccgctgtgtcatgaacgtggaggtaaatgctgtgtccacagagtgtttgtgcatcctcactttgcagtcccaagtagcgctagttggcagaagtgctttactcttatgattaggaaggccgagcaacagttgccagtcttctctggctctccagaaactgcgtgtacagcaggtgtggtggaggcctagggctgtgggaggtcccggctggtagcctccgtcgggggctttcttagttgcccagtgtatgggacacacagaactgagtggaagccattttgtatgttctgcctgggaaaatgtagataaacactactgtgcatgtcaaagcccagctgaagcttttcttggtgttaagtttcccctctcatttccttcagctttttaataattagtactgcatttggcacttttcctatgccctgtgcccacaaataaatcccactatcttcccacactcaagtgtgcagcagcaggataacagactgtgaaaccatgcagatgggcacaggggccccgttaggtctctgctttctcagtggttgtgagttcagaaggccaagccttgaaactccactggaccgtgtgaatgtctcctgcgtgggtctttgagcatatccacttacaaggctctactcatcagtcttgcctctaaggactcttttagccaagtcctttccttcattcaaggaattccccctttccccatgagctagttcctggtgcctggaacacgcctgagccttggcaggctcggttggcatctggattaactagccaggttgctcacatctctctcctagcgatgtctgcctactatcctgccgtgcacgggcacacacacactccgtgtctagtcttcattgtgtgtggtgtgtgttctccaatacactccaggctctggaggccagctctcctgtcttccatcacatcaggcgctctcctgctccctcagtgccagttgcttcctcctcttgtgcccagttcagcactagactattggaaacagatgtttccaatagattttgtgggagccctggaggttgatgaggatgaagacgggggaggtgaagacagagtgcttagaactgtaaagtgttcatccacattatcccttggaggccaccaaccgactttcacccacatagtgaataggaaaagtgtcaaatgcagtactaattatatctgtgaaataggtcatagttggtatcggtgggtatttcacatagcccagactctagagcagtgctggcctctacagaagccacaaaacacatctgttgaaatgaaaagttgagttggcagcctttggagtgctcagtggccacatggccagcagccaccatattggatcctaggaatatgggacatcgacatcacggtgggaggttctgctggatgtgtaaacatgagcattctagaaaggagtagtaatgtatcctgctgctgtggttaaaaatagacctatggattcatcgtagtgcaggtgaaggtgtgtgttttggtgggacagtcaagattacccggctacatgttagtgtcatccttcttcccagcatgcattgcttcgggatcctcaagaggtacgtttgaaaagcatgagaagtgaatgcggatggatggtttcgcttgtaggttagacgtgtgttatgtccatcagagtgtgtttgaacaaaggttcttgaaatcattggttcttgaaatcattggtaaaaagattaggtgtgcttatctcaaaagctatcaggaaagttgggagactagacttctttttaagtctttcataattacgagaactacagttctcaacagtgctgtccctcaaggaaaagttggcttatgtgcaaagtgttgttgttggcaaaggttgttctagttaataagtgtgtatctgtcacatgcaggattctaagaacgacccctcatgaccttgtataatatcctccccttctgagtgtatcgagaactgtgaccacatctgtgggtgattggcccaatcttgagagccatgtcaggctggcagaagtgagagacatcagcagcagaactctaaacagcatcgctggtctaagtggaaggggctcccctaaatgactgcaggtcacctgccttaaggagccagaggctctgttacccaccaagtgggacctgcagaccttttgccataggacaatttgacccagacacttacccaggcttggacatggaaatccttgagcagccagcctggtaaacaccttcactttagctttgtaagtgggaacctacctagacttctggtgtgcagcagtggataataaacgggcagtgctgtatgtggctagatttgtggcatttttaaaaagcaacagaatctgtcagtcctgagaagtctccatatatgattgcctgcggtagactagtttttaagacaaggtctcaccttgcaccccaggccgattctcccggttctgcctctcaagtgctgatgtgtatcaccatgcccggctgactgatggtttttgacataagaataaactcattcccagcaagccctattcctgggtctctgctaggatgtttggtgccaggacccgtgtctcctctacaagtcagacttgtattagtttttgttctgtaaaactaccagggtgaggctgtaggcatctttttctcctagatgctcctaaattatactgacttaaaggcctgccagaagtacaggaaagaatgatgaacggtattttagaccagactgatggagaagaaaaattcccacctttgtgttgacttgctggtgtgtctaacctgacagtgcagcgtgaggctgtcatctacagagtccatgctcaagaaccacatggtgaagttacaaaaacaaggacactgttaaaagctctgagtaagtttacaatcttgtattgtgccattcattgctgtcccgggccacaggctgaacacacctgcaagagcttcggctgtgacaggtgtaattttttacaaaaatcattcagctgagtagctcacggctcaaaccctgtatgttcccaccaaggttttgtgtttacgtggttcctaaaatacctgcacttccaagctattaactgctaatgaggtttctgatcttggttcactcagccatgcttcttattaaccatgctgccacagccttgaaggaaaggaacccagaggttaaacactgtcctcatcctcacg

SEQ ID NO: 17559 - DNA, 1303 bp, Mus musculus
taaccctctggtcacttacttctctagcatcattgatttatgctgattccaggctgataatagttcatcccatgagtctgtcaatgtgtgtagaaatgtaaacagtgaggtgccacacaggaagagtcgtgagttcagtcggaactcaaacacacagtgttgcctgtcattggcatggattcagcacagggtcagtgcgcccaagacttgcttttctctctgccccagcatgcagagggccggggtgtcatctccatcaccacaaagatacttataataatgatcatgataaccaagaaactcaaacgttgatctaacacagatagtatatgaaactggtaacttaatattatgctttttatagtctagcatcctgggtatattaaatcataaagaataaaatgctcttaacctttgttttacttttagtggaaatttaatggagccaccatttcagagccaaaagaaatttgggacaaactttacaaagctggaaaagaaaactatccgaggaaagaaatacgattccgattctgatgatgactagactgtgctgtactttaaaaccttccgtctgtctgtctgtctgtctgtctacttcagagttaagtgtgttttctaaattcctaaattccactgatttcggcccattgaccatctgacactcttatcccagcctgtacactgtttgaccattttgtctgcagtcattgtgtataacttgagagaaacatactttaaattacctgggagggtctgaattctctatttttgtgattgattttatcataacgtgattcttctatcttcaaaccattcacatgtctgtttttaatctcctgagttagagataggaatttgcccactattgtaagagccaatgagtgaccatccactgggcaccacatgcacttccttgtccgtgatccgcttcgtggaatgggtttcaggaactgttaaagactcactcatggtgactctgctgatgatagcggcaggaaacccagggtgtgagcacatcgccttatttaaatagtcctcattgcacacgcacattatgagacctgcaaaaatataattaaaccgtttttgagtggtaacataaggaactccattggctgctcagtaaaacaactttagcaaaggtgaaatttctaaaagtgtgagtctggaaactatgagatcatatagcaaacaaaaacattttaaaaaaaatataggccatgtgcttagcatgaacagaaataatctgatgcccagaaataaataagccttggtaagaaaagagtatagcatcaactac

SEQ ID NO: 17560 - DNA, 1181 bp, Mus musculus
tgtagatctgcctgcctctgcccactgagtgctgggttaaaggcatgcggacagatacacacacacacacacacacaccaagtcagcttttgtagataatgcagatagatgactgttcttcactgccatttgaatcagatttatttaaactactttcagacttacatacaacttcaacaaaaattatttcctttttttccataaaacttatttttatgtgtgtgtatctgcatgtgtgtggctgcctgtgagagcctaacagtgggtagctggatccggagccacaggtggttttgagttgcttgatgtgactcctggaatcaaacttggatcctctgtaagatcagcgcatgcccttaagtactgaaccatcttcagtctctacaaaactttgatattaaagagaatattaaacattgtgctgtctgactccattttaagattattctttgggaaaaggaagcagtggtgtggtcaagctttggtaaatagttttgtaaagaagctttcattgtttcgactgctcttagactctgcatctttctcttccattgctagtttgacagagagaatgtccgaatcccagggatgctgattattgatactcctggacacgagtctttcaggtaagacagcgtttgccatcagacatgacttaactcagtgagccaaaacactggggggtagtcattaactctgaatagttccttggtatctgcagtatcataattaatcttctgatcatcattggttttataatgtttcctgtgctttcttggtttctataagaagacatgttttataattggaaagagcatcacttctgtgtaagaaaacttcttcatgaattcctgttctaatttctgcagactattacaaagggaatgttgttttcacttcactatattcacacacacacacacacacacacactcttagaggaacttgtggcattagcttatcccagcagcctcaattttcatgtctgttaggtgagtgtccggccacttaagggataatgggagtccttaatacacagctgcatgccctgcacgtccggggtatggcctgaggttcagggacagctgaggaaggtcacgttcatgccagctaagccagactccccttgttgtcaccctcgactgcatgtgtaacacctattcacccagcactcacactca

SEQ ID NO: 17561 - DNA, 1066 bp, Mus musculus
tgttcatttcggggtttttgtttgtttaatgcggggcttgagtgtttagataagcacttacctactgaccagcagtactctgggtgtatttgtggaatttaaaaatagctagacctgggccttctgttaatggtgctctgtgctgctcttgcttctagggtttgaatgctgctttgttttatgagaataaagatccccgcactttcgtgtccttggtacctacctctgcacatactggtgatggcatgggaagtctcatctaccttcttgtggagttaactcaaaccatgttgagcaagaggcttgcacactgtgaagagctgagagcacaagtcatggaggtaatcatcaggcttccttgccacgctacagcccttcagtaatggacatgcactgcttttagagttggtgacatgccttcagagagagagatatctatatatctatatctatatatgtgtgtcttgtttgtttgagaacaggttaaagctctcccaggaatgggcaccacaatagatgtcatattgatcaatggacgtttgaaggaaggggatacaatcattgtccctggagtagaagggcccattgtcactcagattcgaggcctccttttacctcctcctatgaaggaattacgtgtgaaggtaagcaaaggtggcgggtgtggacatgaggacgacacaatgcttatatctacagatgccattctgtctttctgagggctgcttggcataacacacagcacacatttgtccctgtccttgtgttactgcagaagtggacatgggtagtcaagttactaggactgcctaaggatcgacagccttgggtgctgcatggagagtcgtgactgacagtcttcctgtggaagtggagccattcttagtgctgccccttctcaactaaaaagcacttcatatttataatccactctatggctttgttgtgctgtcattctacgggcatggaaagtgcacttctttgtgcaccttctgctaacttgggcctgttttcccagtgtgtgcaggacacatctcagtgttaccccaacaggagttagaatcct

SEQ ID NO: 17562 - DNA, 1141 bp, Mus musculus
ccaaaatgtttgggagacattttgaagctacagatatacttgtcagcaaggtaagtattttactagcaaaagtagcatattttcagactgaaaacttcagaaatcttagtcccttttatctgtctggttgcctattgcagtagttcagagaactaaaatatggctttgggaacatcaggtgttgattctgatagacagcggtagtgcctcctgacaatctcagggactccagagccacagatgtgggcttctccctctgaaagcaggctgcaaagcaccgcctttctgttgcttaagtgagatttggctttctttcatggacacagttgttgtacctttggctcaccctgtttgtgcctgggctattgcagatcagccggcagtccatcgatgcactcaaagactggttcagagacgaaatgcagaagagtgactggcagcttattgtggagctgaagaaagtatttgaaatcatctaattttcccacctgggacagaatttggagtgatgtaatattatgttgtgatattaccaacggaacagacgtttggacgctgatggacttaggtgtataaaatgttttccatgagaaaccaagcaacttacactggtttgacagtggtcagttccccgccccacagtccagcgtgcctgcactcacccacccttcctttaagacttggctgctgttttaaagtttgcccttccttcaaatttggatttttattacaaatctaaatctttcaattttatactgattaaatcagtcctgcagtatttgattaaccaagcttctacagattttgtgattcttgggactttttcgatgtaagaaataagtttatgggtattctttccacagtgacttacccttctcccacccttagcgacttttctaactagaaaatgtaggtagggacttcgctttttccttctgctctgtgtgcagccatggctggctacaattactgcttgtactagtcaggagagctcattggaacaaactgccaataaagaggagacactgcagtcgagtaggttctgctaggcctccattctagctcatcagcacctgctaacgcttgccctcagaggggcgctctgcatacattccattgtttgcttctgcatgattagacc

SEQ ID NO: 17563 - DNA, 1146 bp, Mus musculus
ccagatctaaggaaaagaggcagttctcatgcttgagggagaaaccctaatgcttgtataaataaatacctttttatcttaatacttttaagccgggcagtggtggcgaacgcctttaatcccagcacttgggaggcagaggcaggcagatttctgagttccaggataaccaggggaacacagagaaaccctgtctcaaaaaacaaacaaacaaacaaaaaccttttaagtataggatgataatattttgggggggggggggattctcccatctgaaaaggtattttctgttgtccctttccatgggtgagttcttactgcaaggtgttgtgtgagtcatatgtggactcccttgtatgttactgactcctactctgcactcaccttcagactcgggcttcggtgcccatcaagatagggtagggactagctttttgaaggccgagggtctgaacttttactgttcctgaaacttttatttctgagcatcaagttcacatttggtattttacagattgaccagtctgttttagaagcgctcccacttgatctccgggaacaaatagaacaagtttgtgccgctcagcagggagagccacgtggaaagaagaaagaaccagtaaatggctgcagttcaggggtgttgccacatcctgttggaacagttttattacagatcccagagcctcaagaaccttgtaatagtgacagcaagattagtgtaattgcccttccagcattctcacaagtacgttgatgtcagggaccttcagtcatgcttttctcacctgtcctctcctctatctaattcctgaggagcttgcacttctgcagacagtggttggcacctcagcaccagagggaagagatgtgggaggcaggtgttggtccctaaagattctggaagacactctttgttgactttactggttcacacagatcatgagacctcctgaataggggaagatgcccagaagtgtccatgtgtttttggcttcccattttgtaaccgagtgtcttgttctgattagttagcacagaaattggattgctcatatccagtgtcttggaaggttttgtcctagctttgctgtttaaggacctgttaaagtgatttgaaaacagtctagctgtcctccagaatta

SEQ ID NO: 17564 - DNA, 1160 bp, Mus musculus
ttgatggacttaggtgacactgcaaaagggtcatgtgattcccaaagggctggtgacccacaggttgagataccctgcctctgtagcagtaatgcaagtgaattggtgtttcctgtccctcgaatgcacgtttgcattgggcacctctctgggatttagggccatacactgcacattccgaggatttgagatctggcaagttcttactctttggaactctcatgtaggaatctaacagtgttggaatacatatgttaccagggatactaatatttgcaacaggtcagtgacagcataaaaaagtaaagcaggaaaatggcttacagagtacttagtacactgagaacatgaccacttacagtagcatacagtcaaggtgtatgcacagtgtgtgttttaagtcaatgcatatgatagggaaataagatatgctcaatatgcagagctaagacacttgagaagaacctattaggttaaggaaaagaatcagtgtgcttttcatctttacctttgtgtagcccaaagaagcagaagctttccttctgagtctttcagaagaaattcaaagacgacttgaagctgctggcatgaagggcaaacgcctgactctgaaaatcatggtgcggaagccaggggcccctatagaaactgcaaaatttggaggccatggaatttgtgataacatcgccaggtaaacttattctttaagaaaggaatgttggtagttatattctgtgcagcttattataagtcatacaacataatatcagtagtagtagtttgagttacaacttaccaatcctggtgttgttaagcagcctgtagaggcaggcacagcccatggtcacttgacttaggtttaatacctattgcaaaatactgaatgtcaatggataatttttaaagaaaagatttatttagttcacagttcctggtgatgtaagaggctggtacccttcaactgtctgccagccagtggcatcccagtgtcaggaacatagatgacagacacaaggtgaggcaagaagctaaactgctctgaacggaccagtctcgctcctcctcccttctgtaaacaagtgctcaggacagcaatgacctagtcagttcctgtccttgtctctttaggcccagatcactgacaccagcatgactgtgaa

SEQ ID NO: 17565 - DNA, 1233 bp, Mus musculus
gttgtggttcagagtaaatgtggggaagccatcatggatgtctgtaggcatcagcatctcagcacagttccattctgatctctgtagtgtttgtgtctgtcctgcaggttcagatcataacaaagtctttgtgtgtgtgtgttttaaagatttattattatatgtaagtacactgtcactgtcttcagacacaccagaagagggcgtcagatctcattatggatggttgtgagacaccatgtggttgctgggatttgaactcaggaccttctgaagaacagtcaatgttcttaaccactgagccatctctccagccctcatagtgaattcttaaacaagaatgttaattactgatttgtggataagatcttaatcttgttatttgttatgaatttttttgtataaaatttaagttaatgttttgtgtatatgtaaataaatgaccaaaattttaatagtttgtcatttgtgtacatattccttttcctaggagttggacgttcaatggaatctaagcttgcatctttggggattaagacttgtggagatttgcagtgtttgaccatggcaaaactccagaaagaatttggccccaagacagggcagatgctgtataggttctgccgaggtttggatgatagacctgttagaacagagaaggaacgaaaatctgtttcagccgagatcaactatggaataaggttcacccaggtaatgtgtctttacatggtcctgtttctaacctcggaagctcttggtgattgaaataaacatataaactgttggtttactcagagccttggcaacttttaaggtagatccttaatttaaaaatgcaggtctcaaggaaagatataaaatactctgcttttgtggtcaaaagtgatttgaattacaattattctcattaccagtgaagtgaaaaaggccaaacaagtattttgagtgttaaaaattgtttcatacccaatctgggccagagccctgagcagaccttgggcctgaactctgcagccagtcccacaacacctggaggaagctccactctcaggctctcttaacactcccaggatcatagcagaggtgaggaggacacaacatctgtcccaactccaccgggaataactgggaccagtgggatccagggacttgggaaccccatctgaccaatggcacagattccttcctgtctgggccggaaccctgagcatatcttgggcctgaactctgcag

SEQ ID NO: 17566 - DNA, 1208 bp, Mus musculus
tggtttcgagattattcctcttgtctaccttgtcaaaacaagtagtctgttatcaagggagataacataaggttaggaaaaggaacagcatttccacttgaagatatgggtgtgtttctcctagccagcatttagacccctttgtcctatagagtcacaggggtttaataaataatagatagttaatagtggtattttgcttttagatgaacagctgtcattgaattgatgtgtgtaaacttttgttcattaagttttctgataagtcatgtttgaaattttgttaattgtgatccatttgccactttgaagcttttcatgtgtacagggtgttctgggtccagtcgtttctgctgtagtagttttggtaaaggattagaacactagctttgtatcagagtcagataactaaatggtggcactttggaaaggttaagattagaagatgtgttggtgtgctggtgtgctggtggtggggtggtgtttgcagtatctgacaactcccagagccgcccctaggtgtgactcactcactgccttctctttgtcctgatagctacacacacagcatcgaggctgtcagctgcgatgaagcactgattgacgtcacggacatccttgcagagacgaaactttctcctgaggagtttgcagctgccctccgtattgaaatcaaagacaagaccaaatgtgctgcctctgttggaattggttagtatgtggcttatttttttttccatttgcaaaatgtttattaattcactgcattcataagatgttaacactttaaatgtttatcatttctaagtaaaccagaataaacacttttatcagagatgtagctaataatgattaatactttttaaaggacctaaagttctcccaaattttagtacaggtagttttattgtatgtttcatctagcaggtatttttttaaaagtatgtagaaataattgtttccaactaagtaaatataccatgtaatcaatctgccaaatcaaaagcgctcgccaagctgaataataagttacaaagaaataataattctgggttacacagattatgcagtgttttcaaagttctttaagaattacccactaacataaatctctgacacttaacagttggaaggtaagtttcacagtaatgtaattttaacttccatttacattcattttaatatattactacgatgttaatgtcaca

SEQ ID NO: 17567 - DNA, 1609 bp, Mus musculus
ggttgaatacagtctcactagctctcatgttgactggagttaactagcgacttcagtcccatgtgctgtggtattgggtttaatgtgttacataagaagtacagtaaaactagaagcagggtctgagggaaaacttactgatcattttatgaaaaacaaatagtaaatacaagacaactcctgtgctttggaagttagaggtggtagatagtttttctatagaaagtttcagaataccagtggacatgcctgtgcctgcctataatttcagtaataaatgtcagtagaaggccatttaaagagtaggcaacttagaggcaacttagacgctctttttattattgaaaagaaaagaaagaaaatatcaatgtttccttagtttagacaaggcttatccttggttgaaacaaaaatataatgtctatggcttagcgtatttaagagggaaacagtaagtcacaaagaatttttttaaagctttcaaatcatatacattaacttagattcttcttatactttagaaatcacataattaagaagattgagacagaaagtgaagtgaaagcaaatggactgagcagctggaatgaagacggtgtaaatgatgattttagttttgaggatctggaacatacatttccaggaaggaaacagaatggagtaatgcatcccagagataccgctgtcatttttaatggacacacccatagttcaaatggtgccttaaagacacaggattgcttggtgcctgtgggcaacagtgttgctagcaggctatctttagactccacccaggaggagaagagggcagagaagagcaacgcggacttcagagactgcacagtgcagcacttgcaacacagcaccagaagtgcagatgctttgcggagtccacacagaactaattctctctcaccatctttgcacagtaacactaaaatcaatggtgctcaccactccactgttcaggggccttcaagcacaaaaagcacttctgttctgactcttagtaaagtagcgccttcagtgccatccaaaccctcggactgcaacttcatttcagatttctattctcgttcaagactgcatcacatctcaacatggaagtgtgaattgactgagtttgtcaataccctacagagacaaagtagtggtatctttccgggaagggaaaagttaaaaaaagtgaaaacaggcaggtcttctcttgttgtaactgacacaggtagatactaaaattgttttcttcaaaacagttctatttaattttgttcagatgttttcattagtattctaattattacaaacttcttaatatagaaaaccttcaggaataccaggttatataagttatagtaagtatacctgaaaactttattacttttttaattttagatttaattgtggtaacttaaaatgttaggtcatttcaacactgtcagaactgggattccaagtattccttcctcatggagacttttatacattgttggttttgaactgtataaatataacattttatattccatgcctaatctcctgtgagaatgaagttgattggtaagggtaattgtgaatttctagaagcctgcttcattaaaaattaaac

SEQ ID NO: 17568 - DNA, 1207 bp, Mus musculus
gttagcagtgtgtaagtgagctttgtaaacctaagacagaaggaagtctggacttatcaaaagagaccatcaacatttaagtgtcttaacagttgtatggatgattttgtgacttttaaagttacattgttctgaggaatgtatccttagaaaattgataccaggaaggagttagattttgtcataatacaagctacattgtatgctttccttcttggtcaagaagagatgatttgaaaaacctatgtatttttaattgcattcatttattttgtttgcatatggctatatgtgtcagtatgtatatatagaggccagaggacaatttgtgaaggtgatcctcctaccacataggttgtggtgaccaaacttggattctcatgcttgataataaatgcttcaacccccttttaaaatgtacatttattgatttgtgtatgtgtggaggtcagaggacatctggtaggagtgagacttttctttctactgtttatttcccagctattggactcattgcatcaggcttgactttaaggacctttgcccactaagctatcttactggctcatgaaaaaccttttataggctggtttggtcctgtggctctgtgtatgtgagcttgcatgtgtgtaggccagagggtgttggtgttcaggtgccatccactgtttttttgttgttgtttttgttgttatttatttatttatttattttataaaacagggtttctcactggctttgggatttggacaggtaggctatgctggctggctaaggagagtattaagtctccgtttcaccagcgcagctgtgtaccaccaaaccaggttttgctgctgctgctgttttacttaggttctagtgtttggattgaagttgaccgtctgtttatctatctgtccccatggctttccatgtgagtaggggtggacaaaaaaaagtctgatattagtattgtgtatgattgtacttgagtctagcatgaatatgaaccaggattttgctctctggcttagtctttcttgatcccactgaaagtttaagaggaacttcttgaaggtttattcatacaacaatggttatatactatctaaactctcattcttacatctgagaacactaagactgtaccattttcaccttttaggcacagtctgaattatgtagctgagattttgatttaggttcgttgagtgcaggatcttct

SEQ ID NO: 17569 - DNA, 1196 bp, Mus musculus
tattcctttatatatgtattttatgaacatgtattttaagaatatccacagtagtgggtttatggttttagtcttctaaatggctaaacactgaggactaaatccagacataggaacgccattatctctggatgtttgtcatggagctgttaaaggaggatgggcactctgtcaggtgctcattcgtgtcactggccacacccagcaatagtgtgaggatctagaatatgggtggatcccgttggtttctcataatttctactttctgcagcttggatgtcctgggatcctttctcttctgcactggcttagcatatggtcaatttggcacccactagagtcctttggggagagggatcctcagttgaaaaaatacttccccaagactggctatagtgtctattgtgcattttctttatgagtgatttacatggtttggcccaggccattgcgtgtgtggccatctctaggcagtggtcctgagtacctcaagaaagcaggctagcaaacctggagccagggagtccgcaagcagcacctctccatagcttaggccttcagagttcctgctctgacttccctggatgatggactacaagctgtaagatgaaatactctcccaccctgcaagtgtcttttgctcacagtgttttactgtagcagcagagaccctgaataagataagaagtaaggatcttggccagctttctgacgtgataacaaataaccgagacaacttgtgaacagagaagctgcattttagattaatctgtgcaggtctcagtctgcaattgattggccctgttgactttggtctgtgctgagagaaactgttctcctatggctagggcatgggaacaagagagactaaaggactgggctccctgatcccagttgagaatacacgtgatcaaagaccttccctgccacccttaccttgtgagatttccacctttagtaggtttccatgagccataactatgggtctctggaggtccttgaagacctaagtcagcagtggatgtggtcttggtcctttgagcttgatgtgtactgatccttatgtggccaatatgctaggagcagggtaggcttagcctggcagctgtaatggctgagctgtcaagaagatctgtctttctagaatacagaaggaaacagaagagtctcttctgagttttccccctgttcctctc

SEQ ID NO: 17570 - DNA, 1175 bp, Mus musculus
acatacatattgttgatagttctgtgtgacctgctctttcctctctgggaagaaatattgttagaacattcaatcacctttatcactcacaggggaccatcgaccatcggcttcccagatccagcctctggtgtcccagcaggagattaacaggaaaagggagagagtagggcaagaaccacacatcagagaggcagttttacctcctcatctcagggcaggggtgtggagggagaggtaacccggcttctcgaacgggagctgcagctctttgagacggtcatctaggctgtggtgggacactaggttttaagctatctgtgactctacactggtcataccatctttgatagagaggtgtttctgtctatgatggaaaggttcaggaggcaagccttccagccctgggaagttatctgaactcttgctagaaaagaaattcttccacacagcctgacagggacctgacagtcatcttcctccttgactgcagaagccctaagagtctgtcctcattatctcagtggtgacattttaattgtcactgtattagataagatatctcagcttgtagatggagagctaattgaggataaggcgcagttgggagaacaagccagggacatttcaggtgcactgtcaccatcaactctggggacagtgcctgtgtgctgattggacagaaacatccttgtcattagaagaaacttacctggctcctgaagacctgtagatttctgtggcccactgtcatgctataagtataataacctacttctaaacctggagtgagagaggaacactgactgtttgtgcaaaaaataccctgagttgttggggatgttggtatgaccaagtagccacattgccctgggccagtcctccaggcaccaaagtatactgaccacatgacaacaccttcaaaaaccacggacgagatagcagtgggaatccccagactgtgttcatcctcacataaaggcatgatagtgtagccagagccggagaacagtacaatttagaaacatttattaaatattttgagattttcctttaattatagtgaaacattctttctccaattaaagatttggggaggggggaggtattgttgttgctctgtctcggaatagcatgatttttagtctgacggtatttaaggggtaaaaatattt

SEQ ID NO: 17571 - DNA, 1210 bp, Mus musculus
accatgggactttgaataaaaacacgcatctcatttactatgaacctttgacttcacccttgagaggggataaaagcccttttgagcaagacattccacgcattaagagttcaactctatttagcatttatgacatcatctgaccacttaaaactgtaactcttgtgacagaaatccttgactagagtttgctcatggcagttaatgggttttgaattattctttttctttttgggggggaaaaagtaggaattggtattgttactgtttctgtacggaagtgtctatccagtgtgaacatagcttctccacgactctactggaagttttgtctgtgctgagttagtgttggggaggttttctcctacctgctgacgtgttagcttttataacttaccgagttcagaaccattatgctgctcttcctggttctgtccacctcttttttcccctcagtgttcttacgtaaaagcccccatggcagtgatgctaaggagaacaacacaagtttttgggattcagtgccgaagagaacgtggcatgattgtcacgttctctgttacacattgcactgttgggagcagaccagtagtcactgggtacttttaggggattcttggttattggacaatttcagtagcacaacagttaaaagtaccacgttctctctgaactgtactgggtgtcgatttataaatggcagctaacaatgaataccattgagagagaagtttactgttccagacaaagagaggctcatggcctagattctgtgagaagcagttatgtcaggcggctaggagtgcaggtgattctcaggctccattgtatgggtttcagttttaacagtgatggattgtaacagcagcaggcagcagaagagaccctgactacccaccaagccctttcttgatggcatcatactagatgtgcaaaaccctgttttccagaattacagacaactccagagcgcctgtgctagctgtgtggctgtgtaaaatgcctcccaatccattgttattcctagaacaaactggagcaagctctttggtctgagccaactaagaatttagagtttctttcttcatggctctaactgggttgcagcagctcgttctgagcaagtatgcactctaggaagaaagaaactctgtaagtcagcagaccaggtcagcggagcccatgctgggcttaagcagtaactccccca

SEQ ID NO: 17572 - DNA, 1159 bp, Mus musculus
gtgtcagacccttgaatattgccagatcaggggttggctaggtgagatgtgagcacagaaacggtacttcctctatcgtgtcccatggttccgttcacggatgatgttgggctctgattacctgctcaggtgacagatgctctgatgaccccctccccagcctgtgtcacccccataaaaggttaggaaagactggatatttgcagacagatggacggaccaggaggacgtgttaggagcctgcttccttcagctgtcatgtcatcggcaccgtgccagctagccagtgttagggtagtgtcacccgtgacctgtggattgtacagacccagcactttcaagagagatgggatgctgagtggctgcaaaggttactgggacccatgcagtgtcgaatctaagccagaatgatacctctttctttcaccttgacacagcagtagccatagatacagatcatactctccttgagcttgaggccctgtgacatttggtggtcataatcacaaaacagtttgagaagtctgacctttcaggacccaggctagcccattctttgggacctctgaccctacaagcacctgcttcattcttctcttctggaaagtgagggtgttataggaacatcacctttgaggacttagaacttggcacagggaaagaggaggaaccagccggtcctgggaactcaggctgctgtgaaatcgggtactgttgtctttgacccctgcttttgtcttcgactatcccatcagtgtgagcagcaggggcatttccacctgtctcctgaatgaacctccctgtcctgagaggggagtgaagaaaacaaagcatttccagcggatagagacatgcacttgctgacgtgtcaggacaacacacaggcgtgccatgcctgttttgccgagtccagtgctgtttacagactgccaagtccgttcatgtcgcaagatgggatcctgtggccctgagcctaatagtgccaccatcctcgactgaaagaccacaagttggataatcagattcatcagcaataaaatcctgggtgaggccacctctggtgatgtcatacaggtaacaagtcaccaatcatggcactgaggccagccccagcaagaagaaagccacagccgcagtctcggctgccaaccagcagcaa

SEQ ID NO: 17573 - DNA, 1227 bp, Mus musculus
gccttgacatcctaacaggcctgacacatcctgagactggcctgttgctcattcacctgggtgttttcaaggtcatagaggcttgtttgccagaacacaaggaacagggatagatgtgagaaactgccttgtttctgacggaagcattgaccttagcaacacatttttattaggaacgttccatatcgcatccgagtacgcttgtccagaaaacgtaatgaggatgaggattccccaaacaagctctacacgctggtaacttacgtgcctgttaccacattcaaaagtaagtatcccagcgttccgcaggagttattgtatgtgagatgatgtgtgtcttaactatgttcagtgaagaggtaagcagcaggttaaattatcagatgttccttaaaaactaactggctgggggaagatagtacagaggttgctgggaagggcggcacaggccatgggttgtgcagtggcctccagctggggcaggatgcgtgggtgctgactggctgttactctccttccagatctacagacggtcaacgtggatgagaactaacctgctcgtgtcaaataaagttgcagaactgccttcagggtttggttttcctttctgttgtctgcctcatgggtggaatttttgggtctacagggtgttggaaattaatctgagaatctctgttctgggtacatgggaaattagaaatacgtgaaacattcttttcacagaagtcactttattaggattgtggatttgggttggttttgaaacagggtttcttgtggcactgcttgttctatagaatagggtggccttgaactcagaaatccacctgccttttcctccctagtattggcaattaaatgcccagcttgtttgtaagctctcattttcagttccaggtttatgtgtgagcctaagattaggtaaagattgaggttataacttaaacgtactgaattaacttatgttgtgtgggtcccaggaattggacctgggacatcaactctgcctttccagccatctttgccaaccagtagctcatctctgggatgtgtctgccctcaaaatgacattttaaaaaagtcagtacaaaagaacgatttttattaaaaaccttgaggacaaacattaaaggcatggtttgaacatgtttttgtaagggcatataaagtgaatacgagatatattaaatggtttcaattaccagcattgaaacaaaattagtgcaa

SEQ ID NO: 17574 - DNA, 1163 bp, Mus musculus
agagatttaattaagcacacagacaagctggttaattcactctggcctgggaaaagccagtaacagaaaaaggggtcagcagtgtggttgaaggaggaaattataatttgggaaagcaagggggctagacaaaggcttgctttttaagcttgagaacccaagttcaaatccttagaagtcatgtagaagctgttggtgcacatctgtagtctctgctatgatgagatgggatgtagaagagaacaacccctgaagctgagattggtcagcccagtgcacagaaagctgtaaacagagacacttcccatccccggaccccttccttccttcgaaatggtgaaatgtaagaatgcacactcatttttgttttttgattttttttttttttttttttggtttttgagacagtttcttggttgtcctggaactgcctttgcctcctaagtgctgagattaagggtgtgcaccaccactgcctggccacattcaagtcttgacttcggtgtgtgcctatgcttacataaatatcagaaagtgttggaaagaaaaaactcaaaccacccaccaccacagtcacagcattagatgtgaccaaggaggaatacaatcagatgggagacaaaaatgaggaaatagtactcaaatatcaagaaaagctaagcttaaatggcatggccatgggctagagaaattgccactctcagtgctctcaactccagtcccaagagatttgatgcccctggcctctgtcaagtaccaggccacatgaatggtacacaggcttacatgtgaaccaaaaaaaaaaaaaaaatttttaaaaccatgacagtatgaccactataaccaaaagtgaatgtatgaccaagcaaccaaaacctaagacaactagaatctcttcagttaaattatagaaatgttcttaaatctaaaaaaaaggatataaagaccctaataagtatttaaaattcaaaatagaccagagaagagctcttgttaacagtcaagatgtcaagaagtaaacaaaatctgaagagaaattgattttgtatgttgcagtttctgtaacctgaaaaagccagggaagataatggaattctatgtcctaaaaaaatattaacagaattagtaaaaatgtttctattactgaaacctacacatttcaa

SEQ ID NO: 17575 - DNA, 1234 bp, Mus musculus
ttatttgtttgaacaaggagtaaatgcacaaaatacgcacacacacacaaaaaaatgcatgttactctgacaggtgctggggaatttggaccttaccccacggctccatccaaggtcctgttcttcctgcattgagtccccatggtccttcaggacagaagtgtcacattcaaagataaactttatcaatgaagcctagtgtttactttattctatatgagcaacatactcttatttacaagataaggaaatatcactggagactctatttgaacgctggattccatgttcctcttctgtctcgatgtgtgtacacggctgtagtatttttagctatgcactgggaacaggaaactttgatcattgtctcctgttcgcccgccatactggacttttcccttggaaaaggcagaaatttgacgaagcttctctttcccaccccccacccaatctagccgctgttaacatctgggcacactcttgtctgctgttttcttttctaactaaggcagattgctccaattaaaaaaggctttataaagaaatcgctgttcggctacagaacgacctaaagtaccttctggttacacagatgaacttctttctgaacgctttctagtgcgtcagagaagggtagcgacaaaggtgggaacacataattctgtgaaactggagttacctgacagggctgttttataacaaaagtggtacatttggttagtttccatggaaacaaagaaactaaagaggaacaaaatttgctaaacttcaaatgtttaacactagagattattttttcccaaaaggttcctgtaaggttgaggccagggactctctttatcagtatgaagttagagttgtagttcgtgaaaaacagtttcagttctaacaatgaacttaggggataagcgtgccagcatatttttctcttctgcttccctaattctcattaaaaagaacgattgatattgtatcacaagtcctattcagacctgatattttccataataggatgtttctcatgataatttttgatgtgtgtatgttgatatgggtgtggttctttgtattgtatgtacagaggcgagaggctcacaccagatgcctcccctaccctttcaaggttggtcgtctctcattgaatccaaacctctctctgactaggttagcctggccagcaagcctgagatatttgcccatctctgcctgctggatcccaaaccaggctctgttg

SEQ ID NO: 17576 - DNA, 1198 bp, Mus musculus
caaccaagttagtgcctcccctgccataccagccctgggctggggcccaaaacagggattatgtcccaagcattggaaggggaaagccagcatgagactggtcctcaagccaggctggtcctctgctgatggagggaactggcctcatttatgacctttaacccccttgccaagtcatgtcttttccttcagccactgaccgtacactgaattaacatgaagtgttcccttacagtgagagggtttgcaacaatggtctggggggcggatctgtggtagtgcccctcatgtttggcttcagatggtcccttaagcgtttcaggggtccccaaaatggtttctttgggtatgttcatgtgtgcatgggtatgagtttgtgtccccatatttatgtcttcagtgtgcatgcatgtgagagagatggaaaggagaagatagggagagaagggagggggagggaggtaggggagggagggaaggaggaggggacagtgtatatgtgtatgtatgtgtgtgtatgtgtgtgtgtcttgtgtgtctgtctgtgcctgtgtgtatgtgtatatgtgtgtgtattttttatgtctgtgtgtgtgtgtctgtgtctctgcgtgtgtgtgtgtgtgtgtgtgtatgtgtgtgtgtatgtgtaggtcagagtcaatttggacgttacttctcaggaaccgcccaccttgtgtttgagatagggtttctccctggaacctgggcttcctgtttaggccaggcaggatgtcctggttttatctccccagccctgggattcgaagcgcactttgctttgcatggcctttaccgtgagaattgagggcctcaggtttgtggaacaggaaatttcctgactcgagtcagatttcaagccccaagaaggagcttctaggaacagttttctctcccagcctgcggtgtcagatgaacttgagccgcgttgatgaagtagacacacgttgatgttccatttgtgtccgggttgacgcatggactcttcagggtgcctgtgccgcctgcttgtgaaggagtgcttttgcttctcgctgggagtcggcacaccagtgtcgtgcggctgccccacctgctgccatgccatccagtatcgcgcgcagcagatagcaacctacgtgtaaagatctctgctgtggcaaatcacattttaaatgttgaccaaggctcagagcca

SEQ ID NO: 17577 - DNA, 1194 bp, Mus musculus
gtcttgtttagcattcttcaagcgagtgctactgaatgtgatccatctgaggggttttctttagcaatttacatagtagttagtatacttgctttctttgagttagattttacaggaactctggagttttatttatagtctttataaagcaaagccagagagagattggttgtgttgatgtctgagttttctctttcattcgctctctttttttgtaatttaatttttttttttacttatttactttatatcccgatcactgccaccctcccagtcaccccctcccacattatcccccccccccaacaccctcctcttctgggcaggtagggacccccactgggtatccctcccaccctggcacttcaagtctttgtgaggctaggctctcctctccctctaaggccagacaaggcagcccagctagaagagcatatcccacagacaggcaacagcttttgggatggctccgccacagtttgttgggatccacatgatgaccaagctgcacatctgctacatatgagcaggaaggcctaggtccagctcatgtgtgttcttggttggtggttcagactctggttggtcagggtccaggtgccaaaatcttctaagactccagaccaaagtccccatgggggaaaaaaagtatctatgtatactgtagaaactgagaaggtgtgtgtgttgaggggtgacctggttgccagtggctgatgggctcattcagaggtcattacccaggaactgtttgcaacacacatgccaacatatggtacgcaacccagatgtgtgccttcctgaagatctttactgaggatcagaatcggacaattagaaaccttctcattgtaacttcagagagattactttttaaaaaaaaaaagatttatttatttattatatataagtacactgtagctgtcttcagatactccagaagagggtgtcagatctcattacggatggttgtagccaccgtgtggttgctgggatttgaactcaagaccttcagaagagcagtctgtgctcttaaccgctgagccatctctccagcccgagagattacttttaagtgtggaacattctattaaagtttatattctcaagtaaaaagggaaaggatttaatgtggacccagaaaccctcacctattggtatatttatttaagtagactaaaacttgaaaaaacg

SEQ ID NO: 17578 - DNA, 1333 bp, Mus musculus
gtccctagttctgaagactcaagatcatggcactagaactggcttcatgttggtgactgcctatagtagttagctttctatcatcgtaacaaaaagctatgataatcaagaagagggagttggagatatagatggctggcagttgttaagagaactggctgggttttattcccaatacgtacatggcagctcacaaccatctgtaactccagttgcaggggatccaaacacccttttctggttcccataggccgtgcatgcacatggacatacacacaggtaaaatactcattgtggtggtttgaatacgcttggcccatgagaagaggcgcttttaggaggtgtgaccttattggaggaagtgtgtcactgaacactaccatccctcctccatggctgggaagaaagaacgagaatacgaggaaacgagggtcccacagtctccttcatgacacactcctggtaacttgaatgcttgctgttggccccttcttctcgaatgtacctcccgttcctaaaagtgctgcccacaagactatactttcagggatcatttctatagttcgttactagagaagtttctctgactgtgtagagcacctgaaaccacgaggacgagacgtagcgtcccctcctgagcgtgaagccggctctaggtgctgcatgattgcagctgcctcttgccattgatgatcgttcttctctccttcaggagggtgagagggaaggaacgcagtctgagtgggaaaaaaaaagtgctgcccgctggaaagtgtcccttggaactctgcctttcaaccgctgggctgttctgaagaactcgggtgcaaggtatttaacagcctcaaagacttacagaaaaacttatttttgctatgtgatcattatataagtggtgatccagctcatgtaggagaaaacttcaaaggtgatgatggaggtgggggtgggggtgggggtatcacgtgcttcatctcctaagagaagagatgaggaggggagggaacacaccggagttctgatctgtgggaggcacttgccttctacagaggagacgctctgcctggagagatggggagaagtcctcccaggtgcttctcctttctcacagaaacttcacagacagctcttcattctaggtgtgttgttcaggaaaggatggtcctggagtatgtggctttaatgtgctgagcatttttgagagaggccagagtggattcagaagcgagatctgtcctgtcctcccttgctccccacttaccacaagccatagaaactagaatcctcttcaccagaggccatcataaatgtgggcaagaccatgcacacctgc

SEQ ID NO: 17579 - DNA, 1146 bp, Mus musculus
gagtgaattccaggacacctgaggacataaaggagattttaagaaaacaaccatcatcattatcttgtcgtcatcatcatctgcatctgcatatttgacacctgcatcctcagcctaagtggctatgcttgcattaaaactcagttcatgttcatgttttcctctttctgaaaaacagacttgtattggcatcatgctgatggtgtgtgtgttgggggggggtcacgtgttctcggttgtcatttgagcgtggaactctgatttttatagcattactgtttgaagtatgtcttatcacatgtccttgttaaaggtacccttgtacttcattaaatgcatatagggtgtgtgcaaatgttagctcaccgacagtcatgtgttactctcattataggccactttcgaccagagtttatccgcccaccaccccctctccacatctgtgaggatgaactggcctggctaaatcccacagaacccgagcatgccatccagtgggacagatcgatgtgtgtgaagaatagcactggtgtggagatcaagcggatcatggcgaaagccttcaaaagccccctgtcgtctccccaacagacacaggtatgtatgtatgtatgtatgtatgtttttattacagtgtcctgtctgtgcctatcacagggtgttcttcccaggaagcagtaagtgagcagtcagttgtggatgtgagccagcagaagtagcatcagagggcttcacaatcccagctgctgtgctctgacctttccttgttgacagttttgctctgatgagacaagaggcctaatgatgactagactctattcagtttgtctcggagagaggtaggctaggatgagttggcagcactgttcagttggcagcactgttccaggtacgcatcagtcggccacatcgtctacattgctgcatcaggctggacagcagctctaaagggtgtatggagttattaatgttttctaaaaaatgaggttcagagaatgaatgttgtagactttagctacagtgtctagtggtagaccacagttatctctcctgctaaccaaggttaaaactagatggatcccctgaggaagaagagcaaagatgccaggcggttgtagattttattagatttgcacactttcaagt

SEQ ID NO: 17580 - DNA, 1262 bp, Mus musculus
ttctacttgtgaacagattaaggataaatatatgcaggtgagtaatgtaaatgcttataacattgtcatttgccaagaaaagaagtttctaaaacttgttccttttttcttttccagaatcgtttggtgcgtcttgtgtgtgtgtttctccagtctttgatccgtaacaaaattattaacgtgcaggacttgtttatagaagtgcaggccttctgcattgaatttagtaggatacgggaagctgcaggcctattccggttgctgaagacactggatactggggaaacgccttcagagaccaaaatatcaaaataatacctcactagaacttccctttctattgttcaactgtatttggattggtttttaaacttgtaactcttgagtggattgcttgatctaagaaatataaatgactttatttacttaaagtaaaatttcctttttcctagatgtttcccatggatgaattttggtgagaacttgggagaaatgtttattttagctctcttgctgatgacaatccatatgaatagttattctgaaaatagttattgcaagaaaggtgtaggtgttgctcttttgaatttaaaacacagtacctgtttcttttagaaaacaaactgtaggtttctgaaaaaccaggaatttgctttcgtagcttctagtgtgaagcatggtcagtgagagtgagtgaagacgctgagaatttacggtgagcgtggctcttagtaagcaaggtgtgaaacaaggatgcacatttctgacaacagtgttcctggcccactgacaagcatgggcactctgccaggctgcgagagttggcattttattcttctctcttaaccacagttagtaagggtgtggtttttgtggtcttaaggacaaatacgagctggcacaccagaaatgtatacccaggatgcctgtttggtgaggaggtagaagagtcagtacctgggacagtgtgccttaattttttttttttaagacagggtccatctatgtaattctggcgctcactatgtagagcaggctggccttgaaatcagagatccttctgcctctgcatgctgtgattaaaggtgtataccaccaaatccagcctttttaaaaaatgtctgacataccattttatttaaagaaattatgaagaattccttttatggagatatctctagaaccgatttatggggacagaatctgttctcccacatccggcaaggcttaaaggaagccaagcttggtgattttgtcttact

SEQ ID NO: 17581 - DNA, 1427 bp, Mus musculus
gctcagataacactagaaagcctgtgtgtcatacttactaaatgaaaggatatttctgtatttctcttgctggttgagtttaaaatgggttgtcatttttacatgtaagttttatttaaatgtttctataatttgtttcttgaattattgtctccacatgtgtaactgaggctggacagaccgactgacctaggatggcttttggtgctttgttgtaggagccggcaggagtgagcctcagcatggaggatccatatgctagcaccatcctcactgacagcctcaccgacagagccttggcttgaacaggacattcagttttttactctagggcagagtttgtatacttgaaaacagtggactttattttactttacctttcagattcaggtttgatatacaaagggctgagatattttattcctaaaagacttttaattagccttcatctatttatctactaaattatgatgtctatcataagttttgttgtatcacctgtcacagatgtatgtggaggggttgtttctgagtactagactagcctctgtggtataaaacaagagtctgtctcttgggctttttagacagagctcaccgagttgaagtgtgaagtgtagttccttattgatcacatgaacgtctcctgagcggagactgtagaacttggaaatgagaaatcttgccgtgggcagtggtgcaaactgtggctgaggcccgaggagcttgagttcaagcctgcttcgggctgtgtagccagactgctacaaaggggttaagagagagagagagagagagagagcaagagagagagagggagagcacgcgcgagagcgagagcgagcattcagctggcttgagctgtgtagtctgcagagacttcagaaccacacattccttcttatgtggaattgtgaaaagaacactagatgattttatgatttacatttctacttttattgcctaatttcttttcacacttggaaggagaagggaatttatccatgtttttctacaaactaaaaaaaaaaaaaaaaaaaacctggcaaaaaatgccatattgcatgttaaaaaaagcattaaaatatggattcattaagaaaatcaagtaggcatacagtaatgtctttaaatgattagtatattttggtggatttgatctttacaattaaaaatacttaattaaaagtttgattctgttgttgttagactaaaataacattttcctaaagagattttaagccgattcaatactgtgaccttttatccttcttttctgtttaatgttctcgctggtgaaagtctttgaagactgttgtctaaattctgtatagtgcttagatacatactttgaagagcaaggagtccattgttgttgattctaaacttgtgttgtatgtctactttgtagacaaaaataaatgctt

SEQ ID NO: 17582 - DNA, 1197 bp, Mus musculus
tttttttaaaaagtgtgcacctgagtcctgtgaacattttgttgaacctgaatctgtgtgtgcattctctccaagcccctcagttcctgcaaggacgtactgaacatttctagaggagagaaaggagatttttaaaactacatgtttaaaaaggagccattttgaccctctcagtcagagactacaagcagttaaggagcagtgcagagcctggctgctcggatacctgtagcgggaagctttgccagcattgttgtcgtagcgggcgtcgcctgcagtgctgtgctgactcaagtgctcccatactgctcagtgctctcaggaagcttgagtctcaccttccagtctgcacttctcttcctctgtccacataaaggactttctttaaaagacattacactttaggccttttgggtttaaaaaaaaaaagaaatctgttattaatgtcttctgtgatatatttaggattaacatatgctttgggttattccttccccaataacttttgttgttgttgttttcgggacaggatttatctgtatatcctggctgtcctagaactcaatctgtagaccatgctggcctggatctcatacagatccgcctgcctctgcctcccaggtgctgggagtaaagatgtgcgtacgccaccacacccagcccccagtaacttttacactgtaacataatggaattttaatagttgatgcaaggtactgatttcttactctgcaaatcaccaagtaagtttccagttaataactagtcgtgcagagtatgtgtagaatttttcataagaattaatagaaaatgtccttctagtaatttataaattagatgctggtcttaggctgtgagaaccgatttctaaaaatgtatttgttcttcagttcatttgcaggaaggaatcagtacccattaaaactgctgcacttgctcctcctgttttctcctctccttaggagggagtatcatcccttacgtgtgaggagacagactcatgtgtaactcactgagccaagctcttgggaatataagtaaattgatactattctcttcctatatccaacatttgttcaatatttcctatacaaaacatttgtatgataccaggaacttgttttaaaactgtcaaaagaatgtttaacatttaataatgtttaacgtgtgtctgtgacatacacgtctgggttggga

SEQ ID NO: 17583 - DNA, 1146 bp, Mus musculus
gaaatgttctaaagtttcttttttattaaaaaggattttagcagcccaggtggtggtgtgatgtgccttggagggcagagacaggtgcatttctgtgagttccaggctagtctggtctacagggcagccagtactgttacacagagaaagcctatcttcaaaaacaacaacaaaaaaaggcttttagcttgtaccttgtaattttgggtgtcttatagatgtgtcctagttgttgctatacatgtttctggactgctggatgctcattttcctagagatagttactacttgcttccaggtatgtcttcccagtgacactagggacattaatgcttagggttaggttcaaactggtcccagtatcaccttgcaggcagaggccaccttagaagggtacccttctggcatttcagtaacaaagttcctgtggttaagatcacggtggaaatgctatggactctatgtctcagtaagataacatagtctatcttctgttttcaccagatgaataaataaaaaaagaaaacataatgttcaaggtgtggttaaggaaaaggtttattgtagatgtgagggagagcacagcctgactgaactgggccatgagagaagagagagaggggaaagggagaagaaagagggcagagaaggttgagaaagccaggagaccaacagcaccaagaggaccagaaccacagtggctgggctttataggaaggggagcaaggctcagggctggagaggtctcacaggggcaggcaaatgccagcctgggtgactggaacaggttcttgtgggtagggagagacttgcatatgttaaataggcacctcagttagccatttgttccaaggttctttgagaccaaactattcataggactttctgctctgcaaagtgagcctcctccatccagaagcttctgactcgctgtcttagggctttactgctgtgagcagacaccatgaccaaggcaagtcttataaaaaacaacatttaattggggctggcttacagggtcagaggttcagtccattatcatctaggtgggagcatggcagcatccaggcaggcatggcacaggagaagctgagagttctgtgtcttcatccaaaggctgctagtggaagactgacttccaggcaa

SEQ ID NO: 17584 - DNA, 1208 bp, Mus musculus
gcactgactgctcttccagaggtcctgagttcaattcccaacaaccacgtggtggctcacgaccatctgtaatggggatctgatatcctcttctggtgtttctgaagacagctacagtgtacgtctataaacaaaaaacaaacaaacagaaatcctaaaaagaaaaaaaacaactgtctttatttaaaaaaaaaatagtcatgatatcctgcagtcctgtcttcgcagcaaaagcctctcctatcttagacttactgaaagcaatgctgtcagctcaccctgcagaccactgtatggtgggactgagttgtctgttacacactgtacagtgggactgagttgtctgttacacctgccttcttccttctgtccaaagccgtagccaacaaactcctcacgagtcctttcctgatgctgactctggttactcactggcagttggcctgaaaggcttgtcaccttttctctccctaccttcctctttcctaacttccttttccttcctgtgtcttaggacttgactgcgttggccaaagagcttcgagcagtggaagatgttcggccacctcacaaagtaacagactactcatcctccagtgaggagtctgggaccacagatgaggaggaggaggacgtggaacaggagggggctgatgattctacctcgggaccagaagacaccagagcagcgttagtgcttgctgggctcaagagaagagccttcccactgggccttctctccgctgcagccttctgccctgttcatgaactcaatgacatacagcttttatacacacacacacacacacacacacacacacactatacatgcctcctgtacacaccacatatatacagacacacactacatgtgccccatttatataccacacactcaacaccataccatatacacacactacacacacaccctgtacacaccacacaaccaaatacgacacatgccctgtacacaccacatgcttaacaccacaccacataaacaaccacacagacacacacattataccacaccacacacacacacacacacactacatcatacacatatacacacatacaaacacacatatcagcgtcttccccacaatatctcagcatgtctctttttcttttaatttaagggttcagtaaaagggatgtttcagtgtggtatgacttaattagacataagaactcattctaat

SEQ ID NO: 17585 - DNA, 2963 bp, Mus musculus
aatcagagaaggaaatgctgcttgctcttgagtggctgggttccaggccccacaggcccctgagtagccttctgctttgtggtcaggagctgaggctgatgcctgacattgcatggctgtgcttatgtccccagtgtgtctgctcgccattcgtcctcccttctctcatggctgtttgtagaagtggcatgaaagaccccagggaagttgacttgttctggtactgactcatgactacacagtgacagaacaggcagacagcacacggccctcttttggtcacttgagtaaagtgaacccagggcctcttgcatgttaagtaggctttcagagatatgcctagcactgaggcagaactcctggcaaaccaagtcgtcatgggctaggactcagcatccgtgcatgggaatctgaagtggcttgtcaagactcctcctcgttaatgctttctctctctctctctctctctctctctctctctctctctctctctcaaagcatatatccggtcgaatcagacaatgggctggggagagaaggcaatagagatacgatctgtggaaactggtcacttggatggtgtatttatgcacaaaagggctcagagactaaagttcctgtgtgaacgcaatgacaaggtaaggctcccttacggcgtctgggcacttgtggctgctgtgtacagtggcttgtggtccactggcagtgatgatgcattctaaaataaaccaaggagacactttgtttgggcctatctgggtttgggcaccaggagatagtgaatggctgctgactgtgtcctctcattgtgttgcaggtgttctttgcctccgtccgctctggtggcagcagccaggtctatttcatgaccttaggcaggacttctcttctgagctggtagaggcagtgtgagctgggatcactgacctctggagtcggcaagaccctgagcgagaccttggaattccttgcaactggagctcagagctgtgctggtgcagccaggacagctgtctgcaggccacctgcgcgtcgcatcgggtcgggtcgggccctctcccctccctcctacactttttgccagtttattcccattctctccttttcctttctcaaataaatcaaggctgcattgcagctggtgctgtctggactccaccatcggtgctaggagtgcttgggaatggactcagaccgggaagagcgagtgagcgagcgagcgctgcgccttccctgcagctccaggaggccgtctccgagcgagcgagcgagcgagcgactgtcctatgggtgtctgaagggtgtgatgagcgcaccgtcagactttggcagtgggcacaaagaagtgaaaagtgggcgtaagaagcagcttgcagaagcagagaacagatttaatatagtaacattaacaatgtatttaattgacatttctctttttgtaatgtgacagtatgtggacagagaagaaggtgcaggtttaagaagttaatatttataaaatgtgaaagacacagttactaggataccttttttttgtgggtggggcttagggtggggtggggtgggttaaagggtcccattttgtttctttgaaagttttttggaggggattgtcctggccaagaactcagtcatttttctgtgtaccaagttttgcctaaattgtgcaggtggttcttaaaaaagaaagaaaaggaaaagaaaagtgtgtgtcttgttggagggccagaagtttgtcgtgtgacagtattagcccggcctcggctacaggtttaaagtctgttaggcctaagtgcagctccccgtggcctgcacacaccgtaggagaaggtcagctttcctgtggggttttgtttcattttgttttgttttttgcctacctcactgtttttaatgcattgagaggtgacttagtttatggttttggcagaaaacattaatgtttaatttaaccttaataccaaaactatctgattaaagtttgactttgtcacaagtctaaatcaggtacaaaaaaggaaaaaaacaaaaaataaaaaacaagcctgtctatgacagcagggagtagccttgtagctgctgcagtctgcttctagcatgcagactgctctgttctcaccaagttcaccattagcgggtgacaggcagccagctgccacctgtgacacataagagatgtcattgttctcagttgggtttggaagcaggcaggggtcacactggggagtcacacagactgttgatgttgcaggagcctttcttgggagtgacggtgtgtcccttttctaagaatgcaatgcactaaaactgttttaagaatgtagtttgccctacttcttcatagatggcccctccctgcctgtgtttcaggtgtaaaatcgacactctggcttttctccttttctcacgtgctctcttgttctctttttttaaaactaatttttctttatgaatatgtctgtgacatttgtaataaatgtcttgtaataatttgcttcatggcttcatggtcatcactacattctctgaggatgctagtgtctcagtgaagaggcagcgctgagccacaccctgccatcttgctctgaatgggaaagccttgtgacagcttctgtgtgcttcattccccaaacacaagctcggggtttcaggggctggatcttcctttgtggttaattccttttacagcatgcttcatcaatccctgtcccatgtaacagtcatccgtacctactgccaagcctgtaccatcggcctcagttcacacagctgtcagtcattcacttctgtttaatgaacaacaaaaatctagtgaaaaacacaatatactactgcagttaaatggttggttgttaataccaacaaagataggtcaggataagcgagcgacccttattccgtttaggggaaaaggaagcaaaaggctgtatgacttcagagtaatgcaaaaactgtttctcttc

SEQ ID NO: 17586 - DNA, 1112 bp, Mus musculus
ttcccagtgtacagttgtcagattatctttcccagtccttctgatacattggctctcttgctgggctgcacgaagccatgcattaatgtaattgttgtaagaagctgcacacacctcaggaggtctgttctagtaccagtcagtcttagaattttactgctgtgaacagacactacaaccaaggcaactcttataaggacaacatttaattagggctggcttataggttcagaggttcactgcattatcatcaagacaggagcaaggcaacatcctggcaagcgtggtgtaggaggatctgagagttctacattttcatctgaaggctgctaggagaagactggcttccaggcagctaggatgatggtcttaaagtccacacccacaatgacacacctactccaacaaggccacacctcctaagagtgtcatttcctgggacaagcatatacaaaccaccacacagtcctagtcacttattgacagacaacctagactccagcagagtttccttttttctgcccactgttgaacttactcgagcataagaaacaccaagcttcctttttcaaattcctgaagagctcttggagggattctgatctggtgagaagcttagcatgcttgtaaacacagagtgagaggagacaggaatggtggaaaaactgtaagtcattgttgaaaagggttgggatggagaaaagaaaatattaaaacatcaatcccccccccatgcatagattgaaaaaacactaataccaggcatgggtgcttttaatggacagagttaagcaatccattcatccagtcaaccagtatgtaatatgcgttcaggttttatttaatataataccgataaaaaaatggataaaaagacccaaattctaccctcatgggtgttatgttctaatggggagagagtgaggtaggtcaaattaattggttacctgtactaataaatattacgtgaattcagtaacatagggctatgtctgcacacacacatgttcggacatatgtgtaacctttagcaaaagtcttcggcaacaagccagggggatttcttcagaagtagtgatttagattctaacaatgtaagaggaacaagaaag

SEQ ID NO: 17587 - DNA, 1216 bp, Mus musculus
gcatcattggctccatttccttcactataaggttatactagttgctagagtagctgttttgcaggaaacttgaacttacaaccaaacccagttttcactgggtaagctgagctggtctcacgccagtttcttcaggaaactgctgaagaataattgaaataaggattatacatgaggtatgtgtacttgtgaagcactgagggatattagaaagttactgatcatagaactctaagaaggggcaagggggtcagtttttaagtagcccaggtatggatgattcccaggaccactgagggcccgattcctctcccttagagctttttaatctctgagataaaattattcttgtctcaccctgttgtaaagattgcacctaaaatatgtcaaatgcttctccagttgcttccacctggacatttgtaccctgttgattgacatcaagggagagaagtagcaagaaggtggtgtctgaagcagccagtttcatgtctggaaatgtggtcccaagtacttgctccactacttgtctttgtggctttttggactcagcactcaagctgacactttagactcttcatctgcagaaaattgtgacaggtaagatctgtctgtttttactccctctatccatgtagtactcaaagcataccctgacctaaaataaatgcattaggtgactctgaggaggaaaaaaaaactgtagttttggacacacacacacacggacacacacacatggacacacacaaaaaccaagactgagagtgaaagaactgtaatgagttctatggatgtaaagatggatataaactaaagtggatatatgaatatccatcctactcccaagggaaaggggactttgctgacaatgcctgcctacttcttcctggacagagcctctactgagtggagctctggggaaattttagactcatacttcaaatatgtctaggtagaagggctgcttcgagagagttcacccacaccatataataacaccaaaactcccaacctgggagccaggaacccaaagactgaaaactagctaccagagtggaaaatgcctacctcaggccatgaggacctgatgccactggcatcttattgagagcattgtcagtataacacaataggcgcttcaaacagaaagaagattttattcattaatattctgatttggcaactctagtgaacagagacatgggggaactga

SEQ ID NO: 17588 - DNA, 1178 bp, Mus musculus
ttagcccagcccaacatcttctccatctactgctggagtgtgtgactggaccagttctgcagatccaaaggtgcaggatctccatgacacagggcaacatatttgagaggaatatttgagaggagtcccagtaaggcttttgtattgaccgagtagcagaagccagaggccttgaaccaatgcaatgaacactaaagatgtcttgacagaagggtatactgtgtgatacactgtcaccattacagcttccatgatgaaattttgttctgttttgtttttattttatttattttacttttggtagggaggttgcaagggcgatgtgaagggacagggagagtggggttgggatgcatgatgggaaactcacaaagaatcaataaagaattaaaagaaggagaggaagtaaagaaggaaggaggaggaggaaaggggaagggtgtgctattacccaggcaataaatgatatttttgactaaggaatttgatgggctaaggtctagatgtattttgatggtagaaccaatagaatttgttgacttttaaggaaaaaaaagaagagtcaagtaagatcttagcctttctgactagtgtggaaatgaagagtgttacttaggcacagtcatctaattcttaaaatattcctaaatttcagaaaactaatcaaattactttaaaaggaaagtttcatttgactagtaaatgttgcctacgttgtgaggatgacattctaagattcatgagtgttggttgtcgtagtggtggtactggtaagttacgtgaaccttctcttcataggcactgctgtagagaatggatgagagccataagacaaggtttggagggctggggaagagggaagatgtaagtttaatttgacagtggctttaatctcttgtgagtctctcagctgaggtgactggaaacttgaatgtagttgaatataattgtgctcttagtcttctggaaaagaagtacaaatggctcgccattgaccaggaatggctacatcttagtgctgaccttcagacgtctctgaactatgctatgtgtactctcatttcatttgcttgttgaggttcttcagttcaagcagtgctattagcacacttcagcacttaccccagtaatgagcaaaccactcagtgctcctcatactttctttcaaagctaaactt

SEQ ID NO: 17589 - DNA, 1333 bp, Mus musculus
atggaggtcctgaatactgtgggactttcttgaggtttaaaataggtttggaaaaacaagtctttcccttctctccttccctctattccttcttcccttccttacaatgtcttgactttcatgtcccaattagggaagaatttctttttaaaatagagctttgtacacatcctctaaaaattcttttcctaagcagaagcataaagcagttcacagtattgtggtaaatattgccacctgcatcttgaagggttcgccaagaaaagtgtgttgatggtgttgatggaaaagctttctgctctttagttacgtgtgccattttgtcccatggaaagcaaaagggaagtcagggcttgccattcctccttctcagtggcgtaagctgctgtgtctttagaatgttcctggcttacagggaccctgcctactcttttcttatgtggcttgtatgagctttatctttttaaaatgagactgatttcaaagtcttcaggctgggtgatcatgttaaaggcagtactctgtgtcggaaagtttgggaatgatggtcctagaattctagacataagaaaatccagaacgtgtgacagtcgtggtggggtgcttatcagtatgctgtggagtaggcagttgtcattatcaggacgctggagttggaattcactgtagaatgcagtaggaagtggactctgttgaagaggttcatgtgcttcctgcagggcttcctgcagggctgtcccatgcagggctaagtgatgctctttttatttttgtgcaagtagcattatccacttgtataatgcaagaatgtgagaaaatactgtttgctttacattcgtgacgtctagcgtctgctccttccttttgtttcttactaagaaacattttaagcaaaagatacttcatagatttttccatatataatcttcacattgttggtttgcctcgttagtatgccttagtgtcatctcctttctttggtttgttaaaaccaccattttagctcacttatcagaacagccttacagagataattcacccttgcaggccagcgctgtgcttagacaccaaccctgtaggtttctgctttttttttccagactaaatttgtacacataagacaaaatttatgatattaaatattgcatgaattgttgatgctacagtaaggttttaaatacattgttacctacggggttgataagttaatattgttgaactgtgctcctatatgtaatcgtcaaggtacattttaaaagtgcagcttttagagtacaacaacacattgtattttatattcagttgacctctctgcttccactggcgtttctct

SEQ ID NO: 17590 - DNA, 1567 bp, Mus musculus
aggagagagttagccatttgacggttttaagtcagtgggaacttatttttagttacttggtgaaattaaattttaatttgtatatttaacgtacagagtaggttggtaataacagctgaactgtgtaacattgttgcttcaaattgaagtttatactatgaacactcagcatctacgctcacatagcagcatattgttgagctgtcttgagtttgagaagtgaagacgcattgacccatgcactgtgtattacgtagtgcctccgtcacggagcgccatgcctcctgaagggatcatggaattggcttcctccatgcgatgaagcatcgtctgctgggcatctggagcagcagcattgggagggttgttctgaagtagtgtttcagtttgggctagaaggacttgatgagagtggtgaacaagtctggagtaagtttccttaatagtgtatagggttagtattgttgcttttgattctgtattccagtgaggcaagatattcttattcctgggttgggcaaatagatggcattagaggcagtgggaagctcttgagttacaaaaggcaccacatccaccatctgcaagtcagcctcctttttttcctactttgtatctcctggtctctttcccgttctccttcctcttaggtctaagcttcagacttaggtttgcagattgtattgtgtctgtgaccttactccattcactaaggggtgaagatagtctgaccccaatcctcttcatctgagggggtgttagctcactgtgtggatcctacagtctggaatcctgcagcaccagggcactgaattgcttcccaaaggctgtcacagcagcatagctttccagggtagccttattagtgtaggcagctgccagacccttggaagagtggctcactactgccataaggctgtatttgctggtattaaaattcttcagaattgaaattttcatttgaaattctgttttggttgacttaagtttgagagacagttcaaaaactgatgtagagactcattcaacagcaatgactttttaaaaacttacattaagtaaaactgccagtagattaaatcctccccatacgtaagagctttctctactcactactgtggaatccgagcattgttgagaggctactaatcggtcaacatgtttttaagtgtgcttttattaaatgcttgtgtacgttttgtaattcagtgtagaaaaggttgaccttgtaatgtacattttttgtatgtatagccttttaagtagccttgtccttatttaaataaactgaataaaactatcttgagcaggcctgtcatttgcaatacaaataaaatgaaaagtttttcctataacttatgtgactgaagaaactggttcaggaagtgccattatgtgtggcataatcttaaccacattcaagcagcccagttgggttcccctttgtgagcaagagggcagttagtgatgtcgtgtttaggttgtcttgattgatgtgaagatgtgcatccccaagtgttcctaagtaataaatgggacaaagcaggaactgaattgagagaccctt

SEQ ID NO: 17591 - DNA, 1145 bp, Mus musculus
acattcaagaacagaatgctccccaaggcctcctcctaacagaccccactgagatatggaaatcaccatctatgacgacagaggtggaaggtaaaccacagaattacaggtcccgcatccagctgggaccttcgtctatcacctggccaatggcagagtgtccctacctcctctccagagcattattctcttgtctctgctgccagagccacgatggcacacctggagtgaccgctcgtcactcagcatccactttgtctcccaattgtgtaggactctatgatcttttgatttgtttccaagaaaataaaggaagtagttctctttttaaaattcaaagccatttaaaacacaggctgttggtcagcccaagccagagtcgttttcttaccagacaccagtgtcactggttctccttgtcccttgggtcagtttcctagccggctttatgatcccacaagtcatatcttagctcagttcctcccccagattagtagcaggctttgaggctgtgtgtgcctgtggtccggctgatccaccacccaagtccccaagctaccagccttgaccttcttcagatcttcagattgatttctgctgttcaatttcagaggctccttgagagaataatatatgttacttgttttatttagtattgtagttattattaaggcagtatttaatgcaattccggttgtttctttgaaagcatttctgttaacatgcattacctcgagatgttggggagatgttgtgcgtgttgcttgttcattccacagataagtaagcacaatgagcagaccctcagccatcagctccgcctgccccagctctgcccggtgtggaagaagcaagtgtcctaagcacctaactctagttttgttacaagtataacttaggagaaaaaattggtagaaataatacagtatgttgctaatttgtaacctacttctaaactctgactcatagcctcctcacatacagtattcagggcacagaaatcttttgattgactcaagtaagttttggcttccatgtaacttgcaagttaaagttaatttttccagctcttctttatctctgtactctcttagtatcagaatttcttatgttctttcttttaggaatttgagagcactgtgttt

SEQ ID NO: 17592 - DNA, 1107 bp, Mus musculus
tgaggctgagcaatgtatgtatctttttgttgcctataggctattcagtgccttttcttcttggagggtgggtagaaggaatcttctgttgtgaatcggatgttttgtagatgaagaaattatccaaactggccgtatgctcccaactgtgaatggctttctggagagagatctgtggtatggggatgtttcttgaaacctgcactccactgcggtttgtctcctgcctgtaagcatctgccttaggtgggggatattttggcttttcattataatttgaactgtattaaattatatcattctaaacttgattaataggtttatctcaattgggatgtctaaagtcttgattcctatgggaagtagagattctttgttactgatttggctagttacacaattgcatgtatcttctcttaacactgttttgtgtttttgtgaaagaggttgccacagtgtttcttacagggctttggcgcttttatagttagtgtgatgtagtccttgattggtagaacgtttcctttaggaagcatgaataaatgatttaagtggcagatccagggccctgctagtgtatcagatcctgcacagaggttgaggctgaaagtgggtggatgtagaggtgacagatcatgttattcttcagacctctcttgtgtggtggactactgttgggattgtattttgaataagcagtgttcacttagtgagtatttattgacaccaactgtgtgccagggctgtgggagccagccagagatctacccccagggagcctgtaaactagcctagagatttcttttagtccacactcatttctgacctttaatcaccatctccacatttgcgtgagaggtgacactacacaaagtctctcccaccctccctaacaccaacagaaatgtagttccagtattttggagaaggataactctttcccaagttccttggaggtggaggctagaatggtcacctgagagttgttccctggtgtagctgtgtacgttggtggctgcctcaacatactcatccactcatgtagatatttcaaggactcagatgaaagtcagaccatttgtttgcacacagtagactcttgttttg

SEQ ID NO: 17593 - DNA, 1181 bp, Mus musculus
aagccagcctttccatcattttctttttttgatggctaaccttcagtatccagtcctcttcagggtttgcttttgtcttttctggatgtggctttggcctgctgaacgcagaactcctgagctttgtgagtgcttaaggggcagctgctcctcctatctttgattgcagctaactgaatagttaacaccaatagactaatgccagggaggggtaacaaaataccacatcctgttagttaaaagctgtcacggcttcactccctggcagaaaggggctagagaactttacaatagcatgcaggagctgatacacaggtgtggactccttctacagttgggcattgtgctgtcggtcgctctgaagcccagcagaaagctcccacagcagaaaacccaggtccccacctgacctcatgtggcttttcagagaatgatcagcaagggcttcacttatttaatctttgcctcacccataaaagagaagtgagtacctcatttttcagaagaatattgagtcttggaagttactgttgtgctgaagaacacacacacagtaagtcatgaggttgaaattcaaacccactgaagcctgcctgcactctctgccgttctccagtctcttaggggaccccagggagaaaggagtgagctgtctagttgattcctgtggactgttcatattggtgacttggttgctccctggctgttgtttcgatttaccctttgtatgcatttcagttaagttgcttggatggctccttgctgctctcaatggagttggtgcaaagcacatgggctgtctctgcagggtgcctgatattcgccagggcatttaagttttctgacaggccctttacttcttggttctttggagtgcttgaggtttttatcctgttaagggagatattgatttgtggcagtgcatttgctgtagaagtcctgggcttttctgtactgactgaagtctgcttgccatcttgccttagaacatgattcctagccaagtcactctgtggaactacttcattaaagatcaggacacagcccaacacacccctggaaaattttaacattaaagaagcaggacctcaattctgtctcagatgtccagacttctctagaagtctgtcatgacttcacccactctgtggtgtcattactatctacccttgtgcacgtat

SEQ ID NO: 17594 - DNA, 1166 bp, Mus musculus
tttgatagtgtaggagtgggcatggtgtacaacgtatgtccagtgccagctgaatcatttgccatgtcttcacaggcctcggaaagacgcgcaggaagccaagcgctcgggatgcttccccaacgccaagcactgatgcggagtacccagccaatggcagcggtgctgaccgcatctatgacctcaacatcccagcctttgtcaagttcgcctacgtagcagaacgagaggatgagctgtccctggtgaagggctcccgtgtcacagttatggagaaatgcagtgatggctggtggcgtggcagcttcaacgggcagatcggctggttcccctccaactacgttttggaggaagcggacgaagctgcggctgaggcccccagcttcctgagcctacgtcggggcactgcactgagcaatgggcagggtgcacgggtgctgcacgtggtgcagacgctgtaccccttcagctcggtcactgaggaggagcttagtttcgagaagggggagaccatggaggtgattgagaagccggagaatgaccctgaatggtggaaatgcaaaaatgcccgaggccaagtgggcctggtccccaaaaactacgtggttgttctcagtgatgggcctgctctgcaccccgctcacaccccccagatcagctacaccgggccttcagccagcgggcgctttgctggtcgggagtggtactatggcaacgtgacacggcaccaggccgagtgtgcgctcaatgagcggggcgtcgagggcgacttcctcattagggacagcgagtcctcggtaagtgcccagcagctcctgtgctggagccacattgccagaaggaagctaaatgcgcagttccctgacctgtgaggtcagggattccagccagccctggtctgcggatattcaataatgttacaggtcatttgcctcattctccattgttaaatgtctcaccaagtcatgtaagttaggcttaatcctgggcataacaaaaagccttatttctagggttctgatctaccatggttctaggtgtccactggagttctcggaaccgtcctcagaaagaaccacattgtggaagggccgtgactggtaaccgttcccatggcatgttcactgactatacttgaaatagcaaaatggtatttgagggcacgt

SEQ ID NO: 17595 - DNA, 1279 bp, Mus musculus
tgctgaatccatgttgacctctgtgagtgaaatgtagaactgtaggaatgtggaaaatagagaacgacctacaacaacttgggaatcacagtgtgtctgtgagttgagtcgtccaagccaacagtgtctggacagtggtggtaaaacatgatcattaacctggaggtggcctctcagttacctcagcagtgtgtctcgctcccacacaaatcacatactcagctccatcatttccttcagcttggcttttgcctgtccagagctcagtacaaatgtggagggcacaccacacccctaccttctgcagcacagcatacacaccatcttgggaaacataaatctttccaatgccactctgcctatcttctgaaaagtcttggctgacctgcaggcttgttcttccatcctcctgtacacccctttcaatgagagttagcccaaggttatattaggaacatttaacaatgtctaccttgcttggcattgaagcctaaaaaccattactcctcttagggggtaagttgattatgtacagtggagcctaacggagctataggttgcccagttcatcctgcgttgtgttcatgtgtggggctgtgctgtactgctgtctggagtgggtcagatccctggcctctggagtactgttgctgctgctgctaaagggtctggatgctcgctctcaggcctgccagcgcggtaaagggagaggaggccattccctgtccgctaaagcagctctgcagactaagaaaaaaatgtcagattgacagttcaaccttaagagtgttcagaagtgttctcattcaaatcccttagatctgtagctcctttttgcaaaaagacttatatagagttcttgcaaaatggttagtacagggtagaaatgcttttcacccaaaatatgtatgtaaaagtataatggaaagagaaacttaaagcccaggatcagatatgcctttatcacttgactccctgaaatgcccacgtggctaatgtgtgaactgtactaagagggaacttctgaggctggctttttcgatatttgggttttgcctggtttgcattttttttttttttttttttactttactgtggctgcagtagacacgagtgtgtgtcttacatatggagactttcatttacttctcagagaaaggatttgtaagtttggcttgcctactggcaatcccacaagcatgctatgtaaagttagtcttgatatgaaactatacacatggacttggaatgtgtgtcttcaataaaacacgtgtacagc

SEQ ID NO: 17596 - DNA, 2374 bp, Mus musculus
gccagagtgaagaagggccggacgcgccacagctgagttagttagccttaggttatgagactctgttttacccgtatgaggtggacttttgtgggatttttttttttattttttaaagacttcaacaggtgtcatgaagaacaaactggaattttattctgaagcttgctttaaagacactgatgtgcctaaacgctcccttgaaagctgcagactttgccttgcacttttaaatctgtctttgttatgtacaacagcctagatgcatctctgctattttcaggtttttatcttctgttagagtgtatgctgtaactgtcattgacagttttatttactggtttctttgtgaagctgaaaagaaacattaaatggggtggaaaatgtcaattttatttataaaagtgggtacttataaatgagatgttacactatgcataaagaataaaaatcctagaggtactgtcgggtgggtggggcaccagtgtttgttggggacagatgaaaggactcagttgggaagctttgtctttctcttttaattcagagttttctgaaggtctagttttcagttgcaaacttgactttgaaacatccctgttggttcttgatcaaagatatttgaaatcactactgtgttgtgctgcatattggggtgggggtggggggacaacgttaacatattcttggttaaccatggttaaatatgctattttaataaaatattgaaactcatcagacatgggttttgagctacaaagattgacatctgctttacatcagatgtgtggtggctgagaagaacacttgagatcttagtttaagggaattctgagaacatccaggtttataccatatttaacttgatatgtaactgttagaaccatctgtgtgctctctgggctgaatctgtgcatatgatacacacatgtgtatatgtctttatctgaaatacttaaaaccaactgtttcaaatttcaggattgattttgtttaactcgggaatattttcctgaactatgcaatttgagcatcctcaatcccaaagatgaagtgttctgaagtctcaaatcccagtgtctcttcagcactggggatttggagcttggagcccaaattaactgtggtgtgaagttttcagaactcagcctgggttaagttttgtgtcctgtagcagcacaaaccaggtggaacaaaaacttccatttttctggtgtagaattcaaacaagttttgctgagtcaaacgaaaactttaggagtttttattttcattaagaactttctcaaggtgtgtgctaggattttattttgtaccttaaaataaatgggaggaaaacacaatgcacaaaatgcagtctatctccaaccagattagccttacatggtaacagcagaaacccttacaaatgcccaaggaataaaggtgtggaccaggtgatagaagtaactagaaacaggagcacatgtaatatctgagcttggtctatttttcaaaaccatgttgggctgctttttaaaaaaaaaatagggtgtgtgtgtgtgtatttatatttattttatgaaaggctctagaattcaggcaaagatgctctgactctgtcatgctaaatttaccagaagattctgaaactgaaccaaagattgaacatgatataagaaaaaagaatcaagaataacctacacaaacatacacactagctaagcacttacttggtcactaactacacccccagcctctttctcttaggccccgttattttggtctgaactgagtgacacatcatttacagaaaaaaaaaaaaaaaagcagaagcttgcttggaaattagtaatgctaaatttggaccaaagaaaaatgtggacagaaatagctcagagctttacgtataattaggagtatcgaaaagtctgaagacccagaattcccttagcttattgcacactaatatctggaattctttcataagattcactcttctggtatccatagagtattttcaaagtagtagaagagaaacagatgtgtataacgtcctctaagaaagtgagtaatgcattgtagaaaacactgagttttgaattaagtatgatagtatcttaggcagagagggaaatgaagctgagaggtaggtaggtgatggcggctgtggtccagcaggatctacatgtaggtacctactctttggtgcaatagtgttacgaaagatgaggtatctgtacaaactgatgaaggcagagggggaccctttctgtagttcctggctcttgcttgctccttctattgattgctactctgagaaagcaccatctgtgaaccagaacgtggcccttccacactccaaaatctgtcagcactttgatcttagactttg
